United States Patent Application Publication US 2007/0214517 A1 - sequence listing, part 24

SEQ ID NO: 29085 - protein, 311 aa, Arabidopsis thaliana
  peptide (1)..(311): Ceres Seq. ID no. 13645703
  misc_feature (1)..(122): Pfam Name: Integral membrane protein DUF6 Pfam Description: Integral membrane protein DUF6
  misc_feature (1)..(275): Homolog of NCBI NO: 15221371 NR Description: phosphate translocator-related [Arabidopsis
  misc_feature (1)..(272): Homolog of NCBI NO: 15228248 NR Description: phosphate translocator-related [Arabidopsis
  misc_feature (1)..(271): Homolog of NCBI NO: 27476065 NR Description: Putative phosphate/phosphoenolpyruvate
  misc_feature (1)..(272): Homolog of NCBI NO: 17064798 NR Description: phosphate/phosphoenolpyruvate translocator-like
  misc_feature (1)..(272): Homolog of NCBI NO: 15237644 NR Description: phosphate translocator-related [Arabidopsis
  misc_feature (1)..(271): Homolog of NCBI NO: 30681126 NR Description: phosphate translocator-related [Arabidopsis
  misc_feature (1)..(271): Homolog of NCBI NO: 9759107 NR Description: phosphate/phosphoenolpyruvate translocator
  misc_feature (1)..(308): Homolog of NCBI NO: 38567832 NR Description: OSJNBb0020J19.10 [Oryza sativa (japonica
  misc_feature (1)..(311): Homolog of NCBI NO: 15219121 NR Description: glucose-6-phosphate/phosphate
  misc_feature (1)..(311): Homolog of NCBI NO: 18411611 NR Description: glucose-6-phosphate/phosphate
MNKWIFQKLDFKFPLSVSCVHFICSSIGAYIVIKVLKLKPLIVVDPEDRWRRIFPMSFVFCINIVLGNVSLRYIPVSFMQTIKSFTPATTVVLQWLVWRKYFDWRIWASLVPIVGGILLTSVTELSFNMFGFCAALFGCLATSTKTILAESLLHGYKFDSINTVYYMAPFATMILGIPALLLEGSGILSWFEAHPAPWSALIIILSSGVLAFCLNFSIFYVIHSTTAVTFNVAGNLKVAVAVMVSWLIFRNPISYMNAVGCGITLVGCTFYGYVRHMLSQQTPGTPRTPRTPRSKMELLPLVNNDKLEGKV

SEQ ID NO: 29086 - DNA, 1152 bp, Arabidopsis thaliana
  misc_feature (1)..(1152): Ceres Seq. ID no. 12324473
  misc_feature: MA Experiment ID: 108434 Result: Down-regulated in Transcription
  misc_feature: MA Experiment 108434 PARAMETER Experiment Name: At_Root_Tips_cDNA_P Parameter: Tissue Value: Root Tips
  misc_feature: MA Experiment ID: 108464 Result: Up-regulated in Transcription
  misc_feature: MA Experiment 108464 PARAMETER Experiment Name: At_Germinating_Seeds_cDNA_P Parameter: Age (day) Value: 4 vs. 0
  misc_feature: MA Experiment 108464 PARAMETER Experiment Name: At_Germinating_Seeds_cDNA_P Parameter: Tissue Value: Germinating Seeds
  misc_feature: MA Experiment ID: 108488 Result: Down-regulated in Transcription
  misc_feature: MA Experiment ID: 108561 Result: Up-regulated in Transcription
  misc_feature: MA Experiment 108561 PARAMETER Experiment Name: At_100uM_ABA_cDNA_P Parameter: Timepoint (hr) Value: 6
  misc_feature: MA Experiment 108561 PARAMETER Experiment Name: At_100uM_ABA_cDNA_P Parameter: Tissue Value: Aerial
  misc_feature: MA Experiment 108561 PARAMETER Experiment Name: At_100uM_ABA_cDNA_P Parameter: Treatment Value: 100uM ABA vs. No Treatment
  misc_feature: MA Experiment ID: 108573 Result: Up-regulated in Transcription
  misc_feature: MA Experiment 108573 PARAMETER Experiment Name: At_Drought_cDNA_P Parameter: Timepoint (hr) Value: 6
  misc_feature: MA Experiment 108573 PARAMETER Experiment Name: At_Drought_cDNA_P Parameter: Tissue Value: Aerial
  misc_feature: MA Experiment 108573 PARAMETER Experiment Name: At_Drought_cDNA_P Parameter: Treatment Value: Drought vs. No Drought
  misc_feature: MA Experiment ID: 108579 Result: Up-regulated in Transcription
  misc_feature: MA Experiment 108579 PARAMETER Experiment Name: At_4deg_Cold_cDNA_P Parameter: Temperature (deg C) Value: 4 vs. 22
  misc_feature: MA Experiment 108579 PARAMETER Experiment Name: At_4deg_Cold_cDNA_P Parameter: Timepoint (hr) Value: 6
  misc_feature: MA Experiment 108579 PARAMETER Experiment Name: At_4deg_Cold_cDNA_P Parameter: Tissue Value: Aerial
  misc_feature: MA Experiment ID: 108585 Result: Up-regulated in Transcription
  misc_feature: MA Experiment 108585 PARAMETER Experiment Name: At_5mM_NaNP_cDNA_P Parameter: Timepoint (hr) Value: 6
  misc_feature: MA Experiment 108585 PARAMETER Experiment Name: At_5mM_NaNP_cDNA_P Parameter: Tissue Value: Aerial
  misc_feature: MA Experiment 108585 PARAMETER Experiment Name: At_5mM_NaNP_cDNA_P Parameter: Treatment Value: null
  misc_feature: MA Experiment ID: 108595 Result: Up-regulated in Transcription
  misc_feature: MA Experiment 108595 PARAMETER Experiment Name: At_Ler-pi_Ovule_cDNA_P Parameter: Plant Line Value: null
  misc_feature: MA Experiment ID: 108607 Result: Up-regulated in Transcription
  misc_feature: MA Experiment 108607 PARAMETER Experiment Name: At_100uM_ABA_cDNA_P Parameter: Timepoint (hr) Value: 4
  misc_feature: MA Experiment 108607 PARAMETER Experiment Name: At_100uM_ABA_cDNA_P Parameter: Tissue Value: Aerial
  misc_feature: MA Experiment 108607 PARAMETER Experiment Name: At_100uM_ABA_cDNA_P Parameter: Treatment Value: 100uM ABA vs. No Treatment
  misc_feature: MA Experiment ID: 108667 Result: Up-regulated in Transcription
  misc_feature: MA Experiment 108667 PARAMETER Experiment Name: At_2mM_SA_cDNA_P Parameter: Plant Line Value: WS
  misc_feature: MA Experiment 108667 PARAMETER Experiment Name: At_2mM_SA_cDNA_P Parameter: Timepoint (hr) Value: 1
  misc_feature: MA Experiment 108667 PARAMETER Experiment Name: At_2mM_SA_cDNA_P Parameter: Treatment Value: 2mM SA vs. No Treatment
  misc_feature: MA Experiment ID: 20000144 Result: Down-regulated in Transcription
  misc_feature: MA Experiment 20000144 PARAMETER Experiment Name: At_42deg_Heat_cDNA_P Parameter: Temperature (deg C) Value: 42 vs. 22
  misc_feature: MA Experiment 20000144 PARAMETER Experiment Name: At_42deg_Heat_cDNA_P Parameter: Timepoint (hr) Value: 1
  misc_feature: MA Experiment 20000144 PARAMETER Experiment Name: At_42deg_Heat_cDNA_P Parameter: Tissue Value: Aerial
  misc_feature: MA Experiment ID: 20000171 Result: Down-regulated in Transcription
  misc_feature: MA Experiment 20000171 PARAMETER Experiment Name: At_42deg_Heat_P Parameter: Age (day) Value: 14
  misc_feature: MA Experiment 20000171 PARAMETER Experiment Name: At_42deg_Heat_P Parameter: Organism Value: A. thaliana
  misc_feature: MA Experiment 20000171 PARAMETER Experiment Name: At_42deg_Heat_P Parameter: Plant Line Value: WS
  misc_feature: MA Experiment 20000171 PARAMETER Experiment Name: At_42deg_Heat_P Parameter: Temperature (deg C) Value: 42 vs. 22
  misc_feature: MA Experiment 20000171 PARAMETER Experiment Name: At_42deg_Heat_P Parameter: Timepoint (hr) Value: 1
  misc_feature: MA Experiment 20000171 PARAMETER Experiment Name: At_42deg_Heat_P Parameter: Tissue Value: Aerial
  misc_feature: MA Experiment ID: 20000182 Result: Up-regulated in Transcription
  misc_feature: MA Experiment 20000182 PARAMETER Experiment Name: At_2mM_SA_P Parameter: Age (day) Value: 14
  misc_feature: MA Experiment 20000182 PARAMETER Experiment Name: At_2mM_SA_P Parameter: Organism Value: A. thaliana
  misc_feature: MA Experiment 20000182 PARAMETER Experiment Name: At_2mM_SA_P Parameter: Plant Line Value: WS
  misc_feature: MA Experiment 20000182 PARAMETER Experiment Name: At_2mM_SA_P Parameter: Timepoint (hr) Value: 6
  misc_feature: MA Experiment 20000182 PARAMETER Experiment Name: At_2mM_SA_P Parameter: Tissue Value: Aerial
  misc_feature: MA Experiment 20000182 PARAMETER Experiment Name: At_2mM_SA_P Parameter: Treatment Value: 2mM SA vs. No Treatment
  misc_feature: MA Experiment ID: 20000224 Result: Down-regulated in Transcription
  misc_feature: MA Experiment ID: 20000234 Result: Down-regulated in Transcription
  misc_feature: MA Experiment 20000234 PARAMETER Experiment Name: At_Siliques_P Parameter: Age (day) Value: 21
  misc_feature: MA Experiment 20000234 PARAMETER Experiment Name: At_Siliques_P Parameter: Organism Value: A. thaliana
  misc_feature: MA Experiment 20000234 PARAMETER Experiment Name: At_Siliques_P Parameter: Plant Line Value: WS
  misc_feature: MA Experiment 20000234 PARAMETER Experiment Name: At_Siliques_P Parameter: Tissue Value: Less Than 5mm Siliques vs. Whole Plant
  misc_feature: MA Experiment ID: 20000235 Result: Down-regulated in Transcription
  misc_feature: MA Experiment 20000235 PARAMETER Experiment Name: At_Siliques_P Parameter: Age (day) Value: 21
  misc_feature: MA Experiment 20000235 PARAMETER Experiment Name: At_Siliques_P Parameter: Organism Value: A. thaliana
  misc_feature: MA Experiment 20000235 PARAMETER Experiment Name: At_Siliques_P Parameter: Plant Line Value: WS
  misc_feature: MA Experiment 20000235 PARAMETER Experiment Name: At_Siliques_P Parameter: Tissue Value: 5-10mm Siliques vs. Whole Plant
  misc_feature: MA Experiment ID: 20000265 Result: Down-regulated in Transcription
  misc_feature: MA Experiment 20000265 PARAMETER Experiment Name: At_Open_Flower_P Parameter: Age (day) Value: 21
  misc_feature: MA Experiment 20000265 PARAMETER Experiment Name: At_Open_Flower_P Parameter: Plant Line Value: WS
  misc_feature: MA Experiment 20000265 PARAMETER Experiment Name: At_Open_Flower_P Parameter: Tissue Value: Closed Flower vs. Whole Plant
  misc_feature: MA Experiment ID: 20000436 Result: Up-regulated in Transcription
  misc_feature: MA Experiment 20000436 PARAMETER Experiment Name: At_Drought_P Parameter: Age (day) Value: 7
  misc_feature: MA Experiment 20000436 PARAMETER Experiment Name: At_Drought_P Parameter: Organism Value: A. thaliana
  misc_feature: MA Experiment 20000436 PARAMETER Experiment Name: At_Drought_P Parameter: Plant Line Value: WS
  misc_feature: MA Experiment 20000436 PARAMETER Experiment Name: At_Drought_P Parameter: Timepoint (hr) Value: 12
  misc_feature: MA Experiment 20000436 PARAMETER Experiment Name: At_Drought_P Parameter: Tissue Value: Whole Plant
  misc_feature: MA Experiment 20000436 PARAMETER Experiment Name: At_Drought_P Parameter: Treatment Value: Drought vs. No Drought
  misc_feature: MA Experiment ID: 20000438 Result: Down-regulated in Transcription
  misc_feature: MA Experiment 20000438 PARAMETER Experiment Name: At_Shoots__P Parameter: Age (day) Value: 14
  misc_feature: MA Experiment 20000438 PARAMETER Experiment Name: At_Shoots__P Parameter: Tissue Value: Shoots vs. Whole Plant
  misc_feature: MA Experiment ID: 20000460 Result: Up-regulated in Transcription
  misc_feature: MA Experiment 20000460 PARAMETER Experiment Name: At_10percent_PEG_P Parameter: Age (day) Value: 12
  misc_feature: MA Experiment 20000460 PARAMETER Experiment Name: At_10percent_PEG_P Parameter: Organism Value: A. thaliana
  misc_feature: MA Experiment 20000460 PARAMETER Experiment Name: At_10percent_PEG_P Parameter: Plant Line Value: WS
  misc_feature: MA Experiment 20000460 PARAMETER Experiment Name: At_10percent_PEG_P Parameter: Timepoint (day) Value: 12
  misc_feature: MA Experiment 20000460 PARAMETER Experiment Name: At_10percent_PEG_P Parameter: Tissue Value: Whole Plant
  misc_feature: MA Experiment 20000460 PARAMETER Experiment Name: At_10percent_PEG_P Parameter: Treatment Value: 10percent PEG vs. No Treatment
  misc_feature: MA Experiment ID: 20000495 Result: Down-regulated in Transcription
  misc_feature: MA Experiment 20000495 PARAMETER Experiment Name: At_Guard_Cells_P Parameter: Harvest Date Value: 8/2/2002
  misc_feature: MA Experiment 20000495 PARAMETER Experiment Name: At_Guard_Cells_P Parameter: Organism Value: A. thaliana
  misc_feature: MA Experiment 20000495 PARAMETER Experiment Name: At_Guard_Cells_P Parameter: Tissue Value: Guard Cells vs. Leaves
  misc_feature: MA Experiment ID: 20001247 Result: Up-regulated in Transcription
  misc_feature: MA Experiment 20001247 PARAMETER Experiment Name: At_Far-red-induction_P Parameter: Age (day) Value: 7
  misc_feature: MA Experiment 20001247 PARAMETER Experiment Name: At_Far-red-induction_P Parameter: Light Value: Far-red vs. White
  misc_feature: MA Experiment 20001247 PARAMETER Experiment Name: At_Far-red-induction_P Parameter: Organism Value: A. thaliana
  misc_feature: MA Experiment 20001247 PARAMETER Experiment Name: At_Far-red-induction_P Parameter: Plant Line Value: Columbia
  misc_feature: MA Experiment 20001247 PARAMETER Experiment Name: At_Far-red-induction_P Parameter: Timepoint (hr) Value: 1
  misc_feature: MA Experiment 20001247 PARAMETER Experiment Name: At_Far-red-induction_P Parameter: Tissue Value: Whole Plant
  misc_feature: MA Experiment ID: 20001451 Result: Up-regulated in Transcription
  misc_feature: MA Experiment 20001451 PARAMETER Experiment Name: At_Far-red-induction_P Parameter: Age (day) Value: 7
  misc_feature: MA Experiment 20001451 PARAMETER Experiment Name: At_Far-red-induction_P Parameter: Light Value: Far-red vs. White
  misc_feature: MA Experiment 20001451 PARAMETER Experiment Name: At_Far-red-induction_P Parameter: Organism Value: A. thaliana
  misc_feature: MA Experiment 20001451 PARAMETER Experiment Name: At_Far-red-induction_P Parameter: Plant Line Value: Columbia
  misc_feature: MA Experiment 20001451 PARAMETER Experiment Name: At_Far-red-induction_P Parameter: Timepoint (hr) Value: 24
  misc_feature: MA Experiment 20001451 PARAMETER Experiment Name: At_Far-red-induction_P Parameter: Tissue Value: Whole Plant
  misc_feature: MA Experiment ID: 20001905 Result: Up-regulated in Transcription
  misc_feature: MA Experiment 20001905 PARAMETER Experiment Name: At_Drought_Reproduction_P Parameter: Age (day) Value: 40
  misc_feature: MA Experiment 20001905 PARAMETER Experiment Name: At_Drought_Reproduction_P Parameter: Organism Value: A. thaliana
  misc_feature: MA Experiment 20001905 PARAMETER Experiment Name: At_Drought_Reproduction_P Parameter: Plant Line Value: WS
  misc_feature: MA Experiment 20001905 PARAMETER Experiment Name: At_Drought_Reproduction_P Parameter: Timepoint (day) Value: 10
  misc_feature: MA Experiment 20001905 PARAMETER Experiment Name: At_Drought_Reproduction_P Parameter: Tissue Value: Rosettes
  misc_feature: MA Experiment 20001905 PARAMETER Experiment Name: At_Drought_Reproduction_P Parameter: Treatment Value: Drought vs. No Drought
atcgatcactgaatcttcttcttcttcttcttcttcttcttcttcttcttcttcttccttctctcaagaacaggtaaaactctctcctcttctccttctttttctctcctctctcttctctcttttaacaaaaaaaaaactgtcttttcttcatttctgttcttttttttggttgccgagaaaaacagaggataattttccgatctctgttttttttttctcggtgaccagaatcggttggttctgttttttttttttttttttccttctttgttattgttatcttattaatgaatcttttttgttgttataatttacagattttttttaaacgagcttgatcaataaattctctcaagatctatggcggaagagcatcgatgtcagacaccagaaagcaaccgtctctgtgttaacaactgtggcttcctcggctccgccaccatgaatctctgttctaattgttacggcgatctttgtctcaaacaacaacaacaatcctcctccatcaaatccaccgttgaatcttccctctctgtatctcctccgtcgtcatcatcatcggagatctcttctccgatcatccctcctctccttaaaaatccatcagtcaagctagaggtaccggagaaaaaggcggtgatttcgctgccgacgacggagcagaatcagcaacagaggccgaatcggtgcacgacgtgtaggaaacgggtcgggttaaccggattcaagtgccggtgcggtacgatgttttgcggggttcataggtacccggagatccatggatgcagctacgatttcaaatcggccggacgtgaagagatcgcgaaagcgaatccgttggtgaaagcagcgaagcttcagaagatatgatcagagccgttcgatgcgttgacttttcctctcgtaagtcttcatttctacgcgtatgtgtgtcctccgtcccccgagaaatacggatggtgtcgatttgattgatctcagccgttggatcaaaaatggtttattattgtaaaagattgattatgtatttatcaaagggacacgtgtcacgtggttttaggatggagacgctttcgctttctctccttcattttattttctttttcctttcagaaagaaataagattattcgcgttggctttttctttt

SEQ ID NO: 29087 - protein, 169 aa, Arabidopsis thaliana
  peptide (1)..(169): Ceres Seq. ID no. 12324474
  misc_feature (110)..(150): Pfam Name: AN1-like Zinc finger Pfam Description: AN1-like Zinc finger
  misc_feature (10)..(169): Homolog of NCBI NO: 15234402 NR Description: putative protein
  misc_feature (3)..(169): Homolog of NCBI NO: 11361253 NR Description: hypothetical protein p85RF [imported] - Prunus
  misc_feature (14)..(168): Homolog of NCBI NO: 15235819 NR Description: similar to zinc finger - like protein
  misc_feature (4)..(169): Homolog of NCBI NO: 35187687 NR Description: zinc-finger protein [Oryza sativa (indica
  misc_feature (7)..(169): Homolog of NCBI NO: 25082726 NR Description: expressed protein [Arabidopsis thaliana]
  misc_feature (7)..(169): Homolog of NCBI NO: 18403408 NR Description: expressed protein
  misc_feature (1)..(169): Homolog of NCBI NO: 15225894 NR Description: putative zinc finger protein
  misc_feature (1)..(169): Homolog of NCBI NO: 18404102 NR Description: expressed protein
  misc_feature (1)..(169): Homolog of NCBI NO: 15231686 NR Description: zinc finger - like protein
  misc_feature (1)..(169): Homolog of NCBI NO: 14596167 NR Description: zinc finger-like protein [Arabidopsis thaliana]
MAEEHRCQTPESNRLCVNNCGFLGSATMNLCSNCYGDLCLKQQQQSSSIKSTVESSLSVSPPSSSSSEISSPIIPPLLKNPSVKLEVPEKKAVISLPTTEQNQQQRPNRCTTCRKRVGLTGFKCRCGTMFCGVHRYPEIHGCSYDFKSAGREEIAKANPLVKAAKLQKI

SEQ ID NO: 29088 - protein, 142 aa, Arabidopsis thaliana
  peptide (1)..(142): Ceres Seq. ID no. 12324475
  misc_feature (83)..(123): Pfam Name: AN1-like Zinc finger Pfam Description: AN1-like Zinc finger
  misc_feature (1)..(142): Homolog of NCBI NO: 15234402 NR Description: putative protein
  misc_feature (1)..(142): Homolog of NCBI NO: 11361253 NR Description: hypothetical protein p85RF [imported] - Prunus
  misc_feature (1)..(141): Homolog of NCBI NO: 15235819 NR Description: similar to zinc finger - like protein
  misc_feature (1)..(142): Homolog of NCBI NO: 35187687 NR Description: zinc-finger protein [Oryza sativa (indica
  misc_feature (1)..(142): Homolog of NCBI NO: 25082726 NR Description: expressed protein [Arabidopsis thaliana]
  misc_feature (1)..(142): Homolog of NCBI NO: 18403408 NR Description: expressed protein
  misc_feature (1)..(142): Homolog of NCBI NO: 15225894 NR Description: putative zinc finger protein
  misc_feature (1)..(142): Homolog of NCBI NO: 18404102 NR Description: expressed protein
  misc_feature (1)..(142): Homolog of NCBI NO: 15231686 NR Description: zinc finger - like protein
  misc_feature (1)..(142): Homolog of NCBI NO: 14596167 NR Description: zinc finger-like protein [Arabidopsis thaliana]
MNLCSNCYGDLCLKQQQQSSSIKSTVESSLSVSPPSSSSSEISSPIIPPLLKNPSVKLEVPEKKAVISLPTTEQNQQQRPNRCTTCRKRVGLTGFKCRCGTMFCGVHRYPEIHGCSYDFKSAGREEIAKANPLVKAAKLQKI

SEQ ID NO: 29089 - protein, 103 aa, Arabidopsis thaliana
  peptide (1)..(103): Ceres Seq. ID no. 12324476
SITESSSSSSSSSSSSSSSFSQEQVKLSPLLLLFLSSLFSLLTKKKLSFLHFCSFFWLPRKTEDNFPISVFFFSVTRIGWFCFFFFFFLLCYCYLINESFLLL

SEQ ID NO: 29090 - DNA, 1246 bp, Arabidopsis thaliana
  misc_feature (1)..(1246): Ceres Seq. ID no. 12396125
  misc_feature: MA Experiment ID: 108488 Result: Down-regulated in Transcription
  misc_feature: MA Experiment ID: 108573 Result: Up-regulated in Transcription
  misc_feature: MA Experiment 108573 PARAMETER Experiment Name: At_Drought_cDNA_P Parameter: Timepoint (hr) Value: 6
  misc_feature: MA Experiment 108573 PARAMETER Experiment Name: At_Drought_cDNA_P Parameter: Tissue Value: Aerial
  misc_feature: MA Experiment 108573 PARAMETER Experiment Name: At_Drought_cDNA_P Parameter: Treatment Value: Drought vs. No Drought
  misc_feature: MA Experiment ID: 20000182 Result: Up-regulated in Transcription
  misc_feature: MA Experiment 20000182 PARAMETER Experiment Name: At_2mM_SA_P Parameter: Age (day) Value: 14
  misc_feature: MA Experiment 20000182 PARAMETER Experiment Name: At_2mM_SA_P Parameter: Organism Value: A. thaliana
  misc_feature: MA Experiment 20000182 PARAMETER Experiment Name: At_2mM_SA_P Parameter: Plant Line Value: WS
  misc_feature: MA Experiment 20000182 PARAMETER Experiment Name: At_2mM_SA_P Parameter: Timepoint (hr) Value: 6
  misc_feature: MA Experiment 20000182 PARAMETER Experiment Name: At_2mM_SA_P Parameter: Tissue Value: Aerial
  misc_feature: MA Experiment 20000182 PARAMETER Experiment Name: At_2mM_SA_P Parameter: Treatment Value: 2mM SA vs. No Treatment
  misc_feature: MA Experiment ID: 20000224 Result: Down-regulated in Transcription
  misc_feature: MA Experiment ID: 20000265 Result: Down-regulated in Transcription
  misc_feature: MA Experiment 20000265 PARAMETER Experiment Name: At_Open_Flower_P Parameter: Age (day) Value: 21
  misc_feature: MA Experiment 20000265 PARAMETER Experiment Name: At_Open_Flower_P Parameter: Plant Line Value: WS
  misc_feature: MA Experiment 20000265 PARAMETER Experiment Name: At_Open_Flower_P Parameter: Tissue Value: Closed Flower vs. Whole Plant
  misc_feature: MA Experiment ID: 20000495 Result: Down-regulated in Transcription
  misc_feature: MA Experiment 20000495 PARAMETER Experiment Name: At_Guard_Cells_P Parameter: Harvest Date Value: 8/2/2002
  misc_feature: MA Experiment 20000495 PARAMETER Experiment Name: At_Guard_Cells_P Parameter: Organism Value: A. thaliana
  misc_feature: MA Experiment 20000495 PARAMETER Experiment Name: At_Guard_Cells_P Parameter: Tissue Value: Guard Cells vs. Leaves
  misc_feature: MA Experiment ID: 20001905 Result: Up-regulated in Transcription
  misc_feature: MA Experiment 20001905 PARAMETER Experiment Name: At_Drought_Reproduction_P Parameter: Age (day) Value: 40
  misc_feature: MA Experiment 20001905 PARAMETER Experiment Name: At_Drought_Reproduction_P Parameter: Organism Value: A. thaliana
  misc_feature: MA Experiment 20001905 PARAMETER Experiment Name: At_Drought_Reproduction_P Parameter: Plant Line Value: WS
  misc_feature: MA Experiment 20001905 PARAMETER Experiment Name: At_Drought_Reproduction_P Parameter: Timepoint (day) Value: 10
  misc_feature: MA Experiment 20001905 PARAMETER Experiment Name: At_Drought_Reproduction_P Parameter: Tissue Value: Rosettes
  misc_feature: MA Experiment 20001905 PARAMETER Experiment Name: At_Drought_Reproduction_P Parameter: Treatment Value: Drought vs. No Drought
aatacctaaattaaattcgatttttgagacaaagctcgacaagtcgtcggcggcggtgtaaaaatagtcggagctatggcgatgcaggccggagttggcttatccaggatctttctcttagccggagcaggttacactggtacgatcatgatgaagaatggaaaattgtcggatttgttgggtgaattgcagagtttggtgaagggaatggagaaatctggagaagggtctgagggagattctgatgtttctgatgctatagctgcacaggttcgccggttggctatggagattcgacagctagcttcgcagcaacacataacggtcatgaatggagtttctggtgcaaacctacaagcccttgctgttcctgctgcggcattgggagctctcggatatggttatatgtggtggaagggactctcattcactgaccttatgtatgtgacaaaagccaacatggctgctgcagtggctaacttgacaaagaatctggagcaagtttctgagactcttgcggctgcgaaaaggcatttaacacaaaggattcagaatctggatgataaggtagaaaagcagatcgatctctcgaaggaaatcaatagccaggttatttctgctcgtgagaatatcagctcacttgagatggatttggaatcattgcataatttgattactggactggatgggaagttggacacgctggaatacaagcaggatgtcacaaatgttttcatgctaaacttgtataactattttggaggcaagagcacaaagctgcctgaaatggaacagcttcagcttcctgtaaaccagagggctcgtaatttgcttgcagatgttgaaactaagggtctgaaaaacttggctgaagagctgtttaaaagcaatggcacacaggtgacaaccacagtgaaacaaatcagtttgagtaaagtgaatgtgaagtcgaggccattgttatcaagggctgcttcagctaagtgttgatatggaagttttcctgatggcggtttggcttgcgggatgtatataacaaaactcttacttatacaaatggtctcgtgagccgtagaatgctctcttacatctattcgttggtttggcttttttcccccaaaacttgggtcttatgatattttggtttgcactttggaggtttttcctcgaattggagtttgtttattgacatgtgtagtgtccacttttgaactttgacgcaatttaaaataaagtacatgtgggg

SEQ ID NO: 29091 - protein, 304 aa, Arabidopsis thaliana
  peptide (1)..(304): Ceres Seq. ID no. 12396126
  misc_feature (7)..(217): Homolog of NCBI NO: 30688826 NR Description: expressed protein [Arabidopsis thaliana]
  misc_feature (29)..(303): Homolog of NCBI NO: 15128438 NR Description: contains EST D16001(C2001)~similar to Oryza
  misc_feature (7)..(214): Homolog of NCBI NO: 34894218 NR Description: P0439B06.30 [Oryza sativa (japonica
  misc_feature (1)..(276): Homolog of NCBI NO: 34906300 NR Description: unnamed protein product [Oryza sativa (japonica
  misc_feature (1)..(299): Homolog of NCBI NO: 18390460 NR Description: expressed protein
  misc_feature (1)..(258): Homolog of NCBI NO: 7487252 NR Description: hypothetical protein At2g02730 [imported] -
  misc_feature (1)..(266): Homolog of NCBI NO: 15227027 NR Description: expressed protein
  misc_feature (1)..(304): Homolog of NCBI NO: 21537323 NR Description: unknown [Arabidopsis thaliana]
  misc_feature (1)..(304): Homolog of NCBI NO: 18396143 NR Description: bZIP family transcription factor
  misc_feature (1)..(298): Homolog of NCBI NO: 25361065 NR Description: protein T7N9.6 [imported] - Arabidopsis thaliana
MAMQAGVGLSRIFLLAGAGYTGTIMMKNGKLSDLLGELQSLVKGMEKSGEGSEGDSDVSDAIAAQVRRLAMEIRQLASQQHITVMNGVSGANLQALAVPAAALGALGYGYMWWKGLSFTDLMYVTKANMAAAVANLTKNLEQVSETLAAAKRHLTQRIQNLDDKVEKQIDLSKEINSQVISARENISSLEMDLESLHNLITGLDGKLDTLEYKQDVTNVFMLNLYNYFGGKSTKLPEMEQLQLPVNQRARNLLADVETKGLKNLAEELFKSNGTQVTTTVKQISLSKVNVKSRPLLSRAASAKC

SEQ ID NO: 29092 - protein, 302 aa, Arabidopsis thaliana
  peptide (1)..(302): Ceres Seq. ID no. 12396127
  misc_feature (5)..(215): Homolog of NCBI NO: 30688826 NR Description: expressed protein [Arabidopsis thaliana]
  misc_feature (27)..(301): Homolog of NCBI NO: 15128438 NR Description: contains EST D16001(C2001)~similar to Oryza
  misc_feature (5)..(212): Homolog of NCBI NO: 34894218 NR Description: P0439B06.30 [Oryza sativa (japonica
  misc_feature (1)..(274): Homolog of NCBI NO: 34906300 NR Description: unnamed protein product [Oryza sativa (japonica
  misc_feature (1)..(297): Homolog of NCBI NO: 18390460 NR Description: expressed protein
  misc_feature (1)..(256): Homolog of NCBI NO: 7487252 NR Description: hypothetical protein At2g02730 [imported] -
  misc_feature (1)..(264): Homolog of NCBI NO: 15227027 NR Description: expressed protein
  misc_feature (1)..(302): Homolog of NCBI NO: 21537323 NR Description: unknown [Arabidopsis thaliana]
  misc_feature (1)..(302): Homolog of NCBI NO: 18396143 NR Description: bZIP family transcription factor
  misc_feature (1)..(296): Homolog of NCBI NO: 25361065 NR Description: protein T7N9.6 [imported] - Arabidopsis thaliana
MQAGVGLSRIFLLAGAGYTGTIMMKNGKLSDLLGELQSLVKGMEKSGEGSEGDSDVSDAIAAQVRRLAMEIRQLASQQHITVMNGVSGANLQALAVPAAALGALGYGYMWWKGLSFTDLMYVTKANMAAAVANLTKNLEQVSETLAAAKRHLTQRIQNLDDKVEKQIDLSKEINSQVISARENISSLEMDLESLHNLITGLDGKLDTLEYKQDVTNVFMLNLYNYFGGKSTKLPEMEQLQLPVNQRARNLLADVETKGLKNLAEELFKSNGTQVTTTVKQISLSKVNVKSRPLLSRAASAKC

SEQ ID NO: 29093 - protein, 280 aa, Arabidopsis thaliana
  peptide (1)..(280): Ceres Seq. ID no. 12396128
  misc_feature (1)..(193): Homolog of NCBI NO: 30688826 NR Description: expressed protein [Arabidopsis thaliana]
  misc_feature (5)..(279): Homolog of NCBI NO: 15128438 NR Description: contains EST D16001(C2001)~similar to Oryza
  misc_feature (1)..(190): Homolog of NCBI NO: 34894218 NR Description: P0439B06.30 [Oryza sativa (japonica
  misc_feature (1)..(252): Homolog of NCBI NO: 34906300 NR Description: unnamed protein product [Oryza sativa (japonica
  misc_feature (1)..(275): Homolog of NCBI NO: 18390460 NR Description: expressed protein
  misc_feature (1)..(234): Homolog of NCBI NO: 7487252 NR Description: hypothetical protein At2g02730 [imported] -
  misc_feature (1)..(242): Homolog of NCBI NO: 15227027 NR Description: expressed protein
  misc_feature (1)..(280): Homolog of NCBI NO: 21537323 NR Description: unknown [Arabidopsis thaliana]
  misc_feature (1)..(280): Homolog of NCBI NO: 18396143 NR Description: bZIP family transcription factor
  misc_feature (1)..(274): Homolog of NCBI NO: 25361065 NR Description: protein T7N9.6 [imported] - Arabidopsis thaliana
MMKNGKLSDLLGELQSLVKGMEKSGEGSEGDSDVSDAIAAQVRRLAMEIRQLASQQHITVMNGVSGANLQALAVPAAALGALGYGYMWWKGLSFTDLMYVTKANMAAAVANLTKNLEQVSETLAAAKRHLTQRIQNLDDKVEKQIDLSKEINSQVISARENISSLEMDLESLHNLITGLDGKLDTLEYKQDVTNVFMLNLYNYFGGKSTKLPEMEQLQLPVNQRARNLLADVETKGLKNLAEELFKSNGTQVTTTVKQISLSKVNVKSRPLLSRAASAKC

SEQ ID NO: 29094 - DNA, 1385 bp, Arabidopsis thaliana
  misc_feature (1)..(1385): Ceres Seq. ID no. 12396466
  misc_feature: MA Experiment ID: 108607 Result: Up-regulated in Transcription
  misc_feature: MA Experiment 108607 PARAMETER Experiment Name: At_100uM_ABA_cDNA_P Parameter: Timepoint (hr) Value: 4
  misc_feature: MA Experiment 108607 PARAMETER Experiment Name: At_100uM_ABA_cDNA_P Parameter: Tissue Value: Aerial
  misc_feature: MA Experiment 108607 PARAMETER Experiment Name: At_100uM_ABA_cDNA_P Parameter: Treatment Value: 100uM ABA vs. No Treatment
  misc_feature: MA Experiment ID: 20000069 Result: Up-regulated in Transcription
  misc_feature: MA Experiment 20000069 PARAMETER Experiment Name: At_100uM_ABA_Mutants_cDNA_P Parameter: Plant Line Value: CS23
  misc_feature: MA Experiment 20000069 PARAMETER Experiment Name: At_100uM_ABA_Mutants_cDNA_P Parameter: Timepoint (hr) Value: 6
  misc_feature: MA Experiment 20000069 PARAMETER Experiment Name: At_100uM_ABA_Mutants_cDNA_P Parameter: Tissue Value: Aerial
  misc_feature: MA Experiment 20000069 PARAMETER Experiment Name: At_100uM_ABA_Mutants_cDNA_P Parameter: Treatment Value: 100uM ABA vs. No Treatment
  misc_feature: MA Experiment ID: 20000070 Result: Up-regulated in Transcription
  misc_feature: MA Experiment 20000070 PARAMETER Experiment Name: At_100uM_ABA_Mutants_cDNA_P Parameter: Plant Line Value: CS24
  misc_feature: MA Experiment 20000070 PARAMETER Experiment Name: At_100uM_ABA_Mutants_cDNA_P Parameter: Timepoint (hr) Value: 6
  misc_feature: MA Experiment 20000070 PARAMETER Experiment Name: At_100uM_ABA_Mutants_cDNA_P Parameter: Tissue Value: Aerial
  misc_feature: MA Experiment 20000070 PARAMETER Experiment Name: At_100uM_ABA_Mutants_cDNA_P Parameter: Treatment Value: 100uM ABA vs. No Treatment
  misc_feature: MA Experiment ID: 20000071 Result: Up-regulated in Transcription
  misc_feature: MA Experiment 20000071 PARAMETER Experiment Name: At_100uM_ABA_Mutants_cDNA_P Parameter: Plant Line Value: CS8104
  misc_feature: MA Experiment 20000071 PARAMETER Experiment Name: At_100uM_ABA_Mutants_cDNA_P Parameter: Timepoint (hr) Value: 6
  misc_feature: MA Experiment 20000071 PARAMETER Experiment Name: At_100uM_ABA_Mutants_cDNA_P Parameter: Tissue Value: Aerial
  misc_feature: MA Experiment 20000071 PARAMETER Experiment Name: At_100uM_ABA_Mutants_cDNA_P Parameter: Treatment Value: 100uM ABA vs. No Treatment
  misc_feature: MA Experiment ID: 20000182 Result: Up-regulated in Transcription
  misc_feature: MA Experiment 20000182 PARAMETER Experiment Name: At_2mM_SA_P Parameter: Age (day) Value: 14
  misc_feature: MA Experiment 20000182 PARAMETER Experiment Name: At_2mM_SA_P Parameter: Organism Value: A. thaliana
  misc_feature: MA Experiment 20000182 PARAMETER Experiment Name: At_2mM_SA_P Parameter: Plant Line Value: WS
  misc_feature: MA Experiment 20000182 PARAMETER Experiment Name: At_2mM_SA_P Parameter: Timepoint (hr) Value: 6
  misc_feature: MA Experiment 20000182 PARAMETER Experiment Name: At_2mM_SA_P Parameter: Tissue Value: Aerial
  misc_feature: MA Experiment 20000182 PARAMETER Experiment Name: At_2mM_SA_P Parameter: Treatment Value: 2mM SA vs. No Treatment
  misc_feature: MA Experiment ID: 20000184 Result: Down-regulated in Transcription
  misc_feature: MA Experiment 20000184 PARAMETER Experiment Name: At_Shoots__P Parameter: Age (day) Value: 7
  misc_feature: MA Experiment 20000184 PARAMETER Experiment Name: At_Shoots__P Parameter: Tissue Value: Shoots vs. Whole Plant
  misc_feature: MA Experiment ID: 20000211 Result: Up-regulated in Transcription
  misc_feature: MA Experiment 20000211 PARAMETER Experiment Name: At_0.001percent_MeJA__P Parameter: Age (day) Value: 14
  misc_feature: MA Experiment 20000211 PARAMETER Experiment Name: At_0.001percent_MeJA__P Parameter: Organism Value: A. thaliana
  misc_feature: MA Experiment 20000211 PARAMETER Experiment Name: At_0.001percent_MeJA__P Parameter: Plant Line Value: WS
  misc_feature: MA Experiment 20000211 PARAMETER Experiment Name: At_0.001percent_MeJA__P Parameter: Timepoint (hr) Value: 1
  misc_feature: MA Experiment 20000211 PARAMETER Experiment Name: At_0.001percent_MeJA__P Parameter: Tissue Value: Aerial
  misc_feature: MA Experiment 20000211 PARAMETER Experiment Name: At_0.001percent_MeJA__P Parameter: Treatment Value: 0.001percent MeJA vs. No Treatment
  misc_feature: MA Experiment ID: 20000234 Result: Down-regulated in Transcription
  misc_feature: MA Experiment 20000234 PARAMETER Experiment Name: At_Siliques_P Parameter: Age (day) Value: 21
  misc_feature: MA Experiment 20000234 PARAMETER Experiment Name: At_Siliques_P Parameter: Organism Value: A. thaliana
  misc_feature: MA Experiment 20000234 PARAMETER Experiment Name: At_Siliques_P Parameter: Plant Line Value: WS
  misc_feature: MA Experiment 20000234 PARAMETER Experiment Name: At_Siliques_P Parameter: Tissue Value: Less Than 5mm Siliques vs. Whole Plant
  misc_feature: MA Experiment ID: 20000438 Result: Down-regulated in Transcription
  misc_feature: MA Experiment 20000438 PARAMETER Experiment Name: At_Shoots__P Parameter: Age (day) Value: 14
  misc_feature: MA Experiment 20000438 PARAMETER Experiment Name: At_Shoots__P Parameter: Tissue Value: Shoots vs. Whole Plant
  misc_feature: MA Experiment ID: 20000453 Result: Up-regulated in Transcription
  misc_feature: MA Experiment 20000453 PARAMETER Experiment Name: At_100uM_ABA_P Parameter: Age (day) Value: 15
  misc_feature: MA Experiment 20000453 PARAMETER Experiment Name: At_100uM_ABA_P Parameter: Organism Value: A. thaliana
  misc_feature: MA Experiment 20000453 PARAMETER Experiment Name: At_100uM_ABA_P Parameter: Plant Line Value: WS
  misc_feature: MA Experiment 20000453 PARAMETER Experiment Name: At_100uM_ABA_P Parameter: Timepoint (hr) Value: 24
  misc_feature: MA Experiment 20000453 PARAMETER Experiment Name: At_100uM_ABA_P Parameter: Tissue Value: Aerial
  misc_feature: MA Experiment 20000453 PARAMETER Experiment Name: At_100uM_ABA_P Parameter: Treatment Value: 100uM ABA vs. No Treatment
  misc_feature: MA Experiment ID: 20000495 Result: Down-regulated in Transcription
  misc_feature: MA Experiment 20000495 PARAMETER Experiment Name: At_Guard_Cells_P Parameter: Harvest Date Value: 8/2/2002
  misc_feature: MA Experiment 20000495 PARAMETER Experiment Name: At_Guard_Cells_P Parameter: Organism Value: A. thaliana
  misc_feature: MA Experiment 20000495 PARAMETER Experiment Name: At_Guard_Cells_P Parameter: Tissue Value: Guard Cells vs. Leaves
  misc_feature: MA Experiment ID: 20000496 Result: Down-regulated in Transcription
  misc_feature: MA Experiment 20000496 PARAMETER Experiment Name: At_Guard_Cells_P Parameter: Harvest Date Value: 7/19/2002
  misc_feature: MA Experiment 20000496 PARAMETER Experiment Name: At_Guard_Cells_P Parameter: Organism Value: Canola
  misc_feature: MA Experiment 20000496 PARAMETER Experiment Name: At_Guard_Cells_P Parameter: Tissue Value: Guard Cells vs. Leaves
  misc_feature: MA Experiment ID: 20000506 Result: Up-regulated in Transcription
  misc_feature: MA Experiment 20000506 PARAMETER Experiment Name: At_Wounding_P Parameter: Organism Value: A. thaliana
  misc_feature: MA Experiment 20000506 PARAMETER Experiment Name: At_Wounding_P Parameter: Plant Line Value: WS
  misc_feature: MA Experiment 20000506 PARAMETER Experiment Name: At_Wounding_P Parameter: Timepoint (hr) Value: 6
  misc_feature: MA Experiment 20000506 PARAMETER Experiment Name: At_Wounding_P Parameter: Tissue Value: Aerial
  misc_feature: MA Experiment 20000506 PARAMETER Experiment Name: At_Wounding_P Parameter: Treatment Value: Wounding vs. No Wounding
  misc_feature: MA Experiment ID: 20000573 Result: Up-regulated in Transcription
  misc_feature: MA Experiment 20000573 PARAMETER Experiment Name: At_100uM_ABA_Mutants__P Parameter: Organism Value: A. thaliana
  misc_feature: MA Experiment 20000573 PARAMETER Experiment Name: At_100uM_ABA_Mutants__P Parameter: Plant Line Value: CS22 vs. Ler wt
  misc_feature: MA Experiment 20000573 PARAMETER Experiment Name: At_100uM_ABA_Mutants__P Parameter: Timepoint (hr) Value: N/A
  misc_feature: MA Experiment 20000573 PARAMETER Experiment Name: At_100uM_ABA_Mutants__P Parameter: Tissue Value: Whole Plant
  misc_feature: MA Experiment 20000573 PARAMETER Experiment Name: At_100uM_ABA_Mutants__P Parameter: Treatment Value: None
  misc_feature: MA Experiment ID: 20000574 Result: Up-regulated in Transcription
  misc_feature: MA Experiment 20000574 PARAMETER Experiment Name: At_100uM_ABA_Mutants__P Parameter: Organism Value: A. thaliana
  misc_feature: MA Experiment 20000574 PARAMETER Experiment Name: At_100uM_ABA_Mutants__P Parameter: Plant Line Value: CS23 vs. Ler wt
  misc_feature: MA Experiment 20000574 PARAMETER Experiment Name: At_100uM_ABA_Mutants__P Parameter: Timepoint (hr) Value: N/A
  misc_feature: MA Experiment 20000574 PARAMETER Experiment Name: At_100uM_ABA_Mutants__P Parameter: Tissue Value: Whole Plant
  misc_feature: MA Experiment 20000574 PARAMETER Experiment Name: At_100uM_ABA_Mutants__P Parameter: Treatment Value: None
  misc_feature: MA Experiment ID: 20000576 Result: Down-regulated in Transcription
  misc_feature: MA Experiment 20000576 PARAMETER Experiment Name: At_100uM_ABA_Mutants__P Parameter: Organism Value: A. thaliana
  misc_feature: MA Experiment 20000576 PARAMETER Experiment Name: At_100uM_ABA_Mutants__P Parameter: Plant Line Value: CS23
  misc_feature: MA Experiment 20000576 PARAMETER Experiment Name: At_100uM_ABA_Mutants__P Parameter: Timepoint (hr) Value: 6
  misc_feature: MA Experiment 20000576 PARAMETER Experiment Name: At_100uM_ABA_Mutants__P Parameter: Tissue Value: Whole Plant
  misc_feature: MA Experiment 20000576 PARAMETER Experiment Name: At_100uM_ABA_Mutants__P Parameter: Treatment Value: 1uM ABA vs. No Treatment
  misc_feature: MA Experiment ID: 20000606 Result: Up-regulated in Transcription
  misc_feature: MA Experiment 20000606 PARAMETER Experiment Name: At_CS8548_Mutant_P Parameter: Age (day) Value: 14
  misc_feature: MA Experiment 20000606 PARAMETER Experiment Name: At_CS8548_Mutant_P Parameter: Plant Line Value: CS8548 vs. wt
  misc_feature: MA Experiment 20000606 PARAMETER Experiment Name: At_CS8548_Mutant_P Parameter: Tissue Value: Whole Plant
  misc_feature: MA Experiment ID: 20000709 Result: Up-regulated in Transcription
  misc_feature: MA Experiment 20000709 PARAMETER Experiment Name: At_15mM_NH4NO3_L-to-H_P Parameter: Age (hr) Value: 14
  misc_feature: MA Experiment 20000709 PARAMETER Experiment Name: At_15mM_NH4NO3_L-to-H_P Parameter: Organism Value: A. thaliana
  misc_feature: MA Experiment 20000709 PARAMETER Experiment Name: At_15mM_NH4NO3_L-to-H_P Parameter: Plant Line Value: WS
  misc_feature: MA Experiment 20000709 PARAMETER Experiment Name: At_15mM_NH4NO3_L-to-H_P Parameter: Timepoint (hr) Value: 4
  misc_feature: MA Experiment 20000709 PARAMETER Experiment Name: At_15mM_NH4NO3_L-to-H_P Parameter: Tissue Value: Aerial
  misc_feature: MA Experiment 20000709 PARAMETER Experiment Name: At_15mM_NH4NO3_L-to-H_P Parameter: Treatment Value: 15mM NH4NO3 vs. 30mM Mannitol
  misc_feature: MA Experiment ID: 20001450 Result: Down-regulated in Transcription
  misc_feature: MA Experiment 20001450 PARAMETER Experiment Name: At_Far-red-induction_P Parameter: Age (day) Value: 7
  misc_feature: MA Experiment 20001450 PARAMETER Experiment Name: At_Far-red-induction_P Parameter: Light Value: Far-red vs. White
  misc_feature: MA Experiment 20001450 PARAMETER Experiment Name: At_Far-red-induction_P Parameter: Organism Value: A. thaliana
  misc_feature: MA Experiment 20001450 PARAMETER Experiment Name: At_Far-red-induction_P Parameter: Plant Line Value: Columbia
  misc_feature: MA Experiment 20001450 PARAMETER Experiment Name: At_Far-red-induction_P Parameter: Timepoint (hr) Value: 8
  misc_feature: MA Experiment 20001450 PARAMETER Experiment Name: At_Far-red-induction_P Parameter: Tissue Value: Whole Plant
  misc_feature: MA Experiment ID: 20001451 Result: Down-regulated in Transcription
  misc_feature: MA Experiment 20001451 PARAMETER Experiment Name: At_Far-red-induction_P Parameter: Age (day) Value: 7
  misc_feature: MA Experiment 20001451 PARAMETER Experiment Name: At_Far-red-induction_P Parameter: Light Value: Far-red vs. White
  misc_feature: MA Experiment 20001451 PARAMETER Experiment Name: At_Far-red-induction_P Parameter: Organism Value: A. thaliana
  misc_feature: MA Experiment 20001451 PARAMETER Experiment Name: At_Far-red-induction_P Parameter: Plant Line Value: Columbia
  misc_feature: MA Experiment 20001451 PARAMETER Experiment Name: At_Far-red-induction_P Parameter: Timepoint (hr) Value: 24
  misc_feature: MA Experiment 20001451 PARAMETER Experiment Name: At_Far-red-induction_P Parameter: Tissue Value: Whole Plant
agccgatttctagattctcctccaccaccattttacccttcttttaaattccttccttcaatcaaaattagaattatttctcaaacctcttctttatatactaaaacgtctcacatgaacaagaagaataaatagaaacaaagaagatgaacaagaacaagattgatgttaagatcgagacgaagaaaggatcgatggatgagtggcctgagccaatcgtccgagtccagtccttagccgagagcaacctctcctctctccccgaccgttacatcaaaccagcgtctctacgccccaccacgaccgaagacgctcctaccgcgaccaacatcccaatcatagaccttgaaggactcttctcggaagaagggttgtctgatgacgtcatcatggctcggatatcggaggcttgccgtgggtgggggttcttccaggtggtgaaccacggggtcaaaccggagctgatggacgcggctagggagaattggagagagtttttccatatgccggttaatgccaaagagacttactcaaactcaccaagaacctacgaaggctatggaagtagactaggtgttgagaaaggagcaagtcttgattggagtgattattactttctccatcttcttcctcatcatttgaaagacttcaacaagtggccttcttttcctcccaccataagagaagtgatcgatgaatacggcgaagagctagtgaagctaagtgggagaattatgagggtattatcgacaaacttgggactaaaagaggataagtttcaagaagcatttggaggtgaaaacattggggcgtgtttgagggttaattattacccaaaatgccctcgaccggagctggctcttggtctctctccacactccgatcctggcggtatgaccattctcttaccggacgatcaagtcttcggtctccaggttcgtaaagatgacacgtggatcaccgtcaagcctcatccccatgctttcatcgtcaatattggtgatcaaatacagatactaagcaactcaacatacaagagtgtggagcatagagtgatagtgaactcggacaaggagagagtttcacttgccttcttctacaatcctaaaagcgatattccgatccaaccattacaagaacttgtatcaactcataatcctcctttataccctcccatgacctttgatcagtatagactctttatcagaactcaaggtccacaaggcaaatcccatgttgaatctcatatttctcctcgttgattgtttttcttttatttcttcccttaaagaaaaattaatgttttgttatttttatgatattacgtctgacttgtatatgtgtacaatcatttatattttgaattttcaaaggatgatttgccg

SEQ ID NO: 29095 - protein, 371 aa, Arabidopsis thaliana
  peptide (1)..(371): Ceres Seq. ID no. 12396467
  misc_feature (220)..(320): Pfam Name: 2OG-Fe(II) oxygenase superfamily Pfam Description: 2OG-Fe(II) oxygenase superfamily
  misc_feature (23)..(357): Homolog of NCBI NO: 2116599 NR Description: leucoanthocyanidin dioxygenase [Perilla
  misc_feature (27)..(365): Homolog of NCBI NO: 18402992 NR Description: expressed protein
  misc_feature (20)..(371): Homolog of NCBI NO: 21554535 NR Description: putative anthocyanidin synthase [Arabidopsis
  misc_feature (20)..(371): Homolog of NCBI NO: 15224472 NR Description: putative anthocyanidin synthase
  misc_feature (286)..(366): Homolog of NCBI NO: 34907994 NR Description: leucoanthocyanidin dioxygenase-like protein
  misc_feature (17)..(294): Homolog of NCBI NO: 34907994 NR Description: leucoanthocyanidin dioxygenase-like protein
  misc_feature (19)..(371): Homolog of NCBI NO: 15228785 NR Description: leucoanthocyanidin dioxygenase -like protein
  misc_feature (1)..(371): Homolog of NCBI NO: 15229694 NR Description: putative leucoanthocyanidin dioxygenase; protein
  misc_feature (17)..(371): Homolog of NCBI NO: 21537324 NR Description: leucoanthocyanidin dioxygenase-like protein
  misc_feature (1)..(371): Homolog of NCBI NO: 15239179 NR Description: leucoanthocyanidin dioxygenase-like protein
MNKNKIDVKIETKKGSMDEWPEPIVRVQSLAESNLSSLPDRYIKPASLRPTTTEDAPTATNIPIIDLEGLFSEEGLSDDVIMARISEACRGWGFFQVVNHGVKPELMDAARENWREFFHMPVNAKETYSNSPRTYEGYGSRLGVEKGASLDWSDYYFLHLLPHHLKDFNKWPSFPPTIREVIDEYGEELVKLSGRIMRVLSTNLGLKEDKFQEAFGGENIGACLRVNYYPKCPRPELALGLSPHSDPGGMTILLPDDQVFGLQVRKDDTWITVKPHPHAFIVNIGDQIQILSNSTYKSVEHRVIVNSDKERVSLAFFYNPKSDIPIQPLQELVSTHNPPLYPPMTFDQYRLFIRTQGPQGKSHVESHISPR

SEQ ID NO: 29096 - protein, 355 aa, Arabidopsis thaliana
  peptide (1)..(355): Ceres Seq. ID no. 12396468
  misc_feature (204)..(304): Pfam Name: 2OG-Fe(II) oxygenase superfamily Pfam Description: 2OG-Fe(II) oxygenase superfamily
  misc_feature (7)..(341): Homolog of NCBI NO: 2116599 NR Description: leucoanthocyanidin dioxygenase [Perilla
  misc_feature (11)..(349): Homolog of NCBI NO: 18402992 NR Description: expressed protein
  misc_feature (4)..(355): Homolog of NCBI NO: 21554535 NR Description: putative anthocyanidin synthase [Arabidopsis
  misc_feature (4)..(355): Homolog of NCBI NO: 15224472 NR Description: putative anthocyanidin synthase
  misc_feature (270)..(350): Homolog of NCBI NO: 34907994 NR Description: leucoanthocyanidin dioxygenase-like protein
  misc_feature (1)..(278): Homolog of NCBI NO: 34907994 NR Description: leucoanthocyanidin dioxygenase-like protein
  misc_feature (3)..(355): Homolog of NCBI NO: 15228785 NR Description: leucoanthocyanidin dioxygenase -like protein
  misc_feature (1)..(355): Homolog of NCBI NO: 15229694 NR Description: putative leucoanthocyanidin dioxygenase; protein
  misc_feature (1)..(355): Homolog of NCBI NO: 21537324 NR Description: leucoanthocyanidin dioxygenase-like protein
  misc_feature (1)..(355): Homolog of NCBI NO: 15239179 NR Description: leucoanthocyanidin dioxygenase-like protein
MDEWPEPIVRVQSLAESNLSSLPDRYIKPASLRPTTTEDAPTATNIPIIDLEGLFSEEGLSDDVIMARISEACRGWGFFQVVNHGVKPELMDAARENWREFFHMPVNAKETYSNSPRTYEGYGSRLGVEKGASLDWSDYYFLHLLPHHLKDFNKWPSFPPTIREVIDEYGEELVKLSGRIMRVLSTNLGLKEDKFQEAFGGENIGACLRVNYYPKCPRPELALGLSPHSDPGGMTILLPDDQVFGLQVRKDDTWITVKPHPHAFIVNIGDQIQILSNSTYKSVEHRVIVNSDKERVSLAFFYNPKSDIPIQPLQELVSTHNPPLYPPMTFDQYRLFIRTQGPQGKSHVESHISPR

SEQ ID NO: 29097 - protein, 290 aa, Arabidopsis thaliana
  peptide (1)..(290): Ceres Seq. ID no. 12396469
  misc_feature (139)..(239): Pfam Name: 2OG-Fe(II) oxygenase superfamily Pfam Description: 2OG-Fe(II) oxygenase superfamily
  misc_feature (1)..(276): Homolog of NCBI NO: 2116599 NR Description: leucoanthocyanidin dioxygenase [Perilla
  misc_feature (1)..(284): Homolog of NCBI NO: 18402992 NR Description: expressed protein
  misc_feature (1)..(290): Homolog of NCBI NO: 21554535 NR Description: putative anthocyanidin synthase [Arabidopsis
  misc_feature (1)..(290): Homolog of NCBI NO: 15224472 NR Description: putative anthocyanidin synthase
  misc_feature (205)..(285): Homolog of NCBI NO: 34907994 NR Description: leucoanthocyanidin dioxygenase-like protein
  misc_feature (1)..(213): Homolog of NCBI NO: 34907994 NR Description: leucoanthocyanidin dioxygenase-like protein
  misc_feature (1)..(290): Homolog of NCBI NO: 15228785 NR Description: leucoanthocyanidin dioxygenase -like protein
  misc_feature (1)..(290): Homolog of NCBI NO: 15229694 NR Description: putative leucoanthocyanidin dioxygenase; protein
  misc_feature (1)..(290): Homolog of NCBI NO: 21537324 NR Description: leucoanthocyanidin dioxygenase-like protein
  misc_feature (1)..(290): Homolog of NCBI NO: 15239179 NR Description: leucoanthocyanidin dioxygenase-like protein
MARISEACRGWGFFQVVNHGVKPELMDAARENWREFFHMPVNAKETYSNSPRTYEGYGSRLGVEKGASLDWSDYYFLHLLPHHLKDFNKWPSFPPTIREVIDEYGEELVKLSGRIMRVLSTNLGLKEDKFQEAFGGENIGACLRVNYYPKCPRPELALGLSPHSDPGGMTILLPDDQVFGLQVRKDDTWITVKPHPHAFIVNIGDQIQILSNSTYKSVEHRVIVNSDKERVSLAFFYNPKSDIPIQPLQELVSTHNPPLYPPMTFDQYRLFIRTQGPQGKSHVESHISPR

SEQ ID NO: 29098 - DNA, 1272 bp, Arabidopsis thaliana
  misc_feature (1)..(1272): Ceres Seq. ID no. 13500081
  misc_feature: MA Experiment ID: 108434 Result: Up-regulated in Transcription
  misc_feature: MA Experiment 108434 PARAMETER Experiment Name: At_Root_Tips_cDNA_P Parameter: Tissue Value: Root Tips
  misc_feature: MA Experiment ID: 20000179 Result: Up-regulated in Transcription
  misc_feature: MA Experiment 20000179 PARAMETER Experiment Name: At_Germinating_Seeds_P Parameter: Age (hr) Value: 6 vs. 0
  misc_feature: MA Experiment 20000179 PARAMETER Experiment Name: At_Germinating_Seeds_P Parameter: Tissue Value: Germinating Seeds
  misc_feature: MA Experiment ID: 20000180 Result: Up-regulated in Transcription
  misc_feature: MA Experiment 20000180 PARAMETER Experiment Name: At_Germinating_Seeds_P Parameter: Age (hr) Value: 24 vs. 0
  misc_feature: MA Experiment 20000180 PARAMETER Experiment Name: At_Germinating_Seeds_P Parameter: Tissue Value: Germinating Seeds
  misc_feature: MA Experiment ID: 20000495 Result: Up-regulated in Transcription
  misc_feature: MA Experiment 20000495 PARAMETER Experiment Name: At_Guard_Cells_P Parameter: Harvest Date Value: 8/2/2002
  misc_feature: MA Experiment 20000495 PARAMETER Experiment Name: At_Guard_Cells_P Parameter: Organism Value: A. thaliana
  misc_feature: MA Experiment 20000495 PARAMETER Experiment Name: At_Guard_Cells_P Parameter: Tissue Value: Guard Cells vs. Leaves
  misc_feature: MA Experiment ID: 20000496 Result: Up-regulated in Transcription
  misc_feature: MA Experiment 20000496 PARAMETER Experiment Name: At_Guard_Cells_P Parameter: Harvest Date Value: 7/19/2002
  misc_feature: MA Experiment 20000496 PARAMETER Experiment Name: At_Guard_Cells_P Parameter: Organism Value: Canola
  misc_feature: MA Experiment 20000496 PARAMETER Experiment Name: At_Guard_Cells_P Parameter: Tissue Value: Guard Cells vs. Leaves
  misc_feature: MA Experiment ID: 20001905 Result: Up-regulated in Transcription
  misc_feature: MA Experiment 20001905 PARAMETER Experiment Name: At_Drought_Reproduction_P Parameter: Age (day) Value: 40
  misc_feature: MA Experiment 20001905 PARAMETER Experiment Name: At_Drought_Reproduction_P Parameter: Organism Value: A. thaliana
  misc_feature: MA Experiment 20001905 PARAMETER Experiment Name: At_Drought_Reproduction_P Parameter: Plant Line Value: WS
  misc_feature: MA Experiment 20001905 PARAMETER Experiment Name: At_Drought_Reproduction_P Parameter: Timepoint (day) Value: 10
  misc_feature: MA Experiment 20001905 PARAMETER Experiment Name: At_Drought_Reproduction_P Parameter: Tissue Value: Rosettes
  misc_feature: MA Experiment 20001905 PARAMETER Experiment Name: At_Drought_Reproduction_P Parameter: Treatment Value: Drought vs. No Drought
aatttatatatgagtatcgaattccaattgcggaagaaaggagaaaataatctccggtttgagctgcgtcgacgagatctatcgtcaggatctcagatttgttgttacactcttgctcaagtctggagacatgagttctccgggaacgagtatgttcaccaatttcactaagctctgcaaaggacttgccctggtacttgtggtgggacacctcgtggttcagttcattcccgctaccgtcccataccttgctctgattccggcgaggactattccttttgcctggaatctgataacaagcggctattttgaactctcagtatatggggttgtcttcagcaccgtttctctcctttttatgggaaagttcctggaacctgtctggggttccacggagttccttaagttcatctttgtggtgaacttccttacgtatctctgtgttttcgttacagccattgccttatactacataacgaggctggaagtttacctatatatgccctttgctggttttcatggtgtcttggcaggccttcttgtagggataaagcagataatacctgaccaggagatattgctgttaaagataaaagcaaagtggttgccctcaattatgctaattttgtcaatagcctcaagcttcttcacactagattcagcagcatatcttcccactttgatatttggtacatatatgggctggttatacctcaggtacctacagaggagaccagaaacaaagctcagaggtgatccaagtgatgactttgccttctctactttctttcctgaacttctcaggccagtaattgaccccattgccttaatctttcaccggatgctttgtggaagatcaaatgccaccagtgaagaccatgattattctaccagtggtgcaccattgccaggttctgattctgctgaagcatccaggaggagagaaagaggggcaagagctctagaggagagactaggaacggaaagattggttcctgcaaggaacaaagatgaattgcagagtgatggtttagataacgtataagtggagattgcgataagcattttgaagaagctgttgttggttcttacttgtgttcatgtggacagtttttttttgttttttttttttgttaatgaaattggcgtttatacagaatcagcttcgtaaattcctttgacagctcagaaaggtagtacatttccttggacaaaccaccaattagaaacaattttcttggacgagaggatataaaagtagttatacatgtt

SEQ ID NO: 29099 - protein, 304 aa, Arabidopsis thaliana
  peptide (1)..(304): Ceres Seq. ID no. 13500082
  misc_feature (52)..(150): Homolog of NCBI NO: 2340093 NR Description: PL6 protein, unknown function but deleted in
  misc_feature (195)..(298): Homolog of NCBI NO: 2340093 NR Description: PL6 protein, unknown function but deleted in
  misc_feature (19)..(282): Homolog of NCBI NO: 19920824 NR Description: CG9536-PA [Drosophila melanogaster]
  misc_feature (20)..(282): Homolog of NCBI NO: 34865897 NR Description: similar to PL6 protein [Rattus norvegicus]
  misc_feature (20)..(282): Homolog of NCBI NO: 9790165 NR Description: PL6 protein; PL-6; placental protein 6 [Mus
  misc_feature (40)..(298): Homolog of NCBI NO: 5902022 NR Description: PL6 protein [Homo sapiens]
  misc_feature (12)..(285): Homolog of NCBI NO: 21741573 NR Description: OSJNBa0094O15.3 [Oryza sativa (japonica
  misc_feature (5)..(304): Homolog of NCBI NO: 34395257 NR Description: putative placental protein 6
  misc_feature (1)..(304): Homolog of NCBI NO: 18398108 NR Description: expressed protein [Arabidopsis thaliana]
  misc_feature (5)..(304): Homolog of NCBI NO: 6648207 NR Description: unknown protein [Arabidopsis thaliana]
MSSPGTSMFTNFTKLCKGLALVLVVGHLVVQFIPATVPYLALIPARTIPFAWNLITSGYFELSVYGVVFSTVSLLFMGKFLEPVWGSTEFLKFIFVVNFLTYLCVFVTAIALYYITRLEVYLYMPFAGFHGVLAGLLVGIKQIIPDQEILLLKIKAKWLPSIMLILSIASSFFTLDSAAYLPTLIFGTYMGWLYLRYLQRRPETKLRGDPSDDFAFSTFFPELLRPVIDPIALIFHRMLCGRSNATSEDHDYSTSGAPLPGSDSAEASRRRERGARALEERLGTERLVPARNKDELQSDGLDNV

SEQ ID NO: 29100 - protein, 297 aa, Arabidopsis thaliana
  peptide (1)..(297): Ceres Seq. ID no. 13500083
  misc_feature (45)..(143): Homolog of NCBI NO: 2340093 NR Description: PL6 protein, unknown function but deleted in
  misc_feature (188)..(291): Homolog of NCBI NO: 2340093 NR Description: PL6 protein, unknown function but deleted in
  misc_feature (12)..(275): Homolog of NCBI NO: 19920824 NR Description: CG9536-PA [Drosophila melanogaster]
  misc_feature (13)..(275): Homolog of NCBI NO: 34865897 NR Description: similar to PL6 protein [Rattus norvegicus]
  misc_feature (13)..(275): Homolog of NCBI NO: 9790165 NR Description: PL6 protein; PL-6; placental protein 6 [Mus
  misc_feature (33)..(291): Homolog of NCBI NO: 5902022 NR Description: PL6 protein [Homo sapiens]
  misc_feature (5)..(278): Homolog of NCBI NO: 21741573 NR Description: OSJNBa0094O15.3 [Oryza sativa (japonica
  misc_feature (1)..(297): Homolog of NCBI NO: 34395257 NR Description: putative placental protein 6
  misc_feature (1)..(297): Homolog of NCBI NO: 18398108 NR Description: expressed protein [Arabidopsis thaliana]
  misc_feature (1)..(297): Homolog of NCBI NO: 6648207 NR Description: unknown protein [Arabidopsis thaliana]
MFTNFTKLCKGLALVLVVGHLVVQFIPATVPYLALIPARTIPFAWNLITSGYFELSVYGVVFSTVSLLFMGKFLEPVWGSTEFLKFIFVVNFLTYLCVFVTAIALYYITRLEVYLYMPFAGFHGVLAGLLVGIKQIIPDQEILLLKIKAKWLPSIMLILSIASSFFTLDSAAYLPTLIFGTYMGWLYLRYLQRRPETKLRGDPSDDFAFSTFFPELLRPVIDPIALIFHRMLCGRSNATSEDHDYSTSGAPLPGSDSAEASRRRERGARALEERLGTERLVPARNKDELQSDGLDNV

SEQ ID NO: 29101 - protein, 228 aa, Arabidopsis thaliana
  peptide (1)..(228): Ceres Seq. ID no. 13500084
  misc_feature (1)..(74): Homolog of NCBI NO: 2340093 NR Description: PL6 protein, unknown function but deleted in
  misc_feature (119)..(222): Homolog of NCBI NO: 2340093 NR Description: PL6 protein, unknown function but deleted in
  misc_feature (1)..(206): Homolog of NCBI NO: 19920824 NR Description: CG9536-PA [Drosophila melanogaster]
  misc_feature (1)..(206): Homolog of NCBI NO: 34865897 NR Description: similar to PL6 protein [Rattus norvegicus]
  misc_feature (1)..(206): Homolog of NCBI NO: 9790165 NR Description: PL6 protein; PL-6; placental protein 6 [Mus
  misc_feature (1)..(222): Homolog of NCBI NO: 5902022 NR Description: PL6 protein [Homo sapiens]
  misc_feature (1)..(209): Homolog of NCBI NO: 21741573 NR Description: OSJNBa0094O15.3 [Oryza sativa (japonica
  misc_feature (1)..(228): Homolog of NCBI NO: 34395257 NR Description: putative placental protein 6
  misc_feature (1)..(228): Homolog of NCBI NO: 18398108 NR Description: expressed protein [Arabidopsis thaliana]
  misc_feature (1)..(228): Homolog of NCBI NO: 6648207 NR Description: unknown protein [Arabidopsis thaliana]
MGKFLEPVWGSTEFLKFIFVVNFLTYLCVFVTAIALYYITRLEVYLYMPFAGFHGVLAGLLVGIKQIIPDQEILLLKIKAKWLPSIMLILSIASSFFTLDSAAYLPTLIFGTYMGWLYLRYLQRRPETKLRGDPSDDFAFSTFFPELLRPVIDPIALIFHRMLCGRSNATSEDHDYSTSGAPLPGSDSAEASRRRERGARALEERLGTERLVPARNKDELQSDGLDNV

SEQ ID NO: 29102 - DNA, 1362 bp, Arabidopsis thaliana
  misc_feature (1)..(1362): Ceres Seq. ID no. 13486641
  misc_feature: MA Experiment ID: 108434 Result: Down-regulated in Transcription
  misc_feature: MA Experiment 108434 PARAMETER Experiment Name: At_Root_Tips_cDNA_P Parameter: Tissue Value: Root Tips
  misc_feature: MA Experiment ID: 108469 Result: Up-regulated in Transcription
  misc_feature: MA Experiment ID: 108569 Result: Up-regulated in Transcription
  misc_feature: MA Experiment 108569 PARAMETER Experiment Name: At_0.001%_MeJA__cDNA_P Parameter: Timepoint (hr) Value: 6
  misc_feature: MA Experiment 108569 PARAMETER Experiment Name: At_0.001%_MeJA__cDNA_P Parameter: Tissue Value: Aerial
  misc_feature: MA Experiment 108569 PARAMETER Experiment Name: At_0.001%_MeJA__cDNA_P Parameter: Treatment Value: 0.001% MeJA vs. No Treatment
  misc_feature: MA Experiment ID: 108572 Result: Down-regulated in Transcription
  misc_feature: MA Experiment 108572 PARAMETER Experiment Name: At_Drought_cDNA_P Parameter: Timepoint (hr) Value: 1
  misc_feature: MA Experiment 108572 PARAMETER Experiment Name: At_Drought_cDNA_P Parameter: Tissue Value: Aerial
  misc_feature: MA Experiment 108572 PARAMETER Experiment Name: At_Drought_cDNA_P Parameter: Treatment Value: Drought vs. No Drought
  misc_feature: MA Experiment ID: 108594 Result: Down-regulated in Transcription
  misc_feature: MA Experiment 108594 PARAMETER Experiment Name: At_Ler-rhl_Root_cDNA_P Parameter: Plant Line Value: null
  misc_feature: MA Experiment ID: 108668 Result: Up-regulated in Transcription
  misc_feature: MA Experiment 108668 PARAMETER Experiment Name: At_2mM_SA_cDNA_P Parameter: Plant Line Value: WS
  misc_feature: MA Experiment 108668 PARAMETER Experiment Name: At_2mM_SA_cDNA_P Parameter: Timepoint (hr) Value: 6
  misc_feature: MA Experiment 108668 PARAMETER Experiment Name: At_2mM_SA_cDNA_P Parameter: Treatment Value: 2mM SA vs. No Treatment
  misc_feature: MA Experiment ID: 20000111 Result: Down-regulated in Transcription
  misc_feature: MA Experiment 20000111 PARAMETER Experiment Name: At_42deg_Heat_cDNA_P Parameter: Temperature (deg C) Value: 42 vs. 22
  misc_feature: MA Experiment 20000111 PARAMETER Experiment Name: At_42deg_Heat_cDNA_P Parameter: Timepoint (hr) Value: 6
  misc_feature: MA Experiment 20000111 PARAMETER Experiment Name: At_42deg_Heat_cDNA_P Parameter: Tissue Value: Aerial
  misc_feature: MA Experiment ID: 20000113 Result: Down-regulated in Transcription
  misc_feature: MA Experiment 20000113 PARAMETER Experiment Name: At_42deg_Heat_cDNA_P Parameter: Temperature (deg C) Value: 42 vs. 22
  misc_feature: MA Experiment 20000113 PARAMETER Experiment Name: At_42deg_Heat_cDNA_P Parameter: Timepoint (hr) Value: 8
  misc_feature: MA Experiment 20000113 PARAMETER Experiment Name: At_42deg_Heat_cDNA_P Parameter: Tissue Value: Aerial
  misc_feature: MA Experiment ID: 20000180 Result: Up-regulated in Transcription
  misc_feature: MA Experiment 20000180 PARAMETER Experiment Name: At_Germinating_Seeds_P Parameter: Age (hr) Value: 24 vs. 0
  misc_feature: MA Experiment 20000180 PARAMETER Experiment Name: At_Germinating_Seeds_P Parameter: Tissue Value: Germinating Seeds
  misc_feature: MA Experiment ID: 20000182 Result: Up-regulated in Transcription
  misc_feature: MA Experiment 20000182 PARAMETER Experiment Name: At_2mM_SA_P Parameter: Age (day) Value: 14
  misc_feature: MA Experiment 20000182 PARAMETER Experiment Name: At_2mM_SA_P Parameter: Organism Value: A. thaliana
  misc_feature: MA Experiment 20000182 PARAMETER Experiment Name: At_2mM_SA_P Parameter: Plant Line Value: WS
  misc_feature: MA Experiment 20000182 PARAMETER Experiment Name: At_2mM_SA_P Parameter: Timepoint (hr) Value: 6
  misc_feature: MA Experiment 20000182 PARAMETER Experiment Name: At_2mM_SA_P Parameter: Tissue Value: Aerial
  misc_feature: MA Experiment 20000182 PARAMETER Experiment Name: At_2mM_SA_P Parameter: Treatment Value: 2mM SA vs. No Treatment
  misc_feature: MA Experiment ID: 20000185 Result: Up-regulated in Transcription
  misc_feature: MA Experiment 20000185 PARAMETER Experiment Name: At_Roots__P Parameter: Age (day) Value: 7 vs. 21
  misc_feature: MA Experiment 20000185 PARAMETER Experiment Name: At_Roots__P Parameter: Organism Value: A. thaliana
  misc_feature: MA Experiment 20000185 PARAMETER Experiment Name: At_Roots__P Parameter: Tissue Value: Roots vs. Whole Plant
  misc_feature: MA Experiment ID: 20000495 Result: Up-regulated in Transcription
  misc_feature: MA Experiment 20000495 PARAMETER Experiment Name: At_Guard_Cells_P Parameter: Harvest Date Value: 8/2/2002
  misc_feature: MA Experiment 20000495 PARAMETER Experiment Name: At_Guard_Cells_P Parameter: Organism Value: A. thaliana
  misc_feature: MA Experiment 20000495 PARAMETER Experiment Name: At_Guard_Cells_P Parameter: Tissue Value: Guard Cells vs. Leaves
  misc_feature: MA Experiment ID: 20000527 Result: Down-regulated in Transcription
  misc_feature: MA Experiment 20000527 PARAMETER Experiment Name: At_10percent_PEG_P Parameter: Age (day) Value: 20
  misc_feature: MA Experiment 20000527 PARAMETER Experiment Name: At_10percent_PEG_P Parameter: Organism Value: A. thaliana
  misc_feature: MA Experiment 20000527 PARAMETER Experiment Name: At_10percent_PEG_P Parameter: Plant Line Value: WS
  misc_feature: MA Experiment 20000527 PARAMETER Experiment Name: At_10percent_PEG_P Parameter: Timepoint (day) Value: 20
  misc_feature: MA Experiment 20000527 PARAMETER Experiment Name: At_10percent_PEG_P Parameter: Tissue Value: Whole Plant
  misc_feature: MA Experiment 20000527 PARAMETER Experiment Name: At_10percent_PEG_P Parameter: Treatment Value: 10percent PEG vs. No Treatment
  misc_feature: MA Experiment ID: 20001556 Result: Down-regulated in Transcription
  misc_feature: MA Experiment 20001556 PARAMETER Experiment Name: At_Drought_Soil_Dry_P Parameter: Age (day) Value: 26
  misc_feature: MA Experiment 20001556 PARAMETER Experiment Name: At_Drought_Soil_Dry_P Parameter: Organism Value: A. thaliana
  misc_feature: MA Experiment 20001556 PARAMETER Experiment Name: At_Drought_Soil_Dry_P Parameter: Plant Line Value: WS
  misc_feature: MA Experiment 20001556 PARAMETER Experiment Name: At_Drought_Soil_Dry_P Parameter: Post Timepoint (hr) Value: None
  misc_feature: MA Experiment 20001556 PARAMETER Experiment Name: At_Drought_Soil_Dry_P Parameter: Post-Treatment Value: None
  misc_feature: MA Experiment 20001556 PARAMETER Experiment Name: At_Drought_Soil_Dry_P Parameter: Timepoint (day) Value: 12
  misc_feature: MA Experiment 20001556 PARAMETER Experiment Name: At_Drought_Soil_Dry_P Parameter: Treatment Value: Drought vs. No Drought
  misc_feature: MA Experiment ID: 20001906 Result: Down-regulated in Transcription
  misc_feature: MA Experiment 20001906 PARAMETER Experiment Name: At_Drought_Reproduction_P Parameter: Age (day) Value: 35
  misc_feature: MA Experiment 20001906 PARAMETER Experiment Name: At_Drought_Reproduction_P Parameter: Organism Value: A. thaliana
  misc_feature: MA Experiment 20001906 PARAMETER Experiment Name: At_Drought_Reproduction_P Parameter: Plant Line Value: WS
  misc_feature: MA Experiment 20001906 PARAMETER Experiment Name: At_Drought_Reproduction_P Parameter: Timepoint (day) Value: 5
  misc_feature: MA Experiment 20001906 PARAMETER Experiment Name: At_Drought_Reproduction_P Parameter: Tissue Value: Siliques
  misc_feature: MA Experiment 20001906 PARAMETER Experiment Name: At_Drought_Reproduction_P Parameter: Treatment Value: Drought vs. No Drought
  misc_feature: MA Experiment ID: 20001911 Result: Down-regulated in Transcription
  misc_feature: MA Experiment 20001911 PARAMETER Experiment Name: At_Drought_Reproduction_P Parameter: Age (day) Value: 40
  misc_feature: MA Experiment 20001911 PARAMETER Experiment Name: At_Drought_Reproduction_P Parameter: Organism Value: A. thaliana
  misc_feature: MA Experiment 20001911 PARAMETER Experiment Name: At_Drought_Reproduction_P Parameter: Plant Line Value: WS
  misc_feature: MA Experiment 20001911 PARAMETER Experiment Name: At_Drought_Reproduction_P Parameter: Timepoint (day) Value: 10
  misc_feature: MA Experiment 20001911 PARAMETER Experiment Name: At_Drought_Reproduction_P Parameter: Tissue Value: Flowers
  misc_feature: MA Experiment 20001911 PARAMETER Experiment Name: At_Drought_Reproduction_P Parameter: Treatment Value: Drought vs. No Drought
acaaattcaattccaattctcaaagtgctctctttttaaaccaatctgctctcttccacttactctctctatctctctcccatctcgtttcttttttggtcattaaaagagaaacctttgctctgaatcttgaaaatggattctttgatcaaactcttcttctgcctctttatcttcttatgtacttcgctcttatttggagaaatcaatggagtggagggttcaaatcaaaatcatcacttgtatccatttaggccaacgaagctctttgtgttcggagattcttatgccgataccggaaacattaaaaaggctttctctagctcttggaaattcccttacggtatcactttccccggaaaacccgctggccgtttctccgatggccgtgtggcaacagattttctagctaaatttgtggggataaaatcaccaatcccatacttttggaaagattacgcgggaaagaaacgattacagtacggaatgaattttgcgtacggaggaacaggagtgttcaacactcaaactccattgcctaacatgacaactcaaatcgacatcttccagaacattctcaccaccggcgacatctactatcctcccgagcttacttcatccgtggctctcgtcagtgtcgctggcaacgactactccaatttcatcgccctaaaccgccctgcctctgaattcccagcattcataaagcaagttgtggatcaaacagaggtgaatttgagacggatccacgctttgggagtgaaaaagattgcagtaccatccctgcaaccgcttggttgtctccctcccttcacattcgtaacctcgttccagcgttgcaacgagacacaaaacgctttagttaacctccacaacaacttattgcagcaagttgtggcaaagctcaataacgagactaaacagtcgactttcatcatccttgatctctacaatgctttcttgactgtgttcaagaacaaaggatctaatccagggagtacaaggtttgagagtccattaaagccgtgttgcgtaggtgtgagccgcgagtataactgtggaagtgtggatgagaagggagtgaagaagtatattgtatgtgataatcctaaaactgctttcttttgggatggacttcaccctacagaagaaggatggagatcggtttactctgttttacgcgaaagtcttaccgcgtctttgattaaagcgtgagaaacaaaagaaacacacattttgcttaggttttttcttatgaagctcaatgtttgagcgctctgttcctgttttcagtatctcttcattcatttgtgtttgtgtgtttaaagattgtgtgactaataaaatctcttaactggttcg

SEQ ID NO: 29103 - protein, 359 aa, Arabidopsis thaliana
  peptide (1)..(359): Ceres Seq. ID no. 13486642
  misc_feature (44)..(348): Pfam Name: GDSL-like Lipase/Acylhydrolase Pfam Description: GDSL-like Lipase/Acylhydrolase
  misc_feature (44)..(348): Homolog of NCBI NO: 10241432 NR Description: putative lipase/acylhydrolase
  misc_feature (59)..(101): Homolog of NCBI NO: 15242809 NR Description: hypothetical protein [Arabidopsis thaliana]
  misc_feature (220)..(358): Homolog of NCBI NO: 15242809 NR Description: hypothetical protein [Arabidopsis thaliana]
  misc_feature (68)..(220): Homolog of NCBI NO: 33285918 NR Description: putative lipase [Brassica rapa subsp. pekinensis]
  misc_feature (7)..(348): Homolog of NCBI NO: 20260298 NR Description: unknown protein [Arabidopsis thaliana]
  misc_feature (29)..(358): Homolog of NCBI NO: 15242810 NR Description: GDSL-motif lipase/hydrolase protein [Arabidopsis
  misc_feature (92)..(354): Homolog of NCBI NO: 6143883 NR Description: unknown protein [Arabidopsis thaliana]
  misc_feature (4)..(354): Homolog of NCBI NO: 15232799 NR Description: GDSL-motif lipase/hydrolase protein [Arabidopsis
  misc_feature (4)..(354): Homolog of NCBI NO: 28393114 NR Description: putative lipase acylhydrolase [Arabidopsis
  misc_feature (1)..(359): Homolog of NCBI NO: 15242811 NR Description: GDSL-motif lipase/hydrolase protein [Arabidopsis
MDSLIKLFFCLFIFLCTSLLFGEINGVEGSNQNHHLYPFRPTKLFVFGDSYADTGNIKKAFSSSWKFPYGITFPGKPAGRFSDGRVATDFLAKFVGIKSPIPYFWKDYAGKKRLQYGMNFAYGGTGVFNTQTPLPNMTTQIDIFQNILTTGDIYYPPELTSSVALVSVAGNDYSNFIALNRPASEFPAFIKQVVDQTEVNLRRIHALGVKKIAVPSLQPLGCLPPFTFVTSFQRCNETQNALVNLHNNLLQQVVAKLNNETKQSTFIILDLYNAFLTVFKNKGSNPGSTRFESPLKPCCVGVSREYNCGSVDEKGVKKYIVCDNPKTAFFWDGLHPTEEGWRSVYSVLRESLTASLIKA

SEQ ID NO: 29104 - protein, 242 aa, Arabidopsis thaliana
  peptide (1)..(242): Ceres Seq. ID no. 13486643
  misc_feature (1)..(231): Pfam Name: GDSL-like Lipase/Acylhydrolase Pfam Description: GDSL-like Lipase/Acylhydrolase
  misc_feature (1)..(231): Homolog of NCBI NO: 32488918 NR Description: OSJNBb0059K02.9 [Oryza sativa (japonica
  misc_feature (1)..(231): Homolog of NCBI NO: 10241432 NR Description: putative lipase/acylhydrolase
  misc_feature (103)..(241): Homolog of NCBI NO: 15242809 NR Description: hypothetical protein [Arabidopsis thaliana]
  misc_feature (1)..(103): Homolog of NCBI NO: 33285918 NR Description: putative lipase [Brassica rapa subsp. pekinensis]
  misc_feature (1)..(231): Homolog of NCBI NO: 20260298 NR Description: unknown protein [Arabidopsis thaliana]
  misc_feature (1)..(241): Homolog of NCBI NO: 15242810 NR Description: GDSL-motif lipase/hydrolase protein [Arabidopsis
  misc_feature (1)..(237): Homolog of NCBI NO: 6143883 NR Description: unknown protein [Arabidopsis thaliana]
  misc_feature (1)..(237): Homolog of NCBI NO: 15232799 NR Description: GDSL-motif lipase/hydrolase protein [Arabidopsis
  misc_feature (1)..(237): Homolog of NCBI NO: 28393114 NR Description: putative lipase acylhydrolase [Arabidopsis
  misc_feature (1)..(242): Homolog of NCBI NO: 15242811 NR Description: GDSL-motif lipase/hydrolase protein [Arabidopsis
MNFAYGGTGVFNTQTPLPNMTTQIDIFQNILTTGDIYYPPELTSSVALVSVAGNDYSNFIALNRPASEFPAFIKQVVDQTEVNLRRIHALGVKKIAVPSLQPLGCLPPFTFVTSFQRCNETQNALVNLHNNLLQQVVAKLNNETKQSTFIILDLYNAFLTVFKNKGSNPGSTRFESPLKPCCVGVSREYNCGSVDEKGVKKYIVCDNPKTAFFWDGLHPTEEGWRSVYSVLRESLTASLIKA

SEQ ID NO: 29105 - protein, 223 aa, Arabidopsis thaliana
  peptide (1)..(223): Ceres Seq. ID no. 13486644
  misc_feature (1)..(212): Pfam Name: GDSL-like Lipase/Acylhydrolase Pfam Description: GDSL-like Lipase/Acylhydrolase
  misc_feature (1)..(212): Homolog of NCBI NO: 32488918 NR Description: OSJNBb0059K02.9 [Oryza sativa (japonica
  misc_feature (1)..(212): Homolog of NCBI NO: 10241432 NR Description: putative lipase/acylhydrolase
  misc_feature (84)..(222): Homolog of NCBI NO: 15242809 NR Description: hypothetical protein [Arabidopsis thaliana]
  misc_feature (1)..(84): Homolog of NCBI NO: 33285918 NR Description: putative lipase [Brassica rapa subsp. pekinensis]
  misc_feature (1)..(212): Homolog of NCBI NO: 20260298 NR Description: unknown protein [Arabidopsis thaliana]
  misc_feature (1)..(222): Homolog of NCBI NO: 15242810 NR Description: GDSL-motif lipase/hydrolase protein [Arabidopsis
  misc_feature (1)..(218): Homolog of NCBI NO: 6143883 NR Description: unknown protein [Arabidopsis thaliana]
  misc_feature (1)..(218): Homolog of NCBI NO: 15232799 NR Description: GDSL-motif lipase/hydrolase protein [Arabidopsis
  misc_feature (1)..(218): Homolog of NCBI NO: 28393114 NR Description: putative lipase acylhydrolase [Arabidopsis
  misc_feature (1)..(223): Homolog of NCBI NO: 15242811 NR Description: GDSL-motif lipase/hydrolase protein [Arabidopsis
MTTQIDIFQNILTTGDIYYPPELTSSVALVSVAGNDYSNFIALNRPASEFPAFIKQVVDQTEVNLRRIHALGVKKIAVPSLQPLGCLPPFTFVTSFQRCNETQNALVNLHNNLLQQVVAKLNNETKQSTFIILDLYNAFLTVFKNKGSNPGSTRFESPLKPCCVGVSREYNCGSVDEKGVKKYIVCDNPKTAFFWDGLHPTEEGWRSVYSVLRESLTASLIKA

SEQ ID NO: 29106 - DNA, 1035 bp, Arabidopsis thaliana; identical to SEQ ID NO: 22638
  misc_feature (1)..(1035): Ceres Seq. ID no. 13509220
  misc_feature: MA Experiment ID: 108434 Result: Down-regulated in Transcription
  misc_feature: MA Experiment 108434 PARAMETER Experiment Name: At_Root_Tips_cDNA_P Parameter: Tissue Value: Root Tips
  misc_feature: MA Experiment ID: 108461 Result: Up-regulated in Transcription
  misc_feature: MA Experiment 108461 PARAMETER Experiment Name: At_Germinating_Seeds_cDNA_P Parameter: Age (day) Value: 1 vs. 0
  misc_feature: MA Experiment 108461 PARAMETER Experiment Name: At_Germinating_Seeds_cDNA_P Parameter: Tissue Value: Germinating Seeds
  misc_feature: MA Experiment ID: 108462 Result: Up-regulated in Transcription
  misc_feature: MA Experiment 108462 PARAMETER Experiment Name: At_Germinating_Seeds_cDNA_P Parameter: Age (day) Value: 2 vs. 0
  misc_feature: MA Experiment 108462 PARAMETER Experiment Name: At_Germinating_Seeds_cDNA_P Parameter: Tissue Value: Germinating Seeds
  misc_feature: MA Experiment ID: 108464 Result: Up-regulated in Transcription
  misc_feature: MA Experiment 108464 PARAMETER Experiment Name: At_Germinating_Seeds_cDNA_P Parameter: Age (day) Value: 4 vs. 0
  misc_feature: MA Experiment 108464 PARAMETER Experiment Name: At_Germinating_Seeds_cDNA_P Parameter: Tissue Value: Germinating Seeds
  misc_feature: MA Experiment ID: 108488 Result: Up-regulated in Transcription
  misc_feature: MA Experiment ID: 108489 Result: Down-regulated in Transcription
  misc_feature: MA Experiment ID: 108595 Result: Down-regulated in Transcription
  misc_feature: MA Experiment 108595 PARAMETER Experiment Name: At_Ler-pi_Ovule_cDNA_P Parameter: Plant Line Value: null
  misc_feature: MA Experiment ID: 20000314 Result: Down-regulated in Transcription
  misc_feature: MA Experiment 20000314 PARAMETER Experiment Name: At_14day_Shoots-Roots_Sub_P Parameter: Age (day) Value: 14
  misc_feature: MA Experiment 20000314 PARAMETER Experiment Name: At_14day_Shoots-Roots_Sub_P Parameter: Organism Value: A. thaliana
  misc_feature: MA Experiment 20000314 PARAMETER Experiment Name: At_14day_Shoots-Roots_Sub_P Parameter: Plant Line Value: WS
  misc_feature: MA Experiment 20000314 PARAMETER Experiment Name: At_14day_Shoots-Roots_Sub_P Parameter: Tissue Value: Roots vs. Whole Plant
  misc_feature: MA Experiment ID: 20000315 Result: Up-regulated in Transcription
  misc_feature: MA Experiment 20000315 PARAMETER Experiment Name: At_14day_Shoots-Roots_Sub_P Parameter: Age (day) Value: 14
  misc_feature: MA Experiment 20000315 PARAMETER Experiment Name: At_14day_Shoots-Roots_Sub_P Parameter: Organism Value: A. thaliana
  misc_feature: MA Experiment 20000315 PARAMETER Experiment Name: At_14day_Shoots-Roots_Sub_P Parameter: Plant Line Value: WS
  misc_feature: MA Experiment 20000315 PARAMETER Experiment Name: At_14day_Shoots-Roots_Sub_P Parameter: Tissue Value: Shoots vs. Whole Plant
  misc_feature: MA Experiment ID: 20000328 Result: Up-regulated in Transcription
  misc_feature: MA Experiment 20000328 PARAMETER Experiment Name: At_42deg_Heat_Sub_P Parameter: Age (day) Value: 14
  misc_feature: MA Experiment 20000328 PARAMETER Experiment Name: At_42deg_Heat_Sub_P Parameter: Organism Value: A. thaliana
  misc_feature: MA Experiment 20000328 PARAMETER Experiment Name: At_42deg_Heat_Sub_P Parameter: Plant Line Value: WS
  misc_feature: MA Experiment 20000328 PARAMETER Experiment Name: At_42deg_Heat_Sub_P Parameter: Temperature (deg C) Value: 42 vs. 22
  misc_feature: MA Experiment 20000328 PARAMETER Experiment Name: At_42deg_Heat_Sub_P Parameter: Timepoint (hr) Value: 6
  misc_feature: MA Experiment 20000328 PARAMETER Experiment Name: At_42deg_Heat_Sub_P Parameter: Tissue Value: Aerial
  misc_feature: MA Experiment ID: 20001807 Result: Up-regulated in Transcription
  misc_feature: MA Experiment 20001807 PARAMETER Experiment Name: At_50mM_NH4NO3_L-to-H_Sub_P Parameter: Timepoint (hr) Value: 6
  misc_feature: MA Experiment 20001807 PARAMETER Experiment Name: At_50mM_NH4NO3_L-to-H_Sub_P Parameter: Tissue Value: Leaf
  misc_feature: MA Experiment 20001807 PARAMETER Experiment Name: At_50mM_NH4NO3_L-to-H_Sub_P Parameter: Treatment Value: 50mM NH4NO3 vs 100mM Mannitol

SEQ ID NO: 29107 - protein, 267 aa, Arabidopsis thaliana; identical to SEQ ID NO: 22639
  peptide (1)..(267): Ceres Seq. ID no. 13509221
  misc_feature (65)..(234): Pfam Name: Chlorophyll A-B binding protein Pfam Description: Chlorophyll A-B binding protein
  misc_feature (65)..(234): Pfam Name: Chlorophyll A-B binding protein Pfam Description: Chlorophyll A-B binding protein
  misc_feature (65)..(234): Pfam Name: Chlorophyll A-B binding protein Pfam Description: Chlorophyll A-B binding protein
  misc_feature (1)..(267): Homolog of NCBI NO: 115819 NR Description: Chlorophyll A-B binding protein 1B, chloroplast
  misc_feature (19)..(267): Homolog of NCBI NO: 12324161 NR Description: chlorophyll A-B-binding protein 2 precursor, 5'
  misc_feature (1)..(267): Homolog of NCBI NO: 21592428 NR Description: putative photosystem II type I chlorophyll a b
  misc_feature (1)..(267): Homolog of NCBI NO: 18266039 NR Description: chlorophyll a/b binding protein [Brassica
  misc_feature (1)..(267): Homolog of NCBI NO: 18403549 NR Description: photosystem II type I chlorophyll a /b binding
  misc_feature (1)..(267): Homolog of NCBI NO: 115819 NR Description: Chlorophyll A-B binding protein 1B, chloroplast
  misc_feature (1)..(267): Homolog of NCBI NO: 21592428 NR Description: putative photosystem II type I chlorophyll a b
  misc_feature (1)..(267): Homolog of NCBI NO: 18403549 NR Description: photosystem II type I chlorophyll a /b binding
  misc_feature (1)..(267): Homolog of NCBI NO: 18266039 NR Description: chlorophyll a/b binding protein [Brassica
  misc_feature (1)..(267): Homolog of NCBI NO: 21592428 NR Description: putative photosystem II type I chlorophyll a b
  misc_feature (19)..(267): Homolog of NCBI NO: 12324161 NR Description: chlorophyll A-B-binding protein 2 precursor, 5'
  misc_feature (1)..(267): Homolog of NCBI NO: 115819 NR Description: Chlorophyll A-B binding protein 1B, chloroplast
  misc_feature (1)..(267): Homolog of NCBI NO: 15220615 NR Description: light-harvesting chlorophyll a/b binding protein
  misc_feature (1)..(267): Homolog of NCBI NO: 18397286 NR Description: photosystem II type I chlorophyll a /b binding
  misc_feature (1)..(267): Homolog of NCBI NO: 17473828 NR Description: chlorophyll a/b-binding protein [Arabidopsis
  misc_feature (1)..(267): Homolog of NCBI NO: 18403546 NR Description: photosystem II type I chlorophyll a /b binding
  misc_feature (1)..(267): Homolog of NCBI NO: 115778 NR Description: Chlorophyll A-B binding protein 1, chloroplast
  misc_feature (1)..(267): Homolog of NCBI NO: 15220615 NR Description: light-harvesting chlorophyll a/b binding protein
  misc_feature (1)..(267): Homolog of NCBI NO: 18397286 NR Description: photosystem II type I chlorophyll a /b binding
  misc_feature (1)..(267): Homolog of NCBI NO: 17473828 NR Description: chlorophyll a/b-binding protein [Arabidopsis
  misc_feature (1)..(267): Homolog of NCBI NO: 18403546 NR Description: photosystem II type I chlorophyll a /b binding
  misc_feature (1)..(267): Homolog of NCBI NO: 115778 NR Description: Chlorophyll A-B binding protein 1, chloroplast
  misc_feature (1)..(267): Homolog of NCBI NO: 18403549 NR Description: photosystem II type I chlorophyll a /b binding
  misc_feature (1)..(267): Homolog of NCBI NO: 18266039 NR Description: chlorophyll a/b binding protein [Brassica
  misc_feature (19)..(267): Homolog of NCBI NO: 12324161 NR Description: chlorophyll A-B-binding protein 2 precursor, 5'
  misc_feature (1)..(267): Homolog of NCBI NO: 115778 NR Description: Chlorophyll A-B binding protein 1, chloroplast
  misc_feature (1)..(267): Homolog of NCBI NO: 18403546 NR Description: photosystem II type I chlorophyll a /b binding
  misc_feature (1)..(267): Homolog of NCBI NO: 17473828 NR Description: chlorophyll a/b-binding protein [Arabidopsis
  misc_feature (1)..(267): Homolog of NCBI NO: 18397286 NR Description: photosystem II type I chlorophyll a /b binding
  misc_feature (1)..(267): Homolog of NCBI NO: 15220615 NR Description: light-harvesting chlorophyll a/b binding protein

SEQ ID NO: 29108 - protein, 262 aa, Arabidopsis thaliana; identical to SEQ ID NO: 22640
  peptide (1)..(262): Ceres Seq. ID no. 13509222
  misc_feature (60)..(229): Pfam Name: Chlorophyll A-B binding protein Pfam Description: Chlorophyll A-B binding protein
  misc_feature (60)..(229): Pfam Name: Chlorophyll A-B binding protein Pfam Description: Chlorophyll A-B binding protein
  misc_feature (60)..(229): Pfam Name: Chlorophyll A-B binding protein Pfam Description: Chlorophyll A-B binding protein
  misc_feature (1)..(262): Homolog of NCBI NO: 115819 NR Description: Chlorophyll A-B binding protein 1B, chloroplast
  misc_feature (14)..(262): Homolog of NCBI NO: 12324161 NR Description: chlorophyll A-B-binding protein 2 precursor, 5'
  misc_feature (1)..(262): Homolog of NCBI NO: 21592428 NR Description: putative photosystem II type I chlorophyll a b
  misc_feature (1)..(262): Homolog of NCBI NO: 18266039 NR Description: chlorophyll a/b binding protein [Brassica
  misc_feature (1)..(262): Homolog of NCBI NO: 18403549 NR Description: photosystem II type I chlorophyll a /b binding
  misc_feature (1)..(262): Homolog of NCBI NO: 115819 NR Description: Chlorophyll A-B binding protein 1B, chloroplast
  misc_feature (1)..(262): Homolog of NCBI NO: 21592428 NR Description: putative photosystem II type I chlorophyll a b
  misc_feature (1)..(262): Homolog of NCBI NO: 18403549 NR Description: photosystem II type I chlorophyll a /b binding
  misc_feature (1)..(262): Homolog of NCBI NO: 18266039 NR Description: chlorophyll a/b binding protein [Brassica
  misc_feature (1)..(262): Homolog of NCBI NO: 21592428 NR Description: putative photosystem II type I chlorophyll a b
  misc_feature (14)..(262): Homolog of NCBI NO: 12324161 NR Description: chlorophyll A-B-binding protein 2 precursor, 5'
  misc_feature (1)..(262): Homolog of NCBI NO: 115819 NR Description: Chlorophyll A-B binding protein 1B, chloroplast
  misc_feature (1)..(262): Homolog of NCBI NO: 15220615 NR Description: light-harvesting chlorophyll a/b binding protein
  misc_feature (1)..(262): Homolog of NCBI NO: 18397286 NR Description: photosystem II type I chlorophyll a /b binding
  misc_feature (1)..(262): Homolog of NCBI NO: 17473828 NR Description: chlorophyll a/b-binding protein [Arabidopsis
  misc_feature (1)..(262): Homolog of NCBI NO: 18403546 NR Description: photosystem II type I chlorophyll a /b binding
  misc_feature (1)..(262): Homolog of NCBI NO: 115778 NR Description: Chlorophyll A-B binding protein 1, chloroplast
  misc_feature (1)..(262): Homolog of NCBI NO: 15220615 NR Description: light-harvesting chlorophyll a/b binding protein
  misc_feature (1)..(262): Homolog of NCBI NO: 18397286 NR Description: photosystem II type I chlorophyll a /b binding
  misc_feature (1)..(262): Homolog of NCBI NO: 17473828 NR Description: chlorophyll a/b-binding protein [Arabidopsis
  misc_feature (1)..(262): Homolog of NCBI NO: 18403546 NR Description: photosystem II type I chlorophyll a /b binding
  misc_feature (1)..(262): Homolog of NCBI NO: 115778 NR Description: Chlorophyll A-B binding protein 1, chloroplast
  misc_feature (1)..(262): Homolog of NCBI NO: 18403549 NR Description: photosystem II type I chlorophyll a /b binding
  misc_feature (1)..(262): Homolog of NCBI NO: 18266039 NR Description: chlorophyll a/b binding protein [Brassica
  misc_feature (14)..(262): Homolog of NCBI NO: 12324161 NR Description: chlorophyll A-B-binding protein 2 precursor, 5'
  misc_feature (1)..(262): Homolog of NCBI NO: 115778 NR Description: Chlorophyll A-B binding protein 1, chloroplast
  misc_feature (1)..(262): Homolog of NCBI NO: 18403546 NR Description: photosystem II type I chlorophyll a /b binding
  misc_feature (1)..(262): Homolog of NCBI NO: 17473828 NR Description: chlorophyll a/b-binding protein [Arabidopsis
  misc_feature (1)..(262): Homolog of NCBI NO: 18397286 NR Description: photosystem II type I chlorophyll a /b binding
  misc_feature (1)..(262): Homolog of NCBI NO: 15220615 NR Description: light-harvesting chlorophyll a/b binding protein

SEQ ID NO: 29109 - protein, 233 aa, Arabidopsis thaliana; identical to SEQ ID NO: 21214
  peptide (1)..(233): Ceres Seq. ID no. 13509223
  misc_feature (31)..(200): Pfam Name: Chlorophyll A-B binding protein Pfam Description: Chlorophyll A-B binding protein
  misc_feature (31)..(200): Pfam Name: Chlorophyll A-B binding protein Pfam Description: Chlorophyll A-B binding protein
  misc_feature (31)..(200): Pfam Name: Chlorophyll A-B binding protein Pfam Description: Chlorophyll A-B binding protein
  misc_feature (1)..(233): Homolog of NCBI NO: 115819 NR Description: Chlorophyll A-B binding protein 1B, chloroplast
  misc_feature (1)..(233): Homolog of NCBI NO: 12324161 NR Description: chlorophyll A-B-binding protein 2 precursor, 5'
  misc_feature (1)..(233): Homolog of NCBI NO: 21592428 NR Description: putative photosystem II type I chlorophyll a b
  misc_feature (1)..(233): Homolog of NCBI NO: 18266039 NR Description: chlorophyll a/b binding protein [Brassica
  misc_feature (1)..(233): Homolog of NCBI NO: 18403549 NR Description: photosystem II type I chlorophyll a /b binding
  misc_feature (1)..(233): Homolog of NCBI NO: 115819 NR Description: Chlorophyll A-B binding protein 1B, chloroplast
  misc_feature (1)..(233): Homolog of NCBI NO: 21592428 NR Description: putative photosystem II type I chlorophyll a b
  misc_feature (1)..(233): Homolog of NCBI NO: 18403549 NR Description: photosystem II type I chlorophyll a /b binding
  misc_feature (1)..(233): Homolog of NCBI NO: 18266039 NR Description: chlorophyll a/b binding protein [Brassica
  misc_feature (1)..(233): Homolog of NCBI NO: 21592428 NR Description: putative photosystem II type I chlorophyll a b
  misc_feature (1)..(233): Homolog of NCBI NO: 12324161 NR Description: chlorophyll A-B-binding protein 2 precursor, 5'
  misc_feature (1)..(233): Homolog of NCBI NO: 115819 NR Description: Chlorophyll A-B binding protein 1B, chloroplast
  misc_feature (1)..(233): Homolog of NCBI NO: 15220615 NR Description: light-harvesting chlorophyll a/b binding protein
  misc_feature (1)..(233): Homolog of NCBI NO: 18397286 NR Description: photosystem II type I chlorophyll a /b binding
  misc_feature (1)..(233): Homolog of NCBI NO: 17473828 NR Description: chlorophyll a/b-binding protein [Arabidopsis
  misc_feature (1)..(233): Homolog of NCBI NO: 18403546 NR Description: photosystem II type I chlorophyll a /b binding
  misc_feature (1)..(233): Homolog of NCBI NO: 115778 NR Description: Chlorophyll A-B binding protein 1, chloroplast
  misc_feature (1)..(233): Homolog of NCBI NO: 15220615 NR Description: light-harvesting chlorophyll a/b binding protein
  misc_feature (1)..(233): Homolog of NCBI NO: 18397286 NR Description: photosystem II type I chlorophyll a /b binding
  misc_feature (1)..(233): Homolog of NCBI NO: 17473828 NR Description: chlorophyll a/b-binding protein [Arabidopsis
  misc_feature (1)..(233): Homolog of NCBI NO: 18403546 NR Description: photosystem II type I chlorophyll a /b binding
  misc_feature (1)..(233): Homolog of NCBI NO: 115778 NR Description: Chlorophyll A-B binding protein 1, chloroplast
  misc_feature (1)..(233): Homolog of NCBI NO: 18403549 NR Description: photosystem II type I chlorophyll a /b binding
  misc_feature (1)..(233): Homolog of NCBI NO: 18266039 NR Description: chlorophyll a/b binding protein [Brassica
  misc_feature (1)..(233): Homolog of NCBI NO: 12324161 NR Description: chlorophyll A-B-binding protein 2 precursor, 5'
  misc_feature (1)..(233): Homolog of NCBI NO: 115778 NR Description: Chlorophyll A-B binding protein 1, chloroplast
  misc_feature (1)..(233): Homolog of NCBI NO: 18403546 NR Description: photosystem II type I chlorophyll a /b binding
  misc_feature (1)..(233): Homolog of NCBI NO: 17473828 NR Description: chlorophyll a/b-binding protein [Arabidopsis
  misc_feature (1)..(233): Homolog of NCBI NO: 18397286 NR Description: photosystem II type I chlorophyll a /b binding
  misc_feature (1)..(233): Homolog of NCBI NO: 15220615 NR Description: light-harvesting chlorophyll a/b binding protein

SEQ ID NO: 29110 - DNA, 745 bp, Arabidopsis thaliana
  misc_feature (1)..(745): Ceres Seq. ID no. 13496771
  misc_feature: MA Experiment ID: 108434 Result: Down-regulated in Transcription
  misc_feature: MA Experiment 108434 PARAMETER Experiment Name: At_Root_Tips_cDNA_P Parameter: Tissue Value: Root Tips
  misc_feature: MA Experiment ID: 108462 Result: Up-regulated in Transcription
  misc_feature: MA Experiment 108462 PARAMETER Experiment Name: At_Germinating_Seeds_cDNA_P Parameter: Age (day) Value: 2 vs. 0
  misc_feature: MA Experiment 108462 PARAMETER Experiment Name: At_Germinating_Seeds_cDNA_P Parameter: Tissue Value: Germinating Seeds
  misc_feature: MA Experiment ID: 108577 Result: Down-regulated in Transcription
  misc_feature: MA Experiment 108577 PARAMETER Experiment Name: At_42deg_Heat_cDNA_P Parameter: Temperature (deg C) Value: 42 vs. 22
  misc_feature: MA Experiment 108577 PARAMETER Experiment Name: At_42deg_Heat_cDNA_P Parameter: Timepoint (hr) Value: 6
  misc_feature: MA Experiment 108577 PARAMETER Experiment Name: At_42deg_Heat_cDNA_P Parameter: Tissue Value: Aerial
  misc_feature: MA Experiment ID: 108579 Result: Down-regulated in Transcription
  misc_feature: MA Experiment 108579 PARAMETER Experiment Name: At_4deg_Cold_cDNA_P Parameter: Temperature (deg C) Value: 4 vs. 22
  misc_feature: MA Experiment 108579 PARAMETER Experiment Name: At_4deg_Cold_cDNA_P Parameter: Timepoint (hr) Value: 6
  misc_feature: MA Experiment 108579 PARAMETER Experiment Name: At_4deg_Cold_cDNA_P Parameter: Tissue Value: Aerial
  misc_feature: MA Experiment ID: 108668 Result: Up-regulated in Transcription
  misc_feature: MA Experiment 108668 PARAMETER Experiment Name: At_2mM_SA_cDNA_P Parameter: Plant Line Value: WS
  misc_feature: MA Experiment 108668 PARAMETER Experiment Name: At_2mM_SA_cDNA_P Parameter: Timepoint (hr) Value: 6
  misc_feature: MA Experiment 108668 PARAMETER Experiment Name: At_2mM_SA_cDNA_P Parameter: Treatment Value: 2mM SA vs. No Treatment
  misc_feature: MA Experiment ID: 20000069 Result: Up-regulated in Transcription
  misc_feature: MA Experiment 20000069 PARAMETER Experiment Name: At_100uM_ABA_Mutants_cDNA_P Parameter: Plant Line Value: CS23
  misc_feature: MA Experiment 20000069 PARAMETER Experiment Name: At_100uM_ABA_Mutants_cDNA_P Parameter: Timepoint (hr) Value: 6
  misc_feature: MA Experiment 20000069 PARAMETER Experiment Name: At_100uM_ABA_Mutants_cDNA_P Parameter: Tissue Value: Aerial
  misc_feature: MA Experiment 20000069 PARAMETER Experiment Name: At_100uM_ABA_Mutants_cDNA_P Parameter: Treatment Value: 100uM ABA vs. No Treatment
  misc_feature: MA Experiment ID: 20000070 Result: Up-regulated in Transcription
  misc_feature: MA Experiment 20000070 PARAMETER Experiment Name: At_100uM_ABA_Mutants_cDNA_P Parameter: Plant Line Value: CS24
  misc_feature: MA Experiment 20000070 PARAMETER Experiment Name: At_100uM_ABA_Mutants_cDNA_P Parameter: Timepoint (hr) Value: 6
  misc_feature: MA Experiment 20000070 PARAMETER Experiment Name: At_100uM_ABA_Mutants_cDNA_P Parameter: Tissue Value: Aerial
  misc_feature: MA Experiment 20000070 PARAMETER Experiment Name: At_100uM_ABA_Mutants_cDNA_P Parameter: Treatment Value: 100uM ABA vs. No Treatment
  misc_feature: MA Experiment ID: 20000111 Result: Down-regulated in Transcription
  misc_feature: MA Experiment 20000111 PARAMETER Experiment Name: At_42deg_Heat_cDNA_P Parameter: Temperature (deg C) Value: 42 vs. 22
  misc_feature: MA Experiment 20000111 PARAMETER Experiment Name: At_42deg_Heat_cDNA_P Parameter: Timepoint (hr) Value: 6
  misc_feature: MA Experiment 20000111 PARAMETER Experiment Name: At_42deg_Heat_cDNA_P Parameter: Tissue Value: Aerial
  misc_feature: MA Experiment ID: 20000180 Result: Up-regulated in Transcription
  misc_feature: MA Experiment 20000180 PARAMETER Experiment Name: At_Germinating_Seeds_P Parameter: Age (hr) Value: 24 vs. 0
  misc_feature: MA Experiment 20000180 PARAMETER Experiment Name: At_Germinating_Seeds_P Parameter: Tissue Value: Germinating Seeds
  misc_feature: MA Experiment ID: 20000182 Result: Up-regulated in Transcription
  misc_feature: MA Experiment 20000182 PARAMETER Experiment Name: At_2mM_SA_P Parameter: Age (day) Value: 14
  misc_feature: MA Experiment 20000182 PARAMETER Experiment Name: At_2mM_SA_P Parameter: Organism Value: A. thaliana
  misc_feature: MA Experiment 20000182 PARAMETER Experiment Name: At_2mM_SA_P Parameter: Plant Line Value: WS
  misc_feature: MA Experiment 20000182 PARAMETER Experiment Name: At_2mM_SA_P Parameter: Timepoint (hr) Value: 6
  misc_feature: MA Experiment 20000182 PARAMETER Experiment Name: At_2mM_SA_P Parameter: Tissue Value: Aerial
  misc_feature: MA Experiment 20000182 PARAMETER Experiment Name: At_2mM_SA_P Parameter: Treatment Value: 2mM SA vs. No Treatment
  misc_feature: MA Experiment ID: 20000184 Result: Down-regulated in Transcription
  misc_feature: MA Experiment 20000184 PARAMETER Experiment Name: At_Shoots__P Parameter: Age (day) Value: 7
  misc_feature: MA Experiment 20000184 PARAMETER Experiment Name: At_Shoots__P Parameter: Tissue Value: Shoots vs. Whole Plant
  misc_feature: MA Experiment ID: 20000235 Result: Down-regulated in Transcription
  misc_feature: MA Experiment 20000235 PARAMETER Experiment Name: At_Siliques_P Parameter: Age (day) Value: 21
  misc_feature: MA Experiment 20000235 PARAMETER Experiment Name: At_Siliques_P Parameter: Organism Value: A. thaliana
  misc_feature: MA Experiment 20000235 PARAMETER Experiment Name: At_Siliques_P Parameter: Plant Line Value: WS
  misc_feature: MA Experiment 20000235 PARAMETER Experiment Name: At_Siliques_P Parameter: Tissue Value: 5-10mm Siliques vs. Whole Plant
  misc_feature: MA Experiment ID: 20000265 Result: Down-regulated in Transcription
  misc_feature: MA Experiment 20000265 PARAMETER Experiment Name: At_Open_Flower_P Parameter: Age (day) Value: 21
  misc_feature: MA Experiment 20000265 PARAMETER Experiment Name: At_Open_Flower_P Parameter: Plant Line Value: WS
  misc_feature: MA Experiment 20000265 PARAMETER Experiment Name: At_Open_Flower_P Parameter: Tissue Value: Closed Flower vs. Whole Plant
  misc_feature: Phenotype: INFLORESCENCE Flowering Time-Late Flowering
  misc_feature: Phenotype: INFLORESCENCE Flowering Time-Late Flowering
  misc_feature: Phenotype: SILIQUES Other
  misc_feature: Phenotype: FERTILITY Fertility-Reduced
  misc_feature: Phenotype: WHOLE PLANT Size-Small
  misc_feature: Phenotype: WHOLE PLANT Size-Small
  misc_feature: Phenotype: INFLORESCENCE Flowering Time-Late Flowering
  misc_feature: Phenotype: INFLORESCENCE Flowering Time-Late Flowering
  misc_feature: Phenotype: WHOLE PLANT Size-Small
  misc_feature: Phenotype: WHOLE PLANT Size-Small
  misc_feature: Phenotype: INFLORESCENCE Flowering Time-Late Flowering
  misc_feature: Phenotype: INFLORESCENCE Flowering Time-Late Flowering
ttggacttcaaataattttaattagtttcttctgtgcgatagagatcgatcgagagatgggtgcttcatcatcatcatctgtgtcggagaaatcaatccatcaattcaccgtcaaggatagctccggcaaggaggttgacctaagcgtgtatcaagggaaagtgctgctcgtcgtcaacgtcgcttctaaatgcggattcacggagtccaattacacccagctgacggaactttaccggaaatataaagatcaaggttttgtggtattggcgtttccttgcaaccagtttctgtcccaagagcctggcaccagcgaagaggctcatcaatttgcttgtactcgctttaaggctgaataccctgttttccaaaaggtgcgtgtaaatggacaaaacgctgcaccagtctacaaattcctcaaatctaagaaaccctcttttcttggaagtcgtatcaaatggaacttcaccaagttcttggtcggcaaagatggtcaagtcattgatcgttatggcacaactgtttcacctctatccatccagaaagacatcgagaaagcccttgcacaagaattgtgaacacgcacagagatatttgactcctttggaagaaacttctctcatactctcggtcatgcagtcaagtttctacatttcccattgcaccttccatatgggccttgtattcatcttatgtgtaactctactagccatttcttttgtgaaatttgatcaaaggtgattcc

SEQ ID NO: 29111 - protein, 191 aa, Arabidopsis thaliana
  peptide (1)..(191): Ceres Seq. ID no. 13496772
  misc_feature (31)..(140): Pfam Name: Glutathione peroxidase Pfam Description: Glutathione peroxidase
  misc_feature (22)..(187): Homolog of NCBI NO: 20138151 NR Description: Probable phospholipid hydroperoxide glutathione
  misc_feature (19)..(187): Homolog of NCBI NO: 34334012 NR Description: cytosolic glutathione peroxidase [Triticum
  misc_feature (19)..(187): Homolog of NCBI NO: 6179604 NR Description: glutathione peroxidase-like protein GPX54Hv
  misc_feature (19)..(187): Homolog of NCBI NO: 22268405 NR Description: putative glutathione peroxidase [Zea mays]
  misc_feature (21)..(188): Homolog of NCBI NO: 6179600 NR Description: GPX12Hv, glutathione peroxidase-like protein
  misc_feature (21)..(188): Homolog of NCBI NO: 27544804 NR Description: phospholipid hydroperoxide glutathione
  misc_feature (19)..(187): Homolog of NCBI NO: 11544696 NR Description: putative phospholipid hydroperoxide glutathione
  misc_feature (19)..(183): Homolog of NCBI NO: 25285637 NR Description: probable glutathione peroxidase [imported] -
  misc_feature (19)..(187): Homolog of NCBI NO: 18407538 NR Description: glutathione peroxidase, putative [Arabidopsis
  misc_feature (19)..(191): Homolog of NCBI NO: 15229378 NR Description: glutathione peroxidase, putative [Arabidopsis
GLQIILISFFCAIEIDREMGASSSSSVSEKSIHQFTVKDSSGKEVDLSVYQGKVLLVVNVASKCGFTESNYTQLTELYRKYKDQGFVVLAFPCNQFLSQEPGTSEEAHQFACTRFKAEYPVFQKVRVNGQNAAPVYKFLKSKKPSFLGSRIKWNFTKFLVGKDGQVIDRYGTTVSPLSIQKDIEKALAQEL

SEQ ID NO: 29112 - protein, 173 aa, Arabidopsis thaliana
  peptide (1)..(173): Ceres Seq. ID no. 13496773
  misc_feature (13)..(122): Pfam Name: Glutathione peroxidase Pfam Description: Glutathione peroxidase
  misc_feature (4)..(169): Homolog of NCBI NO: 20138151 NR Description: Probable phospholipid hydroperoxide glutathione
  misc_feature (1)..(169): Homolog of NCBI NO: 34334012 NR Description: cytosolic glutathione peroxidase [Triticum
  misc_feature (1)..(169): Homolog of NCBI NO: 6179604 NR Description: glutathione peroxidase-like protein GPX54Hv
  misc_feature (1)..(169): Homolog of NCBI NO: 22268405 NR Description: putative glutathione peroxidase [Zea mays]
  misc_feature (3)..(170): Homolog of NCBI NO: 6179600 NR Description: GPX12Hv, glutathione peroxidase-like protein
  misc_feature (3)..(170): Homolog of NCBI NO: 27544804 NR Description: phospholipid hydroperoxide glutathione
  misc_feature (1)..(169): Homolog of NCBI NO: 11544696 NR Description: putative phospholipid hydroperoxide glutathione
  misc_feature (1)..(165): Homolog of NCBI NO: 25285637 NR Description: probable glutathione peroxidase [imported] -
  misc_feature (1)..(169): Homolog of NCBI NO: 18407538 NR Description: glutathione peroxidase, putative [Arabidopsis
  misc_feature (1)..(173): Homolog of NCBI NO: 15229378 NR Description: glutathione peroxidase, putative [Arabidopsis
MGASSSSSVSEKSIHQFTVKDSSGKEVDLSVYQGKVLLVVNVASKCGFTESNYTQLTELYRKYKDQGFVVLAFPCNQFLSQEPGTSEEAHQFACTRFKAEYPVFQKVRVNGQNAAPVYKFLKSKKPSFLGSRIKWNFTKFLVGKDGQVIDRYGTTVSPLSIQKDIEKALAQEL

SEQ ID NO: 29113 - protein, 118 aa, Arabidopsis thaliana
  peptide (1)..(118): Ceres Seq. ID no. 13496774
MDKTLHQSTNSSNLRNPLFLEVVSNGTSPSSWSAKMVKSLIVMAQLFHLYPSRKTSRKPLHKNCEHAQRYLTPLEETSLILSVMQSSFYISHCTFHMGLVFILCVTLLAISFVKFDQR

SEQ ID NO: 29114 - DNA, 648 bp, Arabidopsis thaliana
  misc_feature (1)..(648): Ceres Seq. ID no. 12738718
  misc_feature: MA Experiment ID: 108434 Result: Down-regulated in Transcription
  misc_feature: MA Experiment 108434 PARAMETER Experiment Name: At_Root_Tips_cDNA_P Parameter: Tissue Value: Root Tips
  misc_feature: MA Experiment ID: 20001557 Result: Down-regulated in Transcription
  misc_feature: MA Experiment 20001557 PARAMETER Experiment Name: At_Drought_Soil_Dry_P Parameter: Age (day) Value: 27
  misc_feature: MA Experiment 20001557 PARAMETER Experiment Name: At_Drought_Soil_Dry_P Parameter: Organism Value: A. thaliana
  misc_feature: MA Experiment 20001557 PARAMETER Experiment Name: At_Drought_Soil_Dry_P Parameter: Plant Line Value: WS
  misc_feature: MA Experiment 20001557 PARAMETER Experiment Name: At_Drought_Soil_Dry_P Parameter: Post Timepoint (hr) Value: 3
  misc_feature: MA Experiment 20001557 PARAMETER Experiment Name: At_Drought_Soil_Dry_P Parameter: Post-Treatment Value: Re-Water vs. No Drought
  misc_feature: MA Experiment 20001557 PARAMETER Experiment Name: At_Drought_Soil_Dry_P Parameter: Timepoint (day) Value: 13
  misc_feature: MA Experiment 20001557 PARAMETER Experiment Name: At_Drought_Soil_Dry_P Parameter: Treatment Value: Drought vs. No Drought
  misc_feature: MA Experiment ID: 20001558 Result: Down-regulated in Transcription
  misc_feature: MA Experiment 20001558 PARAMETER Experiment Name: At_Drought_Soil_Dry_P Parameter: Age (day) Value: 27
  misc_feature: MA Experiment 20001558 PARAMETER Experiment Name: At_Drought_Soil_Dry_P Parameter: Organism Value: A. thaliana
  misc_feature: MA Experiment 20001558 PARAMETER Experiment Name: At_Drought_Soil_Dry_P Parameter: Plant Line Value: WS
  misc_feature: MA Experiment 20001558 PARAMETER Experiment Name: At_Drought_Soil_Dry_P Parameter: Post Timepoint (hr) Value: 6
  misc_feature: MA Experiment 20001558 PARAMETER Experiment Name: At_Drought_Soil_Dry_P Parameter: Post-Treatment Value: Re-Water vs. No Drought
  misc_feature: MA Experiment 20001558 PARAMETER Experiment Name: At_Drought_Soil_Dry_P Parameter: Timepoint (day) Value: 13
  misc_feature: MA Experiment 20001558 PARAMETER Experiment Name: At_Drought_Soil_Dry_P Parameter: Treatment Value: Drought vs. No Drought
  misc_feature: MA Experiment ID: 20001560 Result: Down-regulated in Transcription
  misc_feature: MA Experiment 20001560 PARAMETER Experiment Name: At_Drought_Soil_Dry_P Parameter: Age (day) Value: 28
  misc_feature: MA Experiment 20001560 PARAMETER Experiment Name: At_Drought_Soil_Dry_P Parameter: Organism Value: A. thaliana
  misc_feature: MA Experiment 20001560 PARAMETER Experiment Name: At_Drought_Soil_Dry_P Parameter: Plant Line Value: WS
  misc_feature: MA Experiment 20001560 PARAMETER Experiment Name: At_Drought_Soil_Dry_P Parameter: Post Timepoint (hr) Value: None
  misc_feature: MA Experiment 20001560 PARAMETER Experiment Name: At_Drought_Soil_Dry_P Parameter: Post-Treatment Value: None
  misc_feature: MA Experiment 20001560 PARAMETER Experiment Name: At_Drought_Soil_Dry_P Parameter: Timepoint (day) Value: 14
  misc_feature: MA Experiment 20001560 PARAMETER Experiment Name: At_Drought_Soil_Dry_P Parameter: Treatment Value: Drought vs. No Drought
  misc_feature: MA Experiment ID: 20001911 Result: Up-regulated in Transcription
  misc_feature: MA Experiment 20001911 PARAMETER Experiment Name: At_Drought_Reproduction_P Parameter: Age (day) Value: 40
  misc_feature: MA Experiment 20001911 PARAMETER Experiment Name: At_Drought_Reproduction_P Parameter: Organism Value: A. thaliana
  misc_feature: MA Experiment 20001911 PARAMETER Experiment Name: At_Drought_Reproduction_P Parameter: Plant Line Value: WS
  misc_feature: MA Experiment 20001911 PARAMETER Experiment Name: At_Drought_Reproduction_P Parameter: Timepoint (day) Value: 10
  misc_feature: MA Experiment 20001911 PARAMETER Experiment Name: At_Drought_Reproduction_P Parameter: Tissue Value: Flowers
  misc_feature: MA Experiment 20001911 PARAMETER Experiment Name: At_Drought_Reproduction_P Parameter: Treatment Value: Drought vs. No Drought
aattttcatttgcattaaaatataataaaaagacgtaagattctctccgcctcctccttctctctataagaaccgacacagagacgaagaagaataatcactcaaaaactcatcaaatcaaaaatcaaacacagagaagagaaaatggccgcagaaggagaagttatcgcttgccacaccgttgaagattggaccgagaagctcaaagccgccaacgaatccaagaaactgattgtgatagacttcactgcaacatggtgcccaccttgccgtttcattgcacccgtctttgctgacttagccaagaagcaccttgacgtagtcttcttcaaggtcgatgttgacgaattgaacactgttgctgaggagtttaaagttcaggcaatgccaacgtttatcttcatgaaagaaggagagatcaaggagactgtggttggtgctgcgaaagaagaaatcattgccaatctcgagaagcacaagacagttgttgctgctgcttgatttgcttttctctcttacctattttgctaaaatatgtttggtgttttaataaatcctttgttcgcccgagtcttttcaccttaaatgtgctcttatgtgtggtggtgaataaatgttgttgcaaacttgattactcgcagctatgct

SEQ ID NO: 29115 - protein, 118 aa, Arabidopsis thaliana
  peptide (1)..(118): Ceres Seq. ID no. 12738719
  misc_feature (1)..(111): Homolog of NCBI NO: 15230385 NR Description: thioredoxin h; protein id: At3g51030.1, supported
  misc_feature (3)..(111): Homolog of NCBI NO: 12082335 NR Description: thioredoxin h [Oryza sativa (japonica
  misc_feature (1)..(29): Homolog of NCBI NO: 25405885 NR Description: protein F27F5.21 [imported] - Arabidopsis
  misc_feature (29)..(111): Homolog of NCBI NO: 25405885 NR Description: protein F27F5.21 [imported] - Arabidopsis
  misc_feature (5)..(117): Homolog of NCBI NO: 11135129 NR Description: Thioredoxin H-type (TRX-H)
  misc_feature (5)..(117): Homolog of NCBI NO: 11494247 NR Description: thioredoxin-h-like protein 1 [Brassica oleracea
  misc_feature (5)..(117): Homolog of NCBI NO: 11135277 NR Description: Thioredoxin H-type 1 (TRX-H-1) (Pollen coat
  misc_feature (1)..(118): Homolog of NCBI NO: 15219537 NR Description: thioredoxin, putative
  misc_feature (1)..(118): Homolog of NCBI NO: 1388084 NR Description: thioredoxin h
  misc_feature (1)..(118): Homolog of NCBI NO: 15239136 NR Description: thioredoxin (clone GIF1) (pir||S58118)
MAAEGEVIACHTVEDWTEKLKAANESKKLIVIDFTATWCPPCRFIAPVFADLAKKHLDVVFFKVDVDELNTVAEEFKVQAMPTFIFMKEGEIKETVVGAAKEEIIANLEKHKTVVAAA

SEQ ID NO: 29116 - DNA, 888 bp, Arabidopsis thaliana
  misc_feature (1)..(888): Ceres Seq. ID no. 13646051
  misc_feature: MA Experiment ID: 108461 Result: Up-regulated in Transcription
  misc_feature: MA Experiment 108461 PARAMETER Experiment Name: At_Germinating_Seeds_cDNA_P Parameter: Age (day) Value: 1 vs. 0
  misc_feature: MA Experiment 108461 PARAMETER Experiment Name: At_Germinating_Seeds_cDNA_P Parameter: Tissue Value: Germinating Seeds
  misc_feature: MA Experiment ID: 108462 Result: Up-regulated in Transcription
  misc_feature: MA Experiment 108462 PARAMETER Experiment Name: At_Germinating_Seeds_cDNA_P Parameter: Age (day) Value: 2 vs. 0
  misc_feature: MA Experiment 108462 PARAMETER Experiment Name: At_Germinating_Seeds_cDNA_P Parameter: Tissue Value: Germinating Seeds
  misc_feature: MA Experiment ID: 108488 Result: Up-regulated in Transcription
  misc_feature: MA Experiment ID: 108595 Result: Down-regulated in Transcription
  misc_feature: MA Experiment 108595 PARAMETER Experiment Name: At_Ler-pi_Ovule_cDNA_P Parameter: Plant Line Value: null
  misc_feature: MA Experiment ID: 20000070 Result: Down-regulated in Transcription
  misc_feature: MA Experiment 20000070 PARAMETER Experiment Name: At_100uM_ABA_Mutants_cDNA_P Parameter: Plant Line Value: CS24
  misc_feature: MA Experiment 20000070 PARAMETER Experiment Name: At_100uM_ABA_Mutants_cDNA_P Parameter: Timepoint (hr) Value: 6
  misc_feature: MA Experiment 20000070 PARAMETER Experiment Name: At_100uM_ABA_Mutants_cDNA_P Parameter: Tissue Value: Aerial
  misc_feature: MA Experiment 20000070 PARAMETER Experiment Name: At_100uM_ABA_Mutants_cDNA_P Parameter: Treatment Value: 100uM ABA vs. No Treatment
  misc_feature: MA Experiment ID: 20000071 Result: Down-regulated in Transcription
  misc_feature: MA Experiment 20000071 PARAMETER Experiment Name: At_100uM_ABA_Mutants_cDNA_P Parameter: Plant Line Value: CS8104
  misc_feature: MA Experiment 20000071 PARAMETER Experiment Name: At_100uM_ABA_Mutants_cDNA_P Parameter: Timepoint (hr) Value: 6
  misc_feature: MA Experiment 20000071 PARAMETER Experiment Name: At_100uM_ABA_Mutants_cDNA_P Parameter: Tissue Value: Aerial
  misc_feature: MA Experiment 20000071 PARAMETER Experiment Name: At_100uM_ABA_Mutants_cDNA_P Parameter: Treatment Value: 100uM ABA vs. No Treatment
  misc_feature: MA Experiment ID: 20000072 Result: Down-regulated in Transcription
  misc_feature: MA Experiment 20000072 PARAMETER Experiment Name: At_100uM_ABA_Mutants_cDNA_P Parameter: Plant Line Value: CS8105
  misc_feature: MA Experiment 20000072 PARAMETER Experiment Name: At_100uM_ABA_Mutants_cDNA_P Parameter: Timepoint (hr) Value: 6
  misc_feature: MA Experiment 20000072 PARAMETER Experiment Name: At_100uM_ABA_Mutants_cDNA_P Parameter: Tissue Value: Aerial
  misc_feature: MA Experiment 20000072 PARAMETER Experiment Name: At_100uM_ABA_Mutants_cDNA_P Parameter: Treatment Value: 100uM ABA vs. No Treatment
  misc_feature: MA Experiment ID: 20000086 Result: Down-regulated in Transcription
  misc_feature: MA Experiment 20000086 PARAMETER Experiment Name: At_100uM_ABA_Mutants_cDNA_P Parameter: Plant Line Value: CS22
  misc_feature: MA Experiment 20000086 PARAMETER Experiment Name: At_100uM_ABA_Mutants_cDNA_P Parameter: Timepoint (hr) Value: 6
  misc_feature: MA Experiment 20000086 PARAMETER Experiment Name: At_100uM_ABA_Mutants_cDNA_P Parameter: Tissue Value: Aerial
  misc_feature: MA Experiment 20000086 PARAMETER Experiment Name: At_100uM_ABA_Mutants_cDNA_P Parameter: Treatment Value: 100uM ABA vs. No Treatment
  misc_feature: MA Experiment ID: 20000117 Result: Down-regulated in Transcription
  misc_feature: MA Experiment 20000117 PARAMETER Experiment Name: At_100uM_ABA_Mutants_cDNA_P Parameter: Plant Line Value: Columbia
  misc_feature: MA Experiment 20000117 PARAMETER Experiment Name: At_100uM_ABA_Mutants_cDNA_P Parameter: Timepoint (hr) Value: 6
  misc_feature: MA Experiment 20000117 PARAMETER Experiment Name: At_100uM_ABA_Mutants_cDNA_P Parameter: Tissue Value: Aerial
  misc_feature: MA Experiment 20000117 PARAMETER Experiment Name: At_100uM_ABA_Mutants_cDNA_P Parameter: Treatment Value: 100uM ABA vs. No Treatment
  misc_feature: MA Experiment ID: 20000180 Result: Up-regulated in Transcription
  misc_feature: MA Experiment 20000180 PARAMETER Experiment Name: At_Germinating_Seeds_P Parameter: Age (hr) Value: 24 vs. 0
  misc_feature: MA Experiment 20000180 PARAMETER Experiment Name: At_Germinating_Seeds_P Parameter: Tissue Value: Germinating Seeds
  misc_feature: MA Experiment ID: 20000185 Result: Down-regulated in Transcription
  misc_feature: MA Experiment 20000185 PARAMETER Experiment Name: At_Roots__P Parameter: Age (day) Value: 7 vs. 21
  misc_feature: MA Experiment 20000185 PARAMETER Experiment Name: At_Roots__P Parameter: Organism Value: A. thaliana
  misc_feature: MA Experiment 20000185 PARAMETER Experiment Name: At_Roots__P Parameter: Tissue Value: Roots vs. Whole Plant
  misc_feature: MA Experiment ID: 20000437 Result: Down-regulated in Transcription
  misc_feature: MA Experiment 20000437 PARAMETER Experiment Name: At_Drought_P Parameter: Age (day) Value: 8
  misc_feature: MA Experiment 20000437 PARAMETER Experiment Name: At_Drought_P Parameter: Organism Value: A. thaliana
  misc_feature: MA Experiment 20000437 PARAMETER Experiment Name: At_Drought_P Parameter: Plant Line Value: WS
  misc_feature: MA Experiment 20000437 PARAMETER Experiment Name: At_Drought_P Parameter: Timepoint (hr) Value: 24
  misc_feature: MA Experiment 20000437 PARAMETER Experiment Name: At_Drought_P Parameter: Tissue Value: Whole Plant
  misc_feature: MA Experiment 20000437 PARAMETER Experiment Name: At_Drought_P Parameter: Treatment Value: Drought vs. No Drought
  misc_feature: MA Experiment ID: 20000438 Result: Up-regulated in Transcription
  misc_feature: MA Experiment 20000438 PARAMETER Experiment Name: At_Shoots__P Parameter: Age (day) Value: 14
  misc_feature: MA Experiment 20000438 PARAMETER Experiment Name: At_Shoots__P Parameter: Tissue Value: Shoots vs. Whole Plant
  misc_feature: MA Experiment ID: 20000439 Result: Down-regulated in Transcription
  misc_feature: MA Experiment 20000439 PARAMETER Experiment Name: At_Roots__P Parameter: Age (day) Value: 14 vs. 21
  misc_feature: MA Experiment 20000439 PARAMETER Experiment Name: At_Roots__P Parameter: Organism Value: A. thaliana
  misc_feature: MA Experiment 20000439 PARAMETER Experiment Name: At_Roots__P Parameter: Tissue Value: Roots vs. Whole Plant
  misc_feature: MA Experiment ID: 20001248 Result: Down-regulated in Transcription
  misc_feature: MA Experiment 20001248 PARAMETER Experiment Name: At_Far-red-induction_P Parameter: Age (day) Value: 7
  misc_feature: MA Experiment 20001248 PARAMETER Experiment Name: At_Far-red-induction_P Parameter: Light Value: Far-red vs. White
  misc_feature: MA Experiment 20001248 PARAMETER Experiment Name: At_Far-red-induction_P Parameter: Organism Value: A. thaliana
  misc_feature: MA Experiment 20001248 PARAMETER Experiment Name: At_Far-red-induction_P Parameter: Plant Line Value: Columbia
  misc_feature: MA Experiment 20001248 PARAMETER Experiment Name: At_Far-red-induction_P Parameter: Timepoint (hr) Value: 4
  misc_feature: MA Experiment 20001248 PARAMETER Experiment Name: At_Far-red-induction_P Parameter: Tissue Value: Whole Plant
  misc_feature: MA Experiment ID: 20001450 Result: Down-regulated in Transcription
  misc_feature: MA Experiment 20001450 PARAMETER Experiment Name: At_Far-red-induction_P Parameter: Age (day) Value: 7
  misc_feature: MA Experiment 20001450 PARAMETER Experiment Name: At_Far-red-induction_P Parameter: Light Value: Far-red vs. White
  misc_feature: MA Experiment 20001450 PARAMETER Experiment Name: At_Far-red-induction_P Parameter: Organism Value: A. thaliana
  misc_feature: MA Experiment 20001450 PARAMETER Experiment Name: At_Far-red-induction_P Parameter: Plant Line Value: Columbia
  misc_feature: MA Experiment 20001450 PARAMETER Experiment Name: At_Far-red-induction_P Parameter: Timepoint (hr) Value: 8
  misc_feature: MA Experiment 20001450 PARAMETER Experiment Name: At_Far-red-induction_P Parameter: Tissue Value: Whole Plant
  misc_feature: MA Experiment ID: 20001757 Result: Up-regulated in Transcription
  misc_feature: MA Experiment 20001757 PARAMETER Experiment Name: At_50mM_NH4NO3_L-to-H_P Parameter: Timepoint (hr) Value: 6
  misc_feature: MA Experiment 20001757 PARAMETER Experiment Name: At_50mM_NH4NO3_L-to-H_P Parameter: Tissue Value: Leaf
  misc_feature: MA Experiment 20001757 PARAMETER Experiment Name: At_50mM_NH4NO3_L-to-H_P Parameter: Treatment Value: 50mM NH4NO3 vs 100mM Mannitol
  misc_feature: MA Experiment ID: 20001905 Result: Down-regulated in Transcription
  misc_feature: MA Experiment 20001905 PARAMETER Experiment Name: At_Drought_Reproduction_P Parameter: Age (day) Value: 40
  misc_feature: MA Experiment 20001905 PARAMETER Experiment Name: At_Drought_Reproduction_P Parameter: Organism Value: A. thaliana
  misc_feature: MA Experiment 20001905 PARAMETER Experiment Name: At_Drought_Reproduction_P Parameter: Plant Line Value: WS
  misc_feature: MA Experiment 20001905 PARAMETER Experiment Name: At_Drought_Reproduction_P Parameter: Timepoint (day) Value: 10
  misc_feature: MA Experiment 20001905 PARAMETER Experiment Name: At_Drought_Reproduction_P Parameter: Tissue Value: Rosettes
  misc_feature: MA Experiment 20001905 PARAMETER Experiment Name: At_Drought_Reproduction_P Parameter: Treatment Value: Drought vs. No Drought
tgacacacaatccaatcaaaacacacagagagaagaaaaactcagaagaaaagccaaagagtgaaacaaaaatggcgtcgacgactctctcaatcgcaacaacaatccgttcctcatcttatcctactctcgcttccatcaatcacttcccttcccgaaccaccaccatcgaattcccctctcgcttcggtggtggttcatcatccacattgacccaccgtgcaacccatctccgtccaatcgccgccgtcgaagctccggagaaaatcgagaagatcggatccgaaatctcatccctaaccctcgaagaagctcgtatcctcgtcgactatctccaagacaaattcggtgtctccccactctctttagcccccgcagcagcggcggttgctgctccagccgacggtggcgcggcggctgtagtggaggagcaaacagagttcgatgtggttatcaatgaagttccgagtagttctcgtattgcagtaattaaagctgttagggctttgactagcttggcgttgaaggaagctaaggagctaatcgaaggattaccaaagaagtttaaagaaggtatcactaaagatgaagctgaagaagctaagaagactcttgaagaagctggtgctaaagtctccattgcttaaggtttttataaaaaaaaaaaaagaagttgttatcttttctggaatttgattggtcttttgtgttgtttagtatagtttgcgtctggaattgttgagaaattgttgtaatttgaatcacatttggtttcccattagctgatttcgccattgatgtgagctttttggtagctgcacataacatgtttgttgaaatgcctaaatgaggcaaatcactcgtagttgcttaacatgaaacagagtt

SEQ ID NO: 29117 - protein, 214 aa, Arabidopsis thaliana
  peptide (1)..(214): Ceres Seq. ID no. 13646052
  misc_feature (146)..(214): Pfam Name: Ribosomal protein L7/L12 C-terminal domain Pfam Description: Ribosomal protein L7/L12 C-terminal domain
  misc_feature (146)..(214): Pfam Name: Ribosomal protein L7/L12 C-terminal domain Pfam Description: Ribosomal protein L7/L12 C-terminal domain
  misc_feature (24)..(213): Homolog of NCBI NO: 133085 NR Description: 50S RIBOSOMAL PROTEIN L12, CHLOROPLAST PRECURSOR
  misc_feature (24)..(214): Homolog of NCBI NO: 548746 NR Description: 50S RIBOSOMAL PROTEIN L12, CHLOROPLAST PRECURSOR
  misc_feature (24)..(214): Homolog of NCBI NO: 133088 NR Description: 50S RIBOSOMAL PROTEIN L12, CHLOROPLAST PRECURSOR
  misc_feature (24)..(214): Homolog of NCBI NO: 20020 NR Description: ribosomal protein L12-1a [Nicotiana tabacum]
  misc_feature (24)..(213): Homolog of NCBI NO: 541896 NR Description: ribosomal protein L12.B precursor, chloroplast -
  misc_feature (24)..(213): Homolog of NCBI NO: 133085 NR Description: 50S RIBOSOMAL PROTEIN L12, CHLOROPLAST PRECURSOR
  misc_feature (24)..(214): Homolog of NCBI NO: 133088 NR Description: 50S RIBOSOMAL PROTEIN L12, CHLOROPLAST PRECURSOR
  misc_feature (24)..(213): Homolog of NCBI NO: 541896 NR Description: ribosomal protein L12.B precursor, chloroplast -
  misc_feature (24)..(214): Homolog of NCBI NO: 15232274 NR Description: 50S ribosomal protein L12-1, chloroplast
  misc_feature (24)..(214): Homolog of NCBI NO: 541897 NR Description: ribosomal protein L12.C precursor, chloroplast -
  misc_feature (24)..(214): Homolog of NCBI NO: 15232276 NR Description: 50S ribosomal protein L12-3, chloroplast
  misc_feature (24)..(214): Homolog of NCBI NO: 21592776 NR Description: 50S ribosomal protein L12-C [Arabidopsis thaliana]
  misc_feature (24)..(213): Homolog of NCBI NO: 15232275 NR Description: 50S ribosomal protein L12-2, chloroplast
  misc_feature (24)..(214): Homolog of NCBI NO: 20020 NR Description: ribosomal protein L12-1a [Nicotiana tabacum]
  misc_feature (24)..(214): Homolog of NCBI NO: 548746 NR Description: 50S RIBOSOMAL PROTEIN L12, CHLOROPLAST PRECURSOR
  misc_feature (24)..(213): Homolog of NCBI NO: 15232275 NR Description: 50S ribosomal protein L12-2, chloroplast
  misc_feature (24)..(214): Homolog of NCBI NO: 21592776 NR Description: 50S ribosomal protein L12-C [Arabidopsis thaliana]
  misc_feature (24)..(214): Homolog of NCBI NO: 15232276 NR Description: 50S ribosomal protein L12-3, chloroplast
  misc_feature (24)..(214): Homolog of NCBI NO: 541897 NR Description: ribosomal protein L12.C precursor, chloroplast -
  misc_feature (24)..(214): Homolog of NCBI NO: 15232274 NR Description: 50S ribosomal protein L12-1, chloroplast
THNPIKTHREKKNSEEKPKSETKMASTTLSIATTIRSSSYPTLASINHFPSRTTTIEFPSRFGGGSSSTLTHRATHLRPIAAVEAPEKIEKIGSEISSLTLEEARILVDYLQDKFGVSPLSLAPAAAAVAAPADGGAAAVVEEQTEFDVVINEVPSSSRIAVIKAVRALTSLALKEAKELIEGLPKKFKEGITKDEAEEAKKTLEEAGAKVSIA

SEQ ID NO: 29118 - protein, 191 aa, Arabidopsis thaliana; identical to SEQ ID NO: 21067
  peptide (1)..(191): Ceres Seq. ID no. 13646053
  misc_feature (123)..(191): Pfam Name: Ribosomal protein L7/L12 C-terminal domain Pfam Description: Ribosomal protein L7/L12 C-terminal domain
  misc_feature (123)..(191): Pfam Name: Ribosomal protein L7/L12 C-terminal domain Pfam Description: Ribosomal protein L7/L12 C-terminal domain
  misc_feature (1)..(190): Homolog of NCBI NO: 133085 NR Description: 50S RIBOSOMAL PROTEIN L12, CHLOROPLAST PRECURSOR
  misc_feature (1)..(191): Homolog of NCBI NO: 548746 NR Description: 50S RIBOSOMAL PROTEIN L12, CHLOROPLAST PRECURSOR
  misc_feature (1)..(191): Homolog of NCBI NO: 133088 NR Description: 50S RIBOSOMAL PROTEIN L12, CHLOROPLAST PRECURSOR
  misc_feature (1)..(191): Homolog of NCBI NO: 20020 NR Description: ribosomal protein L12-1a [Nicotiana tabacum]
  misc_feature (1)..(190): Homolog of NCBI NO: 541896 NR Description: ribosomal protein L12.B precursor, chloroplast -
  misc_feature (1)..(190): Homolog of NCBI NO: 133085 NR Description: 50S RIBOSOMAL PROTEIN L12, CHLOROPLAST PRECURSOR
  misc_feature (1)..(191): Homolog of NCBI NO: 133088 NR Description: 50S RIBOSOMAL PROTEIN L12, CHLOROPLAST PRECURSOR
  misc_feature (1)..(190): Homolog of NCBI NO: 541896 NR Description: ribosomal protein L12.B precursor, chloroplast -
  misc_feature (1)..(191): Homolog of NCBI NO: 15232274 NR Description: 50S ribosomal protein L12-1, chloroplast
  misc_feature (1)..(191): Homolog of NCBI NO: 541897 NR Description: ribosomal protein L12.C precursor, chloroplast -
  misc_feature (1)..(191): Homolog of NCBI NO: 15232276 NR Description: 50S ribosomal protein L12-3, chloroplast
  misc_feature (1)..(191): Homolog of NCBI NO: 21592776 NR Description: 50S ribosomal protein L12-C [Arabidopsis thaliana]
  misc_feature (1)..(190): Homolog of NCBI NO: 15232275 NR Description: 50S ribosomal protein L12-2, chloroplast
  misc_feature (1)..(191): Homolog of NCBI NO: 20020 NR Description: ribosomal protein L12-1a [Nicotiana tabacum]
  misc_feature (1)..(191): Homolog of NCBI NO: 548746 NR Description: 50S RIBOSOMAL PROTEIN L12, CHLOROPLAST PRECURSOR
  misc_feature (1)..(190): Homolog of NCBI NO: 15232275 NR Description: 50S ribosomal protein L12-2, chloroplast
  misc_feature (1)..(191): Homolog of NCBI NO: 21592776 NR Description: 50S ribosomal protein L12-C [Arabidopsis thaliana]
  misc_feature (1)..(191): Homolog of NCBI NO: 15232276 NR Description: 50S ribosomal protein L12-3, chloroplast
  misc_feature (1)..(191): Homolog of NCBI NO: 541897 NR Description: ribosomal protein L12.C precursor, chloroplast -
  misc_feature (1)..(191): Homolog of NCBI NO: 15232274 NR Description: 50S ribosomal protein L12-1, chloroplast

SEQ ID NO: 29119 - DNA, 1420 bp, Arabidopsis thaliana
  misc_feature (1)..(1420): Ceres Seq. ID no. 12602555
  misc_feature: MA Experiment ID: 108461 Result: Down-regulated in Transcription
  misc_feature: MA Experiment 108461 PARAMETER Experiment Name: At_Germinating_Seeds_cDNA_P Parameter: Age (day) Value: 1 vs. 0
  misc_feature: MA Experiment 108461 PARAMETER Experiment Name: At_Germinating_Seeds_cDNA_P Parameter: Tissue Value: Germinating Seeds
  misc_feature: MA Experiment ID: 108462 Result: Down-regulated in Transcription
  misc_feature: MA Experiment 108462 PARAMETER Experiment Name: At_Germinating_Seeds_cDNA_P Parameter: Age (day) Value: 2 vs. 0
  misc_feature: MA Experiment 108462 PARAMETER Experiment Name: At_Germinating_Seeds_cDNA_P Parameter: Tissue Value: Germinating Seeds
  misc_feature: MA Experiment ID: 108463 Result: Down-regulated in Transcription
  misc_feature: MA Experiment 108463 PARAMETER Experiment Name: At_Germinating_Seeds_cDNA_P Parameter: Age (day) Value: 3 vs. 0
  misc_feature: MA Experiment 108463 PARAMETER Experiment Name: At_Germinating_Seeds_cDNA_P Parameter: Tissue Value: Germinating Seeds
  misc_feature: MA Experiment ID: 108464 Result: Down-regulated in Transcription
  misc_feature: MA Experiment 108464 PARAMETER Experiment Name: At_Germinating_Seeds_cDNA_P Parameter: Age (day) Value: 4 vs. 0
  misc_feature: MA Experiment 108464 PARAMETER Experiment Name: At_Germinating_Seeds_cDNA_P Parameter: Tissue Value: Germinating Seeds
  misc_feature: MA Experiment ID: 20000113 Result: Up-regulated in Transcription
  misc_feature: MA Experiment 20000113 PARAMETER Experiment Name: At_42deg_Heat_cDNA_P Parameter: Temperature (deg C) Value: 42 vs. 22
  misc_feature: MA Experiment 20000113 PARAMETER Experiment Name: At_42deg_Heat_cDNA_P Parameter: Timepoint (hr) Value: 8
  misc_feature: MA Experiment 20000113 PARAMETER Experiment Name: At_42deg_Heat_cDNA_P Parameter: Tissue Value: Aerial
  misc_feature: MA Experiment ID: 20000180 Result: Down-regulated in Transcription
  misc_feature: MA Experiment 20000180 PARAMETER Experiment Name: At_Germinating_Seeds_P Parameter: Age (hr) Value: 24 vs. 0
  misc_feature: MA Experiment 20000180 PARAMETER Experiment Name: At_Germinating_Seeds_P Parameter: Tissue Value: Germinating Seeds
  misc_feature: MA Experiment ID: 20001911 Result: Up-regulated in Transcription
  misc_feature: MA Experiment 20001911 PARAMETER Experiment Name: At_Drought_Reproduction_P Parameter: Age (day) Value: 40
  misc_feature: MA Experiment 20001911 PARAMETER Experiment Name: At_Drought_Reproduction_P Parameter: Organism Value: A. thaliana
  misc_feature: MA Experiment 20001911 PARAMETER Experiment Name: At_Drought_Reproduction_P Parameter: Plant Line Value: WS
  misc_feature: MA Experiment 20001911 PARAMETER Experiment Name: At_Drought_Reproduction_P Parameter: Timepoint (day) Value: 10
  misc_feature: MA Experiment 20001911 PARAMETER Experiment Name: At_Drought_Reproduction_P Parameter: Tissue Value: Flowers
  misc_feature: MA Experiment 20001911 PARAMETER Experiment Name: At_Drought_Reproduction_P Parameter: Treatment Value: Drought vs. No Drought
aaacagacaaaacaaaaacacttcttttgttggttccttgtcggtttccaagggtttttgtttagggttttcattttctttttccttatctatctaatcctctgtttctctccacatcaaaaaaaacctcaaaattaagagacgaattcgagataatgggttcgcttaaggaaggtcaaggaagagacatggaagaaggtgaatcagaagagccgcttttgatggctcagaaccagagattcactatgttccccattaggtacaaatctatttgggagatgtataagaaggctgaagccagtttctggactgctgaagaggttgatctttccactgatgtgcaacagtgggaggccttgacggattcagagaaacactttatcagccatattctggcgtttttcgcagcgtcagatggtattgttttggagaatttggctgctagattcttgaatgatgtccaagttccagaggctcgtgctttctatgggtttcaaatagccatggagaacattcattcagagatgtacagcttacttctggagacattcataaaggactcgaaggagaaggatagattgttcaatgctatcgagaccattccttgtatatccaagaaggcaaaatggtgtttagattggattcaaagtcctatgtcgtttgctgtgaggctggtcgcttttgcatgtgtcgaaggaatcttcttctcaggaagcttctgtgccatcttctggctaaagaagaggggtcttatgccgggtttgaccttctcaaacgagcttatatcgagagacgaggggctccactgtgactttgcgtgtctcttgtacagtttgctgcagaagcagcttccattggagaaagtttatcaaattgttcacgaggcagtggaaattgagacagagtttgtctgcaaggctcttccatgtgatctgatcggaatgaactcaaacctcatgagtcaatacatacaatttgtcgctgaccgtcttctggttaccttgggatgtgaaaggacatacaaagcagaaaatccatttgactggatggagttcatatctctgcaaggaaagacaaacttctttgagaagagagtgggagagtatcagaaggcatcagttatgtcgaacctccaaaatggaaatcagaactacgaattcacgactgaagaggacttttgaatgaatccgccatcgaatctggaagggctcatcaaagtttagattctttatgagtcactctcattctttttagcccaaatccattagtagtagtctagtaagactagtagtagtagcaatggatgttatttgtgttctctatttcaccatcacttgtcccttctccattgtgtaataatattactatcttagttaatcaaatctataaaaaaaaaaaacattaatggaacaaaaacatt

SEQ ID NO: 29120 - protein, 341 aa, Arabidopsis thaliana
  peptide (1)..(341): Ceres Seq. ID no. 12602556
  misc_feature (1)..(341): Homolog of NCBI NO: 7433352 NR Description: ribonucleoside-diphosphate reductase (EC
  misc_feature (1)..(341): Homolog of NCBI NO: 15229476 NR Description: ribonucleoside-diphosphate reductase small chain
  misc_feature (1)..(341): Homolog of NCBI NO: 7433352 NR Description: ribonucleoside-diphosphate reductase (EC
  misc_feature (1)..(341): Homolog of NCBI NO: 15229476 NR Description: ribonucleoside-diphosphate reductase small chain
  misc_feature (1)..(341): Homolog of NCBI NO: 7433352 NR Description: ribonucleoside-diphosphate reductase (EC
  misc_feature (1)..(341): Homolog of NCBI NO: 15229476 NR Description: ribonucleoside-diphosphate reductase small chain
MGSLKEGQGRDMEEGESEEPLLMAQNQRFTMFPIRYKSIWEMYKKAEASFWTAEEVDLSTDVQQWEALTDSEKHFISHILAFFAASDGIVLENLAARFLNDVQVPEARAFYGFQIAMENIHSEMYSLLLETFIKDSKEKDRLFNAIETIPCISKKAKWCLDWIQSPMSFAVRLVAFACVEGIFFSGSFCAIFWLKKRGLMPGLTFSNELISRDEGLHCDFACLLYSLLQKQLPLEKVYQIVHEAVEIETEFVCKALPCDLIGMNSNLMSQYIQFVADRLLVTLGCERTYKAENPFDWMEFISLQGKTNFFEKRVGEYQKASVMSNLQNGNQNYEFTTEEDF

SEQ ID NO: 29121 - protein, 330 aa, Arabidopsis thaliana
  peptide (1)..(330): Ceres Seq. ID no. 12602557
  misc_feature (1)..(330): Homolog of NCBI NO: 7433352 NR Description: ribonucleoside-diphosphate reductase (EC
  misc_feature (1)..(330): Homolog of NCBI NO: 15229476 NR Description: ribonucleoside-diphosphate reductase small chain
  misc_feature (1)..(330): Homolog of NCBI NO: 7433352 NR Description: ribonucleoside-diphosphate reductase (EC
  misc_feature (1)..(330): Homolog of NCBI NO: 15229476 NR Description: ribonucleoside-diphosphate reductase small chain
  misc_feature (1)..(330): Homolog of NCBI NO: 7433352 NR Description: ribonucleoside-diphosphate reductase (EC
  misc_feature (1)..(330): Homolog of NCBI NO: 15229476 NR Description: ribonucleoside-diphosphate reductase small chain
MEEGESEEPLLMAQNQRFTMFPIRYKSIWEMYKKAEASFWTAEEVDLSTDVQQWEALTDSEKHFISHILAFFAASDGIVLENLAARFLNDVQVPEARAFYGFQIAMENIHSEMYSLLLETFIKDSKEKDRLFNAIETIPCISKKAKWCLDWIQSPMSFAVRLVAFACVEGIFFSGSFCAIFWLKKRGLMPGLTFSNELISRDEGLHCDFACLLYSLLQKQLPLEKVYQIVHEAVEIETEFVCKALPCDLIGMNSNLMSQYIQFVADRLLVTLGCERTYKAENPFDWMEFISLQGKTNFFEKRVGEYQKASVMSNLQNGNQNYEFTTEEDF

SEQ ID NO: 29122 - protein, 319 aa, Arabidopsis thaliana
  peptide (1)..(319): Ceres Seq. ID no. 12602558
  misc_feature (1)..(319): Homolog of NCBI NO: 7433352 NR Description: ribonucleoside-diphosphate reductase (EC
  misc_feature (1)..(319): Homolog of NCBI NO: 15229476 NR Description: ribonucleoside-diphosphate reductase small chain
  misc_feature (1)..(319): Homolog of NCBI NO: 7433352 NR Description: ribonucleoside-diphosphate reductase (EC
  misc_feature (1)..(319): Homolog of NCBI NO: 15229476 NR Description: ribonucleoside-diphosphate reductase small chain
  misc_feature (1)..(319): Homolog of NCBI NO: 7433352 NR Description: ribonucleoside-diphosphate reductase (EC
  misc_feature (1)..(319): Homolog of NCBI NO: 15229476 NR Description: ribonucleoside-diphosphate reductase small chain
MAQNQRFTMFPIRYKSIWEMYKKAEASFWTAEEVDLSTDVQQWEALTDSEKHFISHILAFFAASDGIVLENLAARFLNDVQVPEARAFYGFQIAMENIHSEMYSLLLETFIKDSKEKDRLFNAIETIPCISKKAKWCLDWIQSPMSFAVRLVAFACVEGIFFSGSFCAIFWLKKRGLMPGLTFSNELISRDEGLHCDFACLLYSLLQKQLPLEKVYQIVHEAVEIETEFVCKALPCDLIGMNSNLMSQYIQFVADRLLVTLGCERTYKAENPFDWMEFISLQGKTNFFEKRVGEYQKASVMSNLQNGNQNYEFTTEEDF

SEQ ID NO: 29123 - DNA, 748 bp, Arabidopsis thaliana
  misc_feature (1)..(748): Ceres Seq. ID no. 12580430
  misc_feature: MA Experiment ID: 20000184 Result: Down-regulated in Transcription
  misc_feature: MA Experiment 20000184 PARAMETER Experiment Name: At_Shoots__P Parameter: Age (day) Value: 7
  misc_feature: MA Experiment 20000184 PARAMETER Experiment Name: At_Shoots__P Parameter: Tissue Value: Shoots vs. Whole Plant
  misc_feature: MA Experiment ID: 20001248 Result: Up-regulated in Transcription
  misc_feature: MA Experiment 20001248 PARAMETER Experiment Name: At_Far-red-induction_P Parameter: Age (day) Value: 7
  misc_feature: MA Experiment 20001248 PARAMETER Experiment Name: At_Far-red-induction_P Parameter: Light Value: Far-red vs. White
  misc_feature: MA Experiment 20001248 PARAMETER Experiment Name: At_Far-red-induction_P Parameter: Organism Value: A. thaliana
  misc_feature: MA Experiment 20001248 PARAMETER Experiment Name: At_Far-red-induction_P Parameter: Plant Line Value: Columbia
  misc_feature: MA Experiment 20001248 PARAMETER Experiment Name: At_Far-red-induction_P Parameter: Timepoint (hr) Value: 4
  misc_feature: MA Experiment 20001248 PARAMETER Experiment Name: At_Far-red-induction_P Parameter: Tissue Value: Whole Plant
attagtcattactcctcccggcgtctccatcgccgtctctatctaatttcgtcctgcgtcgaccttgtgagctacttcagtttccggccatcacgcagctccagttgtatgttttgtgggttatacaaagatgacaacaatcgaaaccggtcagaaaactcaaaagtcttctccttccggttctgctactaccgctactggtacactcaagcagtcatcagcatcgtttaaaaggtggggagggagacacccgtttgtaagatatggacttccgatgatatctctcactgtatttggagccctaggactcggccaactacttcaaggcagtaaggatattgcaaaggtaaaagatgaccaagaatgggagattatagaaacaagaaaggcactttcgagaacaggacctgtcgatgcctataaacctaaaaacacatccattgaagatgagctcaaggctatgcaagagaaggtggacataaacacgtacgagtacaagaaaattccaaagctaaacgaaagcaagtcgagttaagaagagtctttgtataagattagtctttctagatgtgtttcagttttaaatgactcttcagttcacataatcgcccaagtacaaattccagtaagttctgtctgggcttcctaaaaccaagaacaacgagggacttgccaattgttgataatacatgttgtcgtgttgatttacgacgtccaaatagatctgaaagaggctttataaccagtt

SEQ ID NO: 29124 - protein, 134 aa, Arabidopsis thaliana
  peptide (1)..(134): Ceres Seq. ID no. 12580431
  misc_feature (1)..(67): Homolog of NCBI NO: 26453208 NR Description: putative kinesin [Arabidopsis thaliana]
  misc_feature (1)..(134): Homolog of NCBI NO: 7428718 NR Description: probable kinesin - Arabidopsis thaliana
  misc_feature (1)..(134): Homolog of NCBI NO: 22328612 NR Description: similar to kinesin like protein {Arabidopsis
MTTIETGQKTQKSSPSGSATTATGTLKQSSASFKRWGGRHPFVRYGLPMISLTVFGALGLGQLLQGSKDIAKVKDDQEWEIIETRKALSRTGPVDAYKPKNTSIEDELKAMQEKVDINTYEYKKIPKLNESKSS

SEQ ID NO: 29125 - protein, 86 aa, Arabidopsis thaliana
  peptide (1)..(86): Ceres Seq. ID no. 12580432
  misc_feature (1)..(19): Homolog of NCBI NO: 26453208 NR Description: putative kinesin [Arabidopsis thaliana]
  misc_feature (1)..(86): Homolog of NCBI NO: 7428718 NR Description: probable kinesin - Arabidopsis thaliana
  misc_feature (1)..(86): Homolog of NCBI NO: 22328612 NR Description: similar to kinesin like protein {Arabidopsis
MISLTVFGALGLGQLLQGSKDIAKVKDDQEWEIIETRKALSRTGPVDAYKPKNTSIEDELKAMQEKVDINTYEYKKIPKLNESKSS

SEQ ID NO: 29126 - protein, 76 aa, Arabidopsis thaliana
  peptide (1)..(76): Ceres Seq. ID no. 12580433
ISHYSSRRLHRRLYLISSCVDLVSYFSFRPSRSSSCMFCGLYKDDNNRNRSENSKVFSFRFCYYRYWYTQAVISIV

SEQ ID NO: 29127 - DNA, 1016 bp, Arabidopsis thaliana
  misc_feature (1)..(1016): Ceres Seq. ID no. 12337966
  misc_feature: MA Experiment ID: 20000111 Result: Up-regulated in Transcription
  misc_feature: MA Experiment 20000111 PARAMETER Experiment Name: At_42deg_Heat_cDNA_P Parameter: Temperature (deg C) Value: 42 vs. 22
  misc_feature: MA Experiment 20000111 PARAMETER Experiment Name: At_42deg_Heat_cDNA_P Parameter: Timepoint (hr) Value: 6
  misc_feature: MA Experiment 20000111 PARAMETER Experiment Name: At_42deg_Heat_cDNA_P Parameter: Tissue Value: Aerial
  misc_feature: MA Experiment ID: 20000113 Result: Up-regulated in Transcription
  misc_feature: MA Experiment 20000113 PARAMETER Experiment Name: At_42deg_Heat_cDNA_P Parameter: Temperature (deg C) Value: 42 vs. 22
  misc_feature: MA Experiment 20000113 PARAMETER Experiment Name: At_42deg_Heat_cDNA_P Parameter: Timepoint (hr) Value: 8
  misc_feature: MA Experiment 20000113 PARAMETER Experiment Name: At_42deg_Heat_cDNA_P Parameter: Tissue Value: Aerial
  misc_feature: MA Experiment ID: 20001911 Result: Up-regulated in Transcription
  misc_feature: MA Experiment 20001911 PARAMETER Experiment Name: At_Drought_Reproduction_P Parameter: Age (day) Value: 40
  misc_feature: MA Experiment 20001911 PARAMETER Experiment Name: At_Drought_Reproduction_P Parameter: Organism Value: A. thaliana
  misc_feature: MA Experiment 20001911 PARAMETER Experiment Name: At_Drought_Reproduction_P Parameter: Plant Line Value: WS
  misc_feature: MA Experiment 20001911 PARAMETER Experiment Name: At_Drought_Reproduction_P Parameter: Timepoint (day) Value: 10
  misc_feature: MA Experiment 20001911 PARAMETER Experiment Name: At_Drought_Reproduction_P Parameter: Tissue Value: Flowers
  misc_feature: MA Experiment 20001911 PARAMETER Experiment Name: At_Drought_Reproduction_P Parameter: Treatment Value: Drought vs. No Drought
ggttagagactcgtttggttatcacaactccacgacgagaggaaaaaaaaaaactcagagagacaaatctaaatggcgatgattacgcgcaacaccgccacgcgcctccctctcctcctccaatctcaacgcgccgtcgccgctgcctcggtctctcacctccacacatcccttcccgctctctctccctccacatcaccgacttcctacaccagacctggtcctccttcgacctcccctcctcctcctggtctctctaaagcggccgaatttgtgatctccaaggtcgatgatctcatgaactgggctcgtaccggatcgatctggcctatgacctttggtctcgcttgctgcgccgtcgaaatgatgcataccggtgctgctcgctacgatctcgatcgattcggtatcatcttcaggcctagtcctcgccagtctgattgtatgattgtcgccggtactcttaccaataagatggctccggctcttcgcaaggtttatgaccagatgcctgagccaaggtgggtgatttcaatgggaagttgtgccaatggaggtggatactatcactactcctactcggtggttcgaggatgtgacagaattgtcccagtcgacatatacgtcccggggtgcccaccaaccgctgaggctttgctctatggactactccagcttcagaagaaaatcaacaggcgcaaggatttcttgcattggtggaacaagtgagcttcgaacccgtcctccaatcgtgaaagggacttttttcagacatttttaccaaagtttggggataataaatcgtggacgtttcattgcatatttctttgtggtggagatgccatgtaaaggagtgtgtttctaagtttgttgtggaaacttaataaacttaagatgtttgttgtctgagttcttttatgggctcttttattatatatctctctctaccagttttcagctacatgctgactattgctaaatacctacatatatttatacatacgagtgtgttttgt

SEQ ID NO: 29128 - protein, 218 aa, Arabidopsis thaliana
  peptide (1)..(218): Ceres Seq. ID no. 12337967
  misc_feature (96)..(203): Pfam Name: NADH ubiquinone oxidoreductase, 20 Kd subunit Pfam Description: NADH ubiquinone oxidoreductase, 20 Kd subunit
  misc_feature (20)..(218): Homolog of NCBI NO: 34862315 NR Description: similar to NADH dehydrogenase (ubiquinone) Fe-S
  misc_feature (58)..(218): Homolog of NCBI NO: 34328788 NR Description: NADH:ubiquinone oxidoreductase subunit 10;
  misc_feature (9)..(218): Homolog of NCBI NO: 1171865 NR Description: NADH-ubiquinone oxidoreductase 20 kDa subunit,
  misc_feature (33)..(218): Homolog of NCBI NO: 34910678 NR Description: putative NADH dehydrogenase (ubiquinone) chain
  misc_feature (1)..(218): Homolog of NCBI NO: 2499328 NR Description: NADH-ubiquinone oxidoreductase 20 kDa subunit,
  misc_feature (30)..(218): Homolog of NCBI NO: 9652190 NR Description: NADH-ubiquinone oxidoreductase subunit PSST
  misc_feature (1)..(218): Homolog of NCBI NO: 9652180 NR Description: NADH-ubiquinone oxidoreductase subunit PSST
  misc_feature (1)..(218): Homolog of NCBI NO: 11277624 NR Description: NADH2 dehydrogenase (ubiquinone) (EC 1.6.5.3)
  misc_feature (1)..(218): Homolog of NCBI NO: 1171866 NR Description: NADH-ubiquinone oxidoreductase 20 kDa subunit,
  misc_feature (1)..(218): Homolog of NCBI NO: 15239782 NR Description: NADH dehydrogenase (ubiquinone)
MAMITRNTATRLPLLLQSQRAVAAASVSHLHTSLPALSPSTSPTSYTRPGPPSTSPPPPGLSKAAEFVISKVDDLMNWARTGSIWPMTFGLACCAVEMMHTGAARYDLDRFGIIFRPSPRQSDCMIVAGTLTNKMAPALRKVYDQMPEPRWVISMGSCANGGGYYHYSYSVVRGCDRIVPVDIYVPGCPPTAEALLYGLLQLQKKINRRKDFLHWWNK

SEQ ID NO: 29129 - protein, 216 aa, Arabidopsis thaliana
  peptide (1)..(216): Ceres Seq. ID no. 12337968
  misc_feature (94)..(201): Pfam Name: NADH ubiquinone oxidoreductase, 20 Kd subunit Pfam Description: NADH ubiquinone oxidoreductase, 20 Kd subunit
  misc_feature (18)..(216): Homolog of NCBI NO: 34862315 NR Description: similar to NADH dehydrogenase (ubiquinone) Fe-S
  misc_feature (56)..(216): Homolog of NCBI NO: 34328788 NR Description: NADH:ubiquinone oxidoreductase subunit 10;
  misc_feature (7)..(216): Homolog of NCBI NO: 1171865 NR Description: NADH-ubiquinone oxidoreductase 20 kDa subunit,
  misc_feature (31)..(216): Homolog of NCBI NO: 34910678 NR Description: putative NADH dehydrogenase (ubiquinone) chain
  misc_feature (1)..(216): Homolog of NCBI NO: 2499328 NR Description: NADH-ubiquinone oxidoreductase 20 kDa subunit,
  misc_feature (28)..(216): Homolog of NCBI NO: 9652190 NR Description: NADH-ubiquinone oxidoreductase subunit PSST
  misc_feature (1)..(216): Homolog of NCBI NO: 9652180 NR Description: NADH-ubiquinone oxidoreductase subunit PSST
  misc_feature (1)..(216): Homolog of NCBI NO: 11277624 NR Description: NADH2 dehydrogenase (ubiquinone) (EC 1.6.5.3)
  misc_feature (1)..(216): Homolog of NCBI NO: 1171866 NR Description: NADH-ubiquinone oxidoreductase 20 kDa subunit,
  misc_feature (1)..(216): Homolog of NCBI NO: 15239782 NR Description: NADH dehydrogenase (ubiquinone)
MITRNTATRLPLLLQSQRAVAAASVSHLHTSLPALSPSTSPTSYTRPGPPSTSPPPPGLSKAAEFVISKVDDLMNWARTGSIWPMTFGLACCAVEMMHTGAARYDLDRFGIIFRPSPRQSDCMIVAGTLTNKMAPALRKVYDQMPEPRWVISMGSCANGGGYYHYSYSVVRGCDRIVPVDIYVPGCPPTAEALLYGLLQLQKKINRRKDFLHWWNK

SEQ ID NO: 29130 - protein, 143 aa, Arabidopsis thaliana
  peptide (1)..(143): Ceres Seq. ID no. 12337969
  misc_feature (21)..(128): Pfam Name: NADH ubiquinone oxidoreductase, 20 Kd subunit Pfam Description: NADH ubiquinone oxidoreductase, 20 Kd subunit
  misc_feature (1)..(143): Homolog of NCBI NO: 34862315 NR Description: similar to NADH dehydrogenase (ubiquinone) Fe-S
  misc_feature (1)..(143): Homolog of NCBI NO: 34328788 NR Description: NADH:ubiquinone oxidoreductase subunit 10;
  misc_feature (1)..(143): Homolog of NCBI NO: 1171865 NR Description: NADH-ubiquinone oxidoreductase 20 kDa subunit,
  misc_feature (1)..(143): Homolog of NCBI NO: 34910678 NR Description: putative NADH dehydrogenase (ubiquinone) chain
  misc_feature (1)..(143): Homolog of NCBI NO: 2499328 NR Description: NADH-ubiquinone oxidoreductase 20 kDa subunit,
  misc_feature (1)..(143): Homolog of NCBI NO: 9652190 NR Description: NADH-ubiquinone oxidoreductase subunit PSST
  misc_feature (1)..(143): Homolog of NCBI NO: 9652180 NR Description: NADH-ubiquinone oxidoreductase subunit PSST
  misc_feature (1)..(143): Homolog of NCBI NO: 11277624 NR Description: NADH2 dehydrogenase (ubiquinone) (EC 1.6.5.3)
  misc_feature (1)..(143): Homolog of NCBI NO: 1171866 NR Description: NADH-ubiquinone oxidoreductase 20 kDa subunit,
  misc_feature (1)..(143): Homolog of NCBI NO: 15239782 NR Description: NADH dehydrogenase (ubiquinone)
MNWARTGSIWPMTFGLACCAVEMMHTGAARYDLDRFGIIFRPSPRQSDCMIVAGTLTNKMAPALRKVYDQMPEPRWVISMGSCANGGGYYHYSYSVVRGCDRIVPVDIYVPGCPPTAEALLYGLLQLQKKINRRKDFLHWWNK

SEQ ID NO: 29131 - DNA, 1273 bp, Arabidopsis thaliana
  misc_feature (1)..(1273): Ceres Seq. ID no. 12334392
  misc_feature: MA Experiment ID: 108577 Result: Down-regulated in Transcription
  misc_feature: MA Experiment 108577 PARAMETER Experiment Name: At_42deg_Heat_cDNA_P Parameter: Temperature (deg C) Value: 42 vs. 22
  misc_feature: MA Experiment 108577 PARAMETER Experiment Name: At_42deg_Heat_cDNA_P Parameter: Timepoint (hr) Value: 6
  misc_feature: MA Experiment 108577 PARAMETER Experiment Name: At_42deg_Heat_cDNA_P Parameter: Tissue Value: Aerial
  misc_feature: MA Experiment ID: 20000069 Result: Up-regulated in Transcription
  misc_feature: MA Experiment 20000069 PARAMETER Experiment Name: At_100uM_ABA_Mutants_cDNA_P Parameter: Plant Line Value: CS23
  misc_feature: MA Experiment 20000069 PARAMETER Experiment Name: At_100uM_ABA_Mutants_cDNA_P Parameter: Timepoint (hr) Value: 6
  misc_feature: MA Experiment 20000069 PARAMETER Experiment Name: At_100uM_ABA_Mutants_cDNA_P Parameter: Tissue Value: Aerial
  misc_feature: MA Experiment 20000069 PARAMETER Experiment Name: At_100uM_ABA_Mutants_cDNA_P Parameter: Treatment Value: 100uM ABA vs. No Treatment
  misc_feature: MA Experiment ID: 20000070 Result: Up-regulated in Transcription
  misc_feature: MA Experiment 20000070 PARAMETER Experiment Name: At_100uM_ABA_Mutants_cDNA_P Parameter: Plant Line Value: CS24
  misc_feature: MA Experiment 20000070 PARAMETER Experiment Name: At_100uM_ABA_Mutants_cDNA_P Parameter: Timepoint (hr) Value: 6
  misc_feature: MA Experiment 20000070 PARAMETER Experiment Name: At_100uM_ABA_Mutants_cDNA_P Parameter: Tissue Value: Aerial
  misc_feature: MA Experiment 20000070 PARAMETER Experiment Name: At_100uM_ABA_Mutants_cDNA_P Parameter: Treatment Value: 100uM ABA vs. No Treatment
  misc_feature: MA Experiment ID: 20000071 Result: Up-regulated in Transcription
  misc_feature: MA Experiment 20000071 PARAMETER Experiment Name: At_100uM_ABA_Mutants_cDNA_P Parameter: Plant Line Value: CS8104
  misc_feature: MA Experiment 20000071 PARAMETER Experiment Name: At_100uM_ABA_Mutants_cDNA_P Parameter: Timepoint (hr) Value: 6
  misc_feature: MA Experiment 20000071 PARAMETER Experiment Name: At_100uM_ABA_Mutants_cDNA_P Parameter: Tissue Value: Aerial
  misc_feature: MA Experiment 20000071 PARAMETER Experiment Name: At_100uM_ABA_Mutants_cDNA_P Parameter: Treatment Value: 100uM ABA vs. No Treatment
  misc_feature: MA Experiment ID: 20000072 Result: Up-regulated in Transcription
  misc_feature: MA Experiment 20000072 PARAMETER Experiment Name: At_100uM_ABA_Mutants_cDNA_P Parameter: Plant Line Value: CS8105
  misc_feature: MA Experiment 20000072 PARAMETER Experiment Name: At_100uM_ABA_Mutants_cDNA_P Parameter: Timepoint (hr) Value: 6
  misc_feature: MA Experiment 20000072 PARAMETER Experiment Name: At_100uM_ABA_Mutants_cDNA_P Parameter: Tissue Value: Aerial
  misc_feature: MA Experiment 20000072 PARAMETER Experiment Name: At_100uM_ABA_Mutants_cDNA_P Parameter: Treatment Value: 100uM ABA vs. No Treatment
  misc_feature: MA Experiment ID: 20000088 Result: Up-regulated in Transcription
  misc_feature: MA Experiment 20000088 PARAMETER Experiment Name: At_100uM_ABA_Mutants_cDNA_P Parameter: Plant Line Value: Landsberg
  misc_feature: MA Experiment 20000088 PARAMETER Experiment Name: At_100uM_ABA_Mutants_cDNA_P Parameter: Timepoint (hr) Value: 6
  misc_feature: MA Experiment 20000088 PARAMETER Experiment Name: At_100uM_ABA_Mutants_cDNA_P Parameter: Tissue Value: Aerial
  misc_feature: MA Experiment 20000088 PARAMETER Experiment Name: At_100uM_ABA_Mutants_cDNA_P Parameter: Treatment Value: 100uM ABA vs. No Treatment
  misc_feature: MA Experiment ID: 20000089 Result: Up-regulated in Transcription
  misc_feature: MA Experiment ID: 20000090 Result: Up-regulated in Transcription
  misc_feature: MA Experiment ID: 20000224 Result: Down-regulated in Transcription
agtttgggattttttcgaaaacgcttttcaatcttcgtctatctgtctccacgatccacgccttgaccttcgttttttttttctcagagattagagaaaactccgataaccaatttctcaatctttttgtagatccaatttttccaggaaaaaaagaggtttcgcgaagaagatgagttttcaagatttagaatcaggaagaggaagatcaacgaggaaattcaatggtggtcgacaagattcgacacaagccgttgcttctggaatattccagatcaataccggagtctccacgtttcagcgactcgttaacacacttggtactcccaaagatacaccggagctccgggagaagctgcacaagacaaggttgcatattggacagcttgtgaaggatacttcagctaaacttaaagaagctagtgaaactgatcatcaaagcggtgtcaatccaagtaagaagattgcagatgctaagcttgcaagggactttcaagctgttttaaaagagtttcagaaagctcaacaaactgctgctgaaagagaaaccacttatactcctttcgtgcctcaatctgctcttccctctagctatacggcgggtgaggtggataaggtaccggaacagcgggcacaacttcaggagtcgaaaagacaagaacttgtattgttagacaacgagattgcattcaacgaggctgtgattgaagaaagagagcaaggaatacaagaaatccatcagcaaattggtgaggttaacgagatattcaaagatcttgcggttctggttaacgatcaaggagtcatgatagatgatattggtactcacattgacaactcccgtgctgcaacttcacaaggaaaatctcagcttgtgcaagccgcgaaaacacaaaaatcaaactcctctctgacatgcttgctcttggtgatatttggcattgttctcctgatcgtgattatagtactcgcagcttgatttcgaacagcaagaacatttcgtttgtgtgtgttcattgatcttaaggcatcaatgactggaactacttggtatatattatatgttgaagagaacacttagaagttggttttgtgtttgtttgggttggttcagttcggtttgaggttctattggttaatgtaatagtgtgtgcgtgtgtggcttttttgttgtgcaaacattttgttggagatgacagaaactctgttttgtttgtgattctcctatgttctcctaaatctttgttgagaggaaacaaaaactatttgctcg

SEQ ID NO: 29132 - protein, 268 aa, Arabidopsis thaliana
  peptide (1)..(268): Ceres Seq. ID no. 12334393
  misc_feature (180)..(242): Pfam Name: SNARE domain Pfam Description: SNARE domain
  misc_feature (1)..(268): Homolog of NCBI NO: 18422725 NR Description: syntaxin SYP22 (VAM3)
MSFQDLESGRGRSTRKFNGGRQDSTQAVASGIFQINTGVSTFQRLVNTLGTPKDTPELREKLHKTRLHIGQLVKDTSAKLKEASETDHQSGVNPSKKIADAKLARDFQAVLKEFQKAQQTAAERETTYTPFVPQSALPSSYTAGEVDKVPEQRAQLQESKRQELVLLDNEIAFNEAVIEEREQGIQEIHQQIGEVNEIFKDLAVLVNDQGVMIDDIGTHIDNSRAATSQGKSQLVQAAKTQKSNSSLTCLLLVIFGIVLLIVIIVLAA

SEQ ID NO: 29133 - DNA, 1381 bp, Arabidopsis thaliana
  misc_feature (1)..(1381): Ceres Seq. ID no. 12333866
  misc_feature: Phenotype: INFLORESCENCE Internode Length-Short Internode
  misc_feature: Phenotype: INFLORESCENCE Other
  misc_feature: Phenotype: SILIQUES Other
  misc_feature: Phenotype: ROSETTE LEAVES Curled-Curled 5
  misc_feature: Phenotype: ROSETTE LEAVES Disorganized Rosette-Disorganized Rosette
  misc_feature: Phenotype: ROSETTE LEAVES Shape-Lanceolate
  misc_feature: Phenotype: ROSETTE LEAVES Other
  misc_feature: Phenotype: WHOLE PLANT Size-Small
  misc_feature: Phenotype: CAULINE LEAVES Curled-Curled 5
  misc_feature: Phenotype: CAULINE LEAVES Shape-Lanceolate
  misc_feature: Phenotype: CAULINE LEAVES Other
  misc_feature: Phenotype: FLOWERS Other
  misc_feature: Phenotype: INFLORESCENCE Height-Short
  misc_feature: Phenotype: INFLORESCENCE Internode Length-Short Internode
  misc_feature: Phenotype: INFLORESCENCE Other
  misc_feature: Phenotype: SILIQUES Other
  misc_feature: Phenotype: ROSETTE LEAVES Curled-Curled 5
  misc_feature: Phenotype: ROSETTE LEAVES Disorganized Rosette-Disorganized Rosette
  misc_feature: Phenotype: ROSETTE LEAVES Shape-Lanceolate
  misc_feature: Phenotype: ROSETTE LEAVES Other
  misc_feature: Phenotype: WHOLE PLANT Size-Small
  misc_feature: Phenotype: CAULINE LEAVES Curled-Curled 5
  misc_feature: Phenotype: CAULINE LEAVES Shape-Lanceolate
  misc_feature: Phenotype: CAULINE LEAVES Other
  misc_feature: Phenotype: FLOWERS Other
  misc_feature: Phenotype: INFLORESCENCE Height-Short
  misc_feature: Phenotype: INFLORESCENCE Internode Length-Short Internode
  misc_feature: Phenotype: INFLORESCENCE Other
  misc_feature: Phenotype: SILIQUES Other
  misc_feature: Phenotype: ROSETTE LEAVES Curled-Curled 5
  misc_feature: Phenotype: ROSETTE LEAVES Disorganized Rosette-Disorganized Rosette
  misc_feature: Phenotype: ROSETTE LEAVES Shape-Lanceolate
  misc_feature: Phenotype: ROSETTE LEAVES Other
  misc_feature: Phenotype: WHOLE PLANT Size-Small
  misc_feature: Phenotype: CAULINE LEAVES Curled-Curled 5
  misc_feature: Phenotype: CAULINE LEAVES Shape-Lanceolate
  misc_feature: Phenotype: CAULINE LEAVES Other
  misc_feature: Phenotype: FLOWERS Other
  misc_feature: Phenotype: INFLORESCENCE Height-Short
  misc_feature: Phenotype: INFLORESCENCE Internode Length-Short Internode
  misc_feature: Phenotype: INFLORESCENCE Other
  misc_feature: Phenotype: SILIQUES Other
  misc_feature: Phenotype: ROSETTE LEAVES Curled-Curled 5
  misc_feature: Phenotype: ROSETTE LEAVES Disorganized Rosette-Disorganized Rosette
  misc_feature: Phenotype: ROSETTE LEAVES Shape-Lanceolate
  misc_feature: Phenotype: ROSETTE LEAVES Other
  misc_feature: Phenotype: WHOLE PLANT Size-Small
  misc_feature: Phenotype: WHOLE PLANT Other
  misc_feature: Phenotype: CAULINE LEAVES Curled-Curled 5
  misc_feature: Phenotype: CAULINE LEAVES Shape-Lanceolate
  misc_feature: Phenotype: CAULINE LEAVES Other
  misc_feature: Phenotype: FLOWERS Other
  misc_feature: Phenotype: INFLORESCENCE Height-Short
  misc_feature: Phenotype: INFLORESCENCE Internode Length-Short Internode
  misc_feature: Phenotype: INFLORESCENCE Other
  misc_feature: Phenotype: SILIQUES Other
  misc_feature: Phenotype: ROSETTE LEAVES Curled-Curled 5
  misc_feature: Phenotype: ROSETTE LEAVES Disorganized Rosette-Disorganized Rosette
  misc_feature: Phenotype: ROSETTE LEAVES Shape-Lanceolate
  misc_feature: Phenotype: ROSETTE LEAVES Other
  misc_feature: Phenotype: WHOLE PLANT Size-Small
  misc_feature: Phenotype: WHOLE PLANT Other
  misc_feature: Phenotype: CAULINE LEAVES Curled-Curled 5
  misc_feature: Phenotype: CAULINE LEAVES Shape-Lanceolate
  misc_feature: Phenotype: CAULINE LEAVES Other
  misc_feature: Phenotype: FLOWERS Other
  misc_feature: Phenotype: INFLORESCENCE Height-Short
  misc_feature: Phenotype: INFLORESCENCE Internode Length-Short Internode
  misc_feature: Phenotype: INFLORESCENCE Other
  misc_feature: Phenotype: SILIQUES Other
  misc_feature: Phenotype: ROSETTE LEAVES Curled-Curled 5
  misc_feature: Phenotype: ROSETTE LEAVES Disorganized Rosette-Disorganized Rosette
  misc_feature: Phenotype: ROSETTE LEAVES Shape-Lanceolate
  misc_feature: Phenotype: ROSETTE LEAVES Other
  misc_feature: Phenotype: WHOLE PLANT Size-Small
  misc_feature: Phenotype: WHOLE PLANT Other
  misc_feature: Phenotype: CAULINE LEAVES Curled-Curled 5
  misc_feature: Phenotype: CAULINE LEAVES Shape-Lanceolate
  misc_feature: Phenotype: CAULINE LEAVES Other
  misc_feature: Phenotype: FLOWERS Other
  misc_feature: Phenotype: INFLORESCENCE Height-Short
  misc_feature: Phenotype: INFLORESCENCE Internode Length-Short Internode
  misc_feature: Phenotype: INFLORESCENCE Other
  misc_feature: Phenotype: SILIQUES Other
  misc_feature: Phenotype: ROSETTE LEAVES Curled-Curled 5
  misc_feature: Phenotype: ROSETTE LEAVES Disorganized Rosette-Disorganized Rosette
  misc_feature: Phenotype: ROSETTE LEAVES Shape-Lanceolate
  misc_feature: Phenotype: ROSETTE LEAVES Other
  misc_feature: Phenotype: WHOLE PLANT Size-Small
  misc_feature: Phenotype: WHOLE PLANT Other
  misc_feature: Phenotype: CAULINE LEAVES Curled-Curled 5
  misc_feature: Phenotype: CAULINE LEAVES Shape-Lanceolate
  misc_feature: Phenotype: CAULINE LEAVES Other
  misc_feature: Phenotype: FLOWERS Other
  misc_feature: Phenotype: INFLORESCENCE Height-Short
  misc_feature: Phenotype: INFLORESCENCE Internode Length-Short Internode
  misc_feature: Phenotype: INFLORESCENCE Other
  misc_feature: Phenotype: SILIQUES Other
  misc_feature: Phenotype: ROSETTE LEAVES Curled-Curled 5
  misc_feature: Phenotype: ROSETTE LEAVES Disorganized Rosette-Disorganized Rosette
  misc_feature: Phenotype: ROSETTE LEAVES Shape-Lanceolate
  misc_feature: Phenotype: ROSETTE LEAVES Other
  misc_feature: Phenotype: WHOLE PLANT Size-Small
  misc_feature: Phenotype: WHOLE PLANT Other
  misc_feature: Phenotype: CAULINE LEAVES Curled-Curled 5
  misc_feature: Phenotype: CAULINE LEAVES Shape-Lanceolate
  misc_feature: Phenotype: CAULINE LEAVES Other
  misc_feature: Phenotype: FLOWERS Other
  misc_feature: Phenotype: INFLORESCENCE Height-Short
  misc_feature: Phenotype: INFLORESCENCE Internode Length-Short Internode
  misc_feature: Phenotype: INFLORESCENCE Other
  misc_feature: Phenotype: SILIQUES Other
  misc_feature: Phenotype: ROSETTE LEAVES Curled-Curled 5
  misc_feature: Phenotype: ROSETTE LEAVES Disorganized Rosette-Disorganized Rosette
  misc_feature: Phenotype: ROSETTE LEAVES Shape-Lanceolate
  misc_feature: Phenotype: ROSETTE LEAVES Other
  misc_feature: Phenotype: WHOLE PLANT Size-Small
  misc_feature: Phenotype: WHOLE PLANT Other
  misc_feature: Phenotype: CAULINE LEAVES Curled-Curled 5
  misc_feature: Phenotype: CAULINE LEAVES Shape-Lanceolate
  misc_feature: Phenotype: CAULINE LEAVES Other
  misc_feature: Phenotype: FLOWERS Other
  misc_feature: Phenotype: INFLORESCENCE Height-Short
  misc_feature: Phenotype: INFLORESCENCE Internode Length-Short Internode
  misc_feature: Phenotype: INFLORESCENCE Other
  misc_feature: Phenotype: SILIQUES Other
  misc_feature: Phenotype: ROSETTE LEAVES Curled-Curled 5
  misc_feature: Phenotype: ROSETTE LEAVES Disorganized Rosette-Disorganized Rosette
  misc_feature: Phenotype: ROSETTE LEAVES Shape-Lanceolate
  misc_feature: Phenotype: ROSETTE LEAVES Other
  misc_feature: Phenotype: WHOLE PLANT Size-Small
  misc_feature: Phenotype: WHOLE PLANT Other
  misc_feature: Phenotype: CAULINE LEAVES Curled-Curled 5
  misc_feature: Phenotype: CAULINE LEAVES Shape-Lanceolate
  misc_feature: Phenotype: CAULINE LEAVES Other
  misc_feature: Phenotype: FLOWERS Other
  misc_feature: Phenotype: INFLORESCENCE Height-Short
  misc_feature: Phenotype: INFLORESCENCE Internode Length-Short Internode
  misc_feature: Phenotype: INFLORESCENCE Other
  misc_feature: Phenotype: SILIQUES Other
  misc_feature: Phenotype: ROSETTE LEAVES Curled-Curled 5
  misc_feature: Phenotype: ROSETTE LEAVES Disorganized Rosette-Disorganized Rosette
  misc_feature: Phenotype: ROSETTE LEAVES Shape-Lanceolate
  misc_feature: Phenotype: ROSETTE LEAVES Other
  misc_feature: Phenotype: WHOLE PLANT Size-Small
  misc_feature: Phenotype: WHOLE PLANT Other
  misc_feature: Phenotype: CAULINE LEAVES Curled-Curled 5
  misc_feature: Phenotype: CAULINE LEAVES Shape-Lanceolate
  misc_feature: Phenotype: CAULINE LEAVES Other
  misc_feature: Phenotype: FLOWERS Other
  misc_feature: Phenotype: INFLORESCENCE Height-Short
  misc_feature: Phenotype: INFLORESCENCE Internode Length-Short Internode
  misc_feature: Phenotype: INFLORESCENCE Other
  misc_feature: Phenotype: SILIQUES Other
  misc_feature: Phenotype: ROSETTE LEAVES Curled-Curled 5
  misc_feature: Phenotype: ROSETTE LEAVES Disorganized Rosette-Disorganized Rosette
  misc_feature: Phenotype: ROSETTE LEAVES Shape-Lanceolate
  misc_feature: Phenotype: ROSETTE LEAVES Other
  misc_feature: Phenotype: WHOLE PLANT Size-Small
  misc_feature: Phenotype: WHOLE PLANT Other
  misc_feature: Phenotype: CAULINE LEAVES Curled-Curled 5
  misc_feature: Phenotype: CAULINE LEAVES Shape-Lanceolate
  misc_feature: Phenotype: CAULINE LEAVES Other
  misc_feature: Phenotype: FLOWERS Other
  misc_feature: Phenotype: INFLORESCENCE Height-Short
  misc_feature: Phenotype: INFLORESCENCE Internode Length-Short Internode
  misc_feature: Phenotype: INFLORESCENCE Other
  misc_feature: Phenotype: SILIQUES Other
  misc_feature: Phenotype: ROSETTE LEAVES Curled-Curled 5
  misc_feature: Phenotype: ROSETTE LEAVES Disorganized Rosette-Disorganized Rosette
  misc_feature: Phenotype: ROSETTE LEAVES Shape-Lanceolate
  misc_feature: Phenotype: ROSETTE LEAVES Other
  misc_feature: Phenotype: WHOLE PLANT Size-Small
  misc_feature: Phenotype: WHOLE PLANT Other
  misc_feature: Phenotype: CAULINE LEAVES Curled-Curled 5
  misc_feature: Phenotype: CAULINE LEAVES Shape-Lanceolate
  misc_feature: Phenotype: CAULINE LEAVES Other
  misc_feature: Phenotype: FLOWERS Other
  misc_feature: Phenotype: INFLORESCENCE Height-Short
  misc_feature: Phenotype: INFLORESCENCE Internode Length-Short Internode
  misc_feature: Phenotype: INFLORESCENCE Other
  misc_feature: Phenotype: SILIQUES Other
  misc_feature: Phenotype: ROSETTE LEAVES Disorganized Rosette-Disorganized Rosette
  misc_feature: Phenotype: ROSETTE LEAVES Other
  misc_feature: Phenotype: FLOWERS Other
  misc_feature: Phenotype: INFLORESCENCE Branching-Reduced Apical Dominance
  misc_feature: Phenotype: INFLORESCENCE Height-Short
  misc_feature: Phenotype: FERTILITY Fertility-Reduced
  misc_feature: Phenotype: ROSETTE LEAVES Disorganized Rosette-Disorganized Rosette
  misc_feature: Phenotype: ROSETTE LEAVES Other
  misc_feature: Phenotype: FLOWERS Other
  misc_feature: Phenotype: INFLORESCENCE Branching-Reduced Apical Dominance
  misc_feature: Phenotype: INFLORESCENCE Height-Short
  misc_feature: Phenotype: ROSETTE LEAVES Curled-Curled 4
  misc_feature: Phenotype: ROSETTE LEAVES Other
  misc_feature: Phenotype: WHOLE PLANT Size-Small
  misc_feature: Phenotype: ROSETTE LEAVES Curled-Curled 4
  misc_feature: Phenotype: ROSETTE LEAVES Other
  misc_feature: Phenotype: WHOLE PLANT Size-Small
  misc_feature: Phenotype: ROSETTE LEAVES Curled-Curled 4
  misc_feature: Phenotype: ROSETTE LEAVES Other
  misc_feature: Phenotype: WHOLE PLANT Size-Small
  misc_feature: Phenotype: ROSETTE LEAVES Curled-Curled 4
  misc_feature: Phenotype: ROSETTE LEAVES Other
  misc_feature: Phenotype: WHOLE PLANT Size-Small
  misc_feature: Phenotype: ROSETTE LEAVES Curled-Curled 5
  misc_feature: Phenotype: ROSETTE LEAVES Disorganized Rosette-Disorganized Rosette
  misc_feature: Phenotype: ROSETTE LEAVES Shape-Lanceolate
  misc_feature: Phenotype: ROSETTE LEAVES Other
  misc_feature: Phenotype: WHOLE PLANT Size-Small
  misc_feature: Phenotype: CAULINE LEAVES Curled-Curled 5
  misc_feature: Phenotype: CAULINE LEAVES Shape-Lanceolate
  misc_feature: Phenotype: CAULINE LEAVES Other
  misc_feature: Phenotype: FLOWERS Other
  misc_feature: Phenotype: INFLORESCENCE Height-Short
  misc_feature: Phenotype: INFLORESCENCE Internode Length-Short Internode
  misc_feature: Phenotype: INFLORESCENCE Other
  misc_feature: Phenotype: SILIQUES Other
  misc_feature: Phenotype: ROSETTE LEAVES Curled-Curled 5
  misc_feature: Phenotype: ROSETTE LEAVES Disorganized Rosette-Disorganized Rosette
  misc_feature: Phenotype: ROSETTE LEAVES Shape-Lanceolate
  misc_feature: Phenotype: ROSETTE LEAVES Other
  misc_feature: Phenotype: WHOLE PLANT Size-Small
  misc_feature: Phenotype: CAULINE LEAVES Curled-Curled 5
  misc_feature: Phenotype: CAULINE LEAVES Shape-Lanceolate
  misc_feature: Phenotype: CAULINE LEAVES Other
  misc_feature: Phenotype: FLOWERS Other
  misc_feature: Phenotype: INFLORESCENCE Height-Short
  misc_feature: Phenotype: INFLORESCENCE Internode Length-Short Internode
  misc_feature: Phenotype: INFLORESCENCE Other
  misc_feature: Phenotype: SILIQUES Other
  misc_feature: Phenotype: ROSETTE LEAVES Curled-Curled 5
  misc_feature: Phenotype: ROSETTE LEAVES Disorganized Rosette-Disorganized Rosette
  misc_feature: Phenotype: ROSETTE LEAVES Shape-Lanceolate
  misc_feature: Phenotype: ROSETTE LEAVES Other
  misc_feature: Phenotype: WHOLE PLANT Size-Small
  misc_feature: Phenotype: CAULINE LEAVES Curled-Curled 5
  misc_feature: Phenotype: CAULINE LEAVES Shape-Lanceolate
  misc_feature: Phenotype: CAULINE LEAVES Other
  misc_feature: Phenotype: FLOWERS Other
  misc_feature: Phenotype: INFLORESCENCE Height-Short
  misc_feature: Phenotype: INFLORESCENCE Internode Length-Short Internode
  misc_feature: Phenotype: INFLORESCENCE Other
  misc_feature: Phenotype: SILIQUES Other
  misc_feature: Phenotype: ROSETTE LEAVES Curled-Curled 5
  misc_feature: Phenotype: ROSETTE LEAVES Disorganized Rosette-Disorganized Rosette
  misc_feature: Phenotype: ROSETTE LEAVES Shape-Lanceolate
  misc_feature: Phenotype: ROSETTE LEAVES Other
  misc_feature: Phenotype: WHOLE PLANT Size-Small
  misc_feature: Phenotype: CAULINE LEAVES Curled-Curled 5
  misc_feature: Phenotype: CAULINE LEAVES Shape-Lanceolate
  misc_feature: Phenotype: CAULINE LEAVES Other
  misc_feature: Phenotype: FLOWERS Other
  misc_feature: Phenotype: INFLORESCENCE Height-Short
  misc_feature: Phenotype: INFLORESCENCE Internode Length-Short Internode
  misc_feature: Phenotype: INFLORESCENCE Other
  misc_feature: Phenotype: SILIQUES Other
  misc_feature: Phenotype: ROSETTE LEAVES Curled-Curled 5
  misc_feature: Phenotype: ROSETTE LEAVES Disorganized Rosette-Disorganized Rosette
  misc_feature: Phenotype: ROSETTE LEAVES Shape-Lanceolate
  misc_feature: Phenotype: ROSETTE LEAVES Other
  misc_feature: Phenotype: WHOLE PLANT Size-Small
  misc_feature: Phenotype: CAULINE LEAVES Curled-Curled 5
  misc_feature: Phenotype: CAULINE LEAVES Shape-Lanceolate
  misc_feature: Phenotype: CAULINE LEAVES Other
  misc_feature: Phenotype: FLOWERS Other
  misc_feature: Phenotype: INFLORESCENCE Height-Short
  misc_feature: Phenotype: INFLORESCENCE Internode Length-Short Internode
  misc_feature: Phenotype: INFLORESCENCE Other
  misc_feature: Phenotype: SILIQUES Other
  misc_feature: Phenotype: ROSETTE LEAVES Curled-Curled 5
  misc_feature: Phenotype: ROSETTE LEAVES Disorganized Rosette-Disorganized Rosette
  misc_feature: Phenotype: ROSETTE LEAVES Shape-Lanceolate
  misc_feature: Phenotype: ROSETTE LEAVES Other
  misc_feature: Phenotype: WHOLE PLANT Size-Small
  misc_feature: Phenotype: CAULINE LEAVES Curled-Curled 5
  misc_feature: Phenotype: CAULINE LEAVES Shape-Lanceolate
  misc_feature: Phenotype: CAULINE LEAVES Other
  misc_feature: Phenotype: FLOWERS Other
  misc_feature: Phenotype: INFLORESCENCE Height-Short
  misc_feature: Phenotype: INFLORESCENCE Internode Length-Short Internode
  misc_feature: Phenotype: INFLORESCENCE Other
  misc_feature: Phenotype: SILIQUES Other
  misc_feature: Phenotype: ROSETTE LEAVES Curled-Curled 5
  misc_feature: Phenotype: ROSETTE LEAVES Disorganized Rosette-Disorganized Rosette
  misc_feature: Phenotype: ROSETTE LEAVES Shape-Lanceolate
  misc_feature: Phenotype: ROSETTE LEAVES Other
  misc_feature: Phenotype: WHOLE PLANT Size-Small
  misc_feature: Phenotype: CAULINE LEAVES Curled-Curled 5
  misc_feature: Phenotype: CAULINE LEAVES Shape-Lanceolate
  misc_feature: Phenotype: CAULINE LEAVES Other
  misc_feature: Phenotype: FLOWERS Other
  misc_feature: Phenotype: INFLORESCENCE Height-Short
aattccctctagtaccaaatcctattactattgaaggtatactctatagttatttatttagttaagtatatatattaaaaataaataacattaattagtactagtcttatcatatttattagctcattttcttataaaatactaatataataggaaatttaagcacaagatgagctttgcccatcgagagcctcaaaacccaaaagtctcttcttcttcacgagatccaatcttttgctttttagtaattaattacatcttcttccttctcttctctcttcttcttccctctctcatacctacctataagcaacacaaagaacaccattgatcccatctgttttgttccctatatttcgttaatccatccatacgcattccaactacacgctttttgtatgcaaccccaaatagcagcttaaagaaagcagagaggatcttcttttatttcccctctgagcaacagaagccattattcaaagaaaggcttctttaatttactcgcagggagagggaaaagagaaaaaattgaaaaactccattttcaagtcattaaaatggcatcttcttcaacaaactcaccatgcgccgcttgcaaattcctccggcgaaaatgtcaaccggaatgtgtattcgcgccctatttcccaccggaccagccacaaaaattcgcaaacgttcacaaagtgtttggagcaagtaacgtgacaaagctcctcaacgagcttcacccttcacaacgtgaagacgcagtgaactctttggcctatgaagccgacatgcgcctccgtgaccctgtctacggctgcgtcggcgtcatctctctcctccaacatcagcttcgtcagcttcagatagatctcagctgtgctaaatctgagctctctaagtaccaaagcctcggtatcctcgccgccactcatcagagtcttggcatcaacttactcgccggagcagcagatggaacagccaccgccgtgagagaccactatcaccaccaccagttttttcctagagaacaaatgtttggtggcttggatgttccggccggtaacaactacgacggtgggattcttgccattggacagatcactcagtttcagcagccgagagccgccgctggagatgatggtcgccgtactgttgatccgtcttgagattttagggttttggtggtgttcatcttcgtcgatcgcttggtgatgagaaaactataattttaagaaaatatttgatgtggaaaaccaaaatattttaaacgtatggtacgtctctcttaatgacattaatttcggtttttattattattattacttagatatattatgatagtcacttttgtatttctttcaaattttatggacttgctctcttaattgat

SEQ ID NO: 29134 - protein, 199 aa, Arabidopsis thaliana
  peptide (1)..(199): Ceres Seq. ID no. 12333867
  misc_feature (9)..(109): Pfam Name: Protein of unknown function DUF260 Pfam Description: Protein of unknown function DUF260
  misc_feature (7)..(112): Homolog of NCBI NO: 15227870 NR Description: hypothetical protein; protein id: At2g23660.1
  misc_feature (3)..(112): Homolog of NCBI NO: 9294470 NR Description: gb|AAB60912.1~gene_id:MGF10.6~similar to unknown
  misc_feature (1)..(112): Homolog of NCBI NO: 29427827 NR Description: LOB domain protein 25
  misc_feature (1)..(112): Homolog of NCBI NO: 21618134 NR Description: unknown [Arabidopsis thaliana]
  misc_feature (1)..(112): Homolog of NCBI NO: 18405472 NR Description: expressed protein
  misc_feature (1)..(112): Homolog of NCBI NO: 34896184 NR Description: contains ESTs C98868(E3203),C98869(E3203)~similar
  misc_feature (1)..(112): Homolog of NCBI NO: 15242624 NR Description: putative protein
  misc_feature (1)..(152): Homolog of NCBI NO: 15240110 NR Description: putative protein; protein id: At5g66870.1
  misc_feature (2)..(128): Homolog of NCBI NO: 34907508 NR Description: B1099D03.24 [Oryza sativa (japonica
  misc_feature (1)..(199): Homolog of NCBI NO: 15218746 NR Description: unknown protein
MASSSTNSPCAACKFLRRKCQPECVFAPYFPPDQPQKFANVHKVFGASNVTKLLNELHPSQREDAVNSLAYEADMRLRDPVYGCVGVISLLQHQLRQLQIDLSCAKSELSKYQSLGILAATHQSLGINLLAGAADGTATAVRDHYHHHQFFPREQMFGGLDVPAGNNYDGGILAIGQITQFQQPRAAAGDDGRRTVDPS

SEQ ID NO: 29135 - protein, 125 aa, Arabidopsis thaliana
  peptide (1)..(125): Ceres Seq. ID no. 12333868
  misc_feature (1)..(38): Homolog of NCBI NO: 15227870 NR Description: hypothetical protein; protein id: At2g23660.1
  misc_feature (1)..(38): Homolog of NCBI NO: 9294470 NR Description: gb|AAB60912.1~gene_id:MGF10.6~similar to unknown
  misc_feature (1)..(38): Homolog of NCBI NO: 29427827 NR Description: LOB domain protein 25
  misc_feature (1)..(38): Homolog of NCBI NO: 21618134 NR Description: unknown [Arabidopsis thaliana]
  misc_feature (1)..(38): Homolog of NCBI NO: 18405472 NR Description: expressed protein
  misc_feature (1)..(38): Homolog of NCBI NO: 34896184 NR Description: contains ESTs C98868(E3203),C98869(E3203)~similar
  misc_feature (1)..(38): Homolog of NCBI NO: 15242624 NR Description: putative protein
  misc_feature (1)..(78): Homolog of NCBI NO: 15240110 NR Description: putative protein; protein id: At5g66870.1
  misc_feature (1)..(54): Homolog of NCBI NO: 34907508 NR Description: B1099D03.24 [Oryza sativa (japonica
  misc_feature (1)..(125): Homolog of NCBI NO: 15218746 NR Description: unknown protein
MRLRDPVYGCVGVISLLQHQLRQLQIDLSCAKSELSKYQSLGILAATHQSLGINLLAGAADGTATAVRDHYHHHQFFPREQMFGGLDVPAGNNYDGGILAIGQITQFQQPRAAAGDDGRRTVDPS

SEQ ID NO: 29136 - DNA, 1026 bp, Arabidopsis thaliana; identical to SEQ ID NO: 26128
  misc_feature (1)..(1026): Ceres Seq. ID no. 13488738
  misc_feature: MA Experiment ID: 20000087 Result: Up-regulated in Transcription
  misc_feature: MA Experiment 20000087 PARAMETER Experiment Name: At_100uM_ABA_Mutants_cDNA_P Parameter: Plant Line Value: WS
  misc_feature: MA Experiment 20000087 PARAMETER Experiment Name: At_100uM_ABA_Mutants_cDNA_P Parameter: Timepoint (hr) Value: 6
  misc_feature: MA Experiment 20000087 PARAMETER Experiment Name: At_100uM_ABA_Mutants_cDNA_P Parameter: Tissue Value: Aerial
  misc_feature: MA Experiment 20000087 PARAMETER Experiment Name: At_100uM_ABA_Mutants_cDNA_P Parameter: Treatment Value: 100uM ABA vs. No Treatment

SEQ ID NO: 29137 - protein, 231 aa, Arabidopsis thaliana; identical to SEQ ID NO: 26129
  peptide (1)..(231): Ceres Seq. ID no. 13488739
  misc_feature (68)..(187): Homolog of NCBI NO: 2398533 NR Description: Transcription factor [Arabidopsis thaliana]
  misc_feature (52)..(183): Homolog of NCBI NO: 5257260 NR Description: Similar to sequence of BAC F7G19 from Arabidopsis
  misc_feature (1)..(187): Homolog of NCBI NO: 21554704 NR Description: transcription factor, putative [Arabidopsis
  misc_feature (23)..(223): Homolog of NCBI NO: 15242784 NR Description: transcription factor Hap5a, putative [Arabidopsis
  misc_feature (23)..(220): Homolog of NCBI NO: 15228405 NR Description: transcription factor Hap5a, putative [Arabidopsis
  misc_feature (1)..(187): Homolog of NCBI NO: 15223482 NR Description: transcription factor Hap5a, putative [Arabidopsis
  misc_feature (1)..(231): Homolog of NCBI NO: 15221912 NR Description: transcription factor Hap5a, putative [Arabidopsis
  misc_feature (24)..(231): Homolog of NCBI NO: 25372763 NR Description: hypothetical protein [imported] - Arabidopsis
  misc_feature (1)..(231): Homolog of NCBI NO: 6289057 NR Description: heme activated protein [Arabidopsis thaliana]
  misc_feature (1)..(231): Homolog of NCBI NO: 15223986 NR Description: transcription factor Hap5a, putative [Arabidopsis
  misc_feature (68)..(187): Homolog of NCBI NO: 2398533 NR Description: Transcription factor [Arabidopsis thaliana]
  misc_feature (52)..(183): Homolog of NCBI NO: 5257260 NR Description: Similar to sequence of BAC F7G19 from Arabidopsis
  misc_feature (1)..(187): Homolog of NCBI NO: 21554704 NR Description: transcription factor, putative [Arabidopsis
  misc_feature (23)..(223): Homolog of NCBI NO: 15242784 NR Description: transcription factor Hap5a, putative [Arabidopsis
  misc_feature (23)..(220): Homolog of NCBI NO: 15228405 NR Description: transcription factor Hap5a, putative [Arabidopsis
  misc_feature (1)..(187): Homolog of NCBI NO: 15223482 NR Description: transcription factor Hap5a, putative [Arabidopsis
  misc_feature (1)..(231): Homolog of NCBI NO: 15221912 NR Description: transcription factor Hap5a, putative [Arabidopsis
  misc_feature (24)..(231): Homolog of NCBI NO: 25372763 NR Description: hypothetical protein [imported] - Arabidopsis
  misc_feature (1)..(231): Homolog of NCBI NO: 6289057 NR Description: heme activated protein [Arabidopsis thaliana]
  misc_feature (1)..(231): Homolog of NCBI NO: 15223986 NR Description: transcription factor Hap5a, putative [Arabidopsis

SEQ ID NO: 29138 - protein, 220 aa, Arabidopsis thaliana; identical to SEQ ID NO: 26130
  peptide (1)..(220): Ceres Seq. ID no. 13488740
  misc_feature (57)..(176): Homolog of NCBI NO: 2398533 NR Description: Transcription factor [Arabidopsis thaliana]
  misc_feature (41)..(172): Homolog of NCBI NO: 5257260 NR Description: Similar to sequence of BAC F7G19 from Arabidopsis
  misc_feature (1)..(176): Homolog of NCBI NO: 21554704 NR Description: transcription factor, putative [Arabidopsis
  misc_feature (12)..(212): Homolog of NCBI NO: 15242784 NR Description: transcription factor Hap5a, putative [Arabidopsis
  misc_feature (12)..(209): Homolog of NCBI NO: 15228405 NR Description: transcription factor Hap5a, putative [Arabidopsis
  misc_feature (1)..(176): Homolog of NCBI NO: 15223482 NR Description: transcription factor Hap5a, putative [Arabidopsis
  misc_feature (1)..(220): Homolog of NCBI NO: 15221912 NR Description: transcription factor Hap5a, putative [Arabidopsis
  misc_feature (13)..(220): Homolog of NCBI NO: 25372763 NR Description: hypothetical protein [imported] - Arabidopsis
  misc_feature (1)..(220): Homolog of NCBI NO: 6289057 NR Description: heme activated protein [Arabidopsis thaliana]
  misc_feature (1)..(220): Homolog of NCBI NO: 15223986 NR Description: transcription factor Hap5a, putative [Arabidopsis
  misc_feature (57)..(176): Homolog of NCBI NO: 2398533 NR Description: Transcription factor [Arabidopsis thaliana]
  misc_feature (41)..(172): Homolog of NCBI NO: 5257260 NR Description: Similar to sequence of BAC F7G19 from Arabidopsis
  misc_feature (1)..(176): Homolog of NCBI NO: 21554704 NR Description: transcription factor, putative [Arabidopsis
  misc_feature (12)..(212): Homolog of NCBI NO: 15242784 NR Description: transcription factor Hap5a, putative [Arabidopsis
  misc_feature (12)..(209): Homolog of NCBI NO: 15228405 NR Description: transcription factor Hap5a, putative [Arabidopsis
  misc_feature (1)..(176): Homolog of NCBI NO: 15223482 NR Description: transcription factor Hap5a, putative [Arabidopsis
  misc_feature (1)..(220): Homolog of NCBI NO: 15221912 NR Description: transcription factor Hap5a, putative [Arabidopsis
  misc_feature (13)..(220): Homolog of NCBI NO: 25372763 NR Description: hypothetical protein [imported] - Arabidopsis
  misc_feature (1)..(220): Homolog of NCBI NO: 6289057 NR Description: heme activated protein [Arabidopsis thaliana]
  misc_feature (1)..(220): Homolog of NCBI NO: 15223986 NR Description: transcription factor Hap5a, putative [Arabidopsis

SEQ ID NO: 29139 - protein, 208 aa, Arabidopsis thaliana; identical to SEQ ID NO: 26131
  peptide (1)..(208): Ceres Seq. ID no. 13488741
  misc_feature (45)..(164): Homolog of NCBI NO: 2398533 NR Description: Transcription factor [Arabidopsis thaliana]
  misc_feature (29)..(160): Homolog of NCBI NO: 5257260 NR Description: Similar to sequence of BAC F7G19 from Arabidopsis
  misc_feature (1)..(164): Homolog of NCBI NO: 21554704 NR Description: transcription factor, putative [Arabidopsis
  misc_feature (1)..(200): Homolog of NCBI NO: 15242784 NR Description: transcription factor Hap5a, putative [Arabidopsis
  misc_feature (1)..(197): Homolog of NCBI NO: 15228405 NR Description: transcription factor Hap5a, putative [Arabidopsis
  misc_feature (1)..(164): Homolog of NCBI NO: 15223482 NR Description: transcription factor Hap5a, putative [Arabidopsis
  misc_feature (1)..(208): Homolog of NCBI NO: 15221912 NR Description: transcription factor Hap5a, putative [Arabidopsis
  misc_feature (1)..(208): Homolog of NCBI NO: 25372763 NR Description: hypothetical protein [imported] - Arabidopsis
  misc_feature (1)..(208): Homolog of NCBI NO: 6289057 NR Description: heme activated protein [Arabidopsis thaliana]
  misc_feature (1)..(208): Homolog of NCBI NO: 15223986 NR Description: transcription factor Hap5a, putative [Arabidopsis
  misc_feature (1)..(208): Homolog of NCBI NO: 15221912 NR Description: transcription factor Hap5a, putative [Arabidopsis
  misc_feature (1)..(208): Homolog of NCBI NO: 25372763 NR Description: hypothetical protein [imported] - Arabidopsis
  misc_feature (1)..(208): Homolog of NCBI NO: 6289057 NR Description: heme activated protein [Arabidopsis thaliana]
  misc_feature (1)..(208): Homolog of NCBI NO: 15223986 NR Description: transcription factor Hap5a, putative [Arabidopsis
  misc_feature (45)..(164): Homolog of NCBI NO: 2398533 NR Description: Transcription factor [Arabidopsis thaliana]
  misc_feature (29)..(160): Homolog of NCBI NO: 5257260 NR Description: Similar to sequence of BAC F7G19 from Arabidopsis
  misc_feature (1)..(164): Homolog of NCBI NO: 21554704 NR Description: transcription factor, putative [Arabidopsis
  misc_feature (1)..(200): Homolog of NCBI NO: 15242784 NR Description: transcription factor Hap5a, putative [Arabidopsis
  misc_feature (1)..(197): Homolog of NCBI NO: 15228405 NR Description: transcription factor Hap5a, putative [Arabidopsis
  misc_feature (1)..(164): Homolog of NCBI NO: 15223482 NR Description: transcription factor Hap5a, putative [Arabidopsis

SEQ ID NO: 29140 - DNA, 992 bp, Arabidopsis thaliana
  misc_feature (1)..(992): Ceres Seq. ID no. 12394136
  misc_feature: MA Experiment ID: 108434 Result: Down-regulated in Transcription
  misc_feature: MA Experiment 108434 PARAMETER Experiment Name: At_Root_Tips_cDNA_P Parameter: Tissue Value: Root Tips
  misc_feature: MA Experiment ID: 108435 Result: Down-regulated in Transcription
  misc_feature: MA Experiment 108435 PARAMETER Experiment Name: At_stm_Mutants_cDNA_P Parameter: Plant Line Value: wt Landsburg vs stm
  misc_feature: MA Experiment 108435 PARAMETER Experiment Name: At_stm_Mutants_cDNA_P Parameter: Tissue Value: Shoot Apical Meristem Region
  misc_feature: MA Experiment ID: 108461 Result: Up-regulated in Transcription
  misc_feature: MA Experiment 108461 PARAMETER Experiment Name: At_Germinating_Seeds_cDNA_P Parameter: Age (day) Value: 1 vs. 0
  misc_feature: MA Experiment 108461 PARAMETER Experiment Name: At_Germinating_Seeds_cDNA_P Parameter: Tissue Value: Germinating Seeds
  misc_feature: MA Experiment ID: 108462 Result: Up-regulated in Transcription
  misc_feature: MA Experiment 108462 PARAMETER Experiment Name: At_Germinating_Seeds_cDNA_P Parameter: Age (day) Value: 2 vs. 0
  misc_feature: MA Experiment 108462 PARAMETER Experiment Name: At_Germinating_Seeds_cDNA_P Parameter: Tissue Value: Germinating Seeds
  misc_feature: MA Experiment ID: 108463 Result: Up-regulated in Transcription
  misc_feature: MA Experiment 108463 PARAMETER Experiment Name: At_Germinating_Seeds_cDNA_P Parameter: Age (day) Value: 3 vs. 0
  misc_feature: MA Experiment 108463 PARAMETER Experiment Name: At_Germinating_Seeds_cDNA_P Parameter: Tissue Value: Germinating Seeds
  misc_feature: MA Experiment ID: 20000180 Result: Up-regulated in Transcription
  misc_feature: MA Experiment 20000180 PARAMETER Experiment Name: At_Germinating_Seeds_P Parameter: Age (hr) Value: 24 vs. 0
  misc_feature: MA Experiment 20000180 PARAMETER Experiment Name: At_Germinating_Seeds_P Parameter: Tissue Value: Germinating Seeds
  misc_feature: MA Experiment ID: 20000185 Result: Down-regulated in Transcription
  misc_feature: MA Experiment 20000185 PARAMETER Experiment Name: At_Roots__P Parameter: Age (day) Value: 7 vs. 21
  misc_feature: MA Experiment 20000185 PARAMETER Experiment Name: At_Roots__P Parameter: Organism Value: A. thaliana
  misc_feature: MA Experiment 20000185 PARAMETER Experiment Name: At_Roots__P Parameter: Tissue Value: Roots vs. Whole Plant
  misc_feature: MA Experiment ID: 20000224 Result: Up-regulated in Transcription
  misc_feature: MA Experiment ID: 20000227 Result: Down-regulated in Transcription
  misc_feature: MA Experiment 20000227 PARAMETER Experiment Name: At_Root-Tips-vs-Tops_P Parameter: Tissue Value: Root Tips vs. Root Tops
  misc_feature: MA Experiment ID: 20000439 Result: Down-regulated in Transcription
  misc_feature: MA Experiment 20000439 PARAMETER Experiment Name: At_Roots__P Parameter: Age (day) Value: 14 vs. 21
  misc_feature: MA Experiment 20000439 PARAMETER Experiment Name: At_Roots__P Parameter: Organism Value: A. thaliana
  misc_feature: MA Experiment 20000439 PARAMETER Experiment Name: At_Roots__P Parameter: Tissue Value: Roots vs. Whole Plant
  misc_feature: MA Experiment ID: 20001248 Result: Down-regulated in Transcription
  misc_feature: MA Experiment 20001248 PARAMETER Experiment Name: At_Far-red-induction_P Parameter: Age (day) Value: 7
  misc_feature: MA Experiment 20001248 PARAMETER Experiment Name: At_Far-red-induction_P Parameter: Light Value: Far-red vs. White
  misc_feature: MA Experiment 20001248 PARAMETER Experiment Name: At_Far-red-induction_P Parameter: Organism Value: A. thaliana
  misc_feature: MA Experiment 20001248 PARAMETER Experiment Name: At_Far-red-induction_P Parameter: Plant Line Value: Columbia
  misc_feature: MA Experiment 20001248 PARAMETER Experiment Name: At_Far-red-induction_P Parameter: Timepoint (hr) Value: 4
  misc_feature: MA Experiment 20001248 PARAMETER Experiment Name: At_Far-red-induction_P Parameter: Tissue Value: Whole Plant
  misc_feature: MA Experiment ID: 20001451 Result: Down-regulated in Transcription
  misc_feature: MA Experiment 20001451 PARAMETER Experiment Name: At_Far-red-induction_P Parameter: Age (day) Value: 7
  misc_feature: MA Experiment 20001451 PARAMETER Experiment Name: At_Far-red-induction_P Parameter: Light Value: Far-red vs. White
  misc_feature: MA Experiment 20001451 PARAMETER Experiment Name: At_Far-red-induction_P Parameter: Organism Value: A. thaliana
  misc_feature: MA Experiment 20001451 PARAMETER Experiment Name: At_Far-red-induction_P Parameter: Plant Line Value: Columbia
  misc_feature: MA Experiment 20001451 PARAMETER Experiment Name: At_Far-red-induction_P Parameter: Timepoint (hr) Value: 24
  misc_feature: MA Experiment 20001451 PARAMETER Experiment Name: At_Far-red-induction_P Parameter: Tissue Value: Whole Plant
  misc_feature: MA Experiment ID: 20001557 Result: Down-regulated in Transcription
  misc_feature: MA Experiment 20001557 PARAMETER Experiment Name: At_Drought_Soil_Dry_P Parameter: Age (day) Value: 27
  misc_feature: MA Experiment 20001557 PARAMETER Experiment Name: At_Drought_Soil_Dry_P Parameter: Organism Value: A. thaliana
  misc_feature: MA Experiment 20001557 PARAMETER Experiment Name: At_Drought_Soil_Dry_P Parameter: Plant Line Value: WS
  misc_feature: MA Experiment 20001557 PARAMETER Experiment Name: At_Drought_Soil_Dry_P Parameter: Post Timepoint (hr) Value: 3
  misc_feature: MA Experiment 20001557 PARAMETER Experiment Name: At_Drought_Soil_Dry_P Parameter: Post-Treatment Value: Re-Water vs. No Drought
  misc_feature: MA Experiment 20001557 PARAMETER Experiment Name: At_Drought_Soil_Dry_P Parameter: Timepoint (day) Value: 13
  misc_feature: MA Experiment 20001557 PARAMETER Experiment Name: At_Drought_Soil_Dry_P Parameter: Treatment Value: Drought vs. No Drought
  misc_feature: MA Experiment ID: 20001558 Result: Down-regulated in Transcription
  misc_feature: MA Experiment 20001558 PARAMETER Experiment Name: At_Drought_Soil_Dry_P Parameter: Age (day) Value: 27
  misc_feature: MA Experiment 20001558 PARAMETER Experiment Name: At_Drought_Soil_Dry_P Parameter: Organism Value: A. thaliana
  misc_feature: MA Experiment 20001558 PARAMETER Experiment Name: At_Drought_Soil_Dry_P Parameter: Plant Line Value: WS
  misc_feature: MA Experiment 20001558 PARAMETER Experiment Name: At_Drought_Soil_Dry_P Parameter: Post Timepoint (hr) Value: 6
  misc_feature: MA Experiment 20001558 PARAMETER Experiment Name: At_Drought_Soil_Dry_P Parameter: Post-Treatment Value: Re-Water vs. No Drought
  misc_feature: MA Experiment 20001558 PARAMETER Experiment Name: At_Drought_Soil_Dry_P Parameter: Timepoint (day) Value: 13
  misc_feature: MA Experiment 20001558 PARAMETER Experiment Name: At_Drought_Soil_Dry_P Parameter: Treatment Value: Drought vs. No Drought
  misc_feature: MA Experiment ID: 20001560 Result: Down-regulated in Transcription
  misc_feature: MA Experiment 20001560 PARAMETER Experiment Name: At_Drought_Soil_Dry_P Parameter: Age (day) Value: 28
  misc_feature: MA Experiment 20001560 PARAMETER Experiment Name: At_Drought_Soil_Dry_P Parameter: Organism Value: A. thaliana
  misc_feature: MA Experiment 20001560 PARAMETER Experiment Name: At_Drought_Soil_Dry_P Parameter: Plant Line Value: WS
  misc_feature: MA Experiment 20001560 PARAMETER Experiment Name: At_Drought_Soil_Dry_P Parameter: Post Timepoint (hr) Value: None
  misc_feature: MA Experiment 20001560 PARAMETER Experiment Name: At_Drought_Soil_Dry_P Parameter: Post-Treatment Value: None
  misc_feature: MA Experiment 20001560 PARAMETER Experiment Name: At_Drought_Soil_Dry_P Parameter: Timepoint (day) Value: 14
  misc_feature: MA Experiment 20001560 PARAMETER Experiment Name: At_Drought_Soil_Dry_P Parameter: Treatment Value: Drought vs. No Drought
aaaaaaaaatccgtagtttcttctacagaatcagatctttgtatcgtcaatggctccttcttttatttttgtagaagatcgtccagctccgcttgatgctacttctgatccaccgtctctcttcgacggaaccacaaggttgtacacaagctacgtttgcccatttgctcaacgagtttggatcactcgaaacttcaagggtttgcaagaaaagattaaacttgttcctttggatcttgggaataggcctgcttggtacaaggagaaagtatatccagagaacaaggtgccagcgcttgagcacaatggaaaaatcattggggagagtctggatttgattaaatatcttgataacacttttgaagggccttctctttaccccgaggatcatgcaaaaagagagtttggcgacgagttgctcaagtatactgatactttcgttaaaactatgtatgtgtcactcaaaggagacccctctaaagaaaccgcacctgtgttagattatctggaaaacgctctgtataagttcgatgacgggccgttcttcctcggtcagttaagcttggttgatatcgcctatatcccgttcattgaaaggttccaaactgtactcaatgaattatttaagtgcgacattactgccgaacgtcccaaactatcagcatggattgaggaaattaacaagagcgatggctatgcacagacgaaaatggatcctaaggagattgtggaggttttcaagaaaaaattcatgtaactgtaagcaagcacgaagcagtaaagtgtatgagaccaaaccaccttgtacgaacaggtggtctttggatatgaagaaataagatgtgtacttgaacctgatgatgcaataagatttgtactttacatgatgcagcaacagcttaatctgtattctagtgttgatcaaattatcaaccattgacattgttaatatattactgtatgatagtaatactatcaaaatctcacacatt

SEQ ID NO: 29141 - protein, 235 aa, Arabidopsis thaliana
  peptide (1)..(235): Ceres Seq. ID no. 12394137
  misc_feature (144)..(214): Pfam Name: Glutathione S-transferase, C-terminal domain Pfam Description: Glutathione S-transferase, C-terminal domain
  misc_feature (1)..(235): Homolog of NCBI NO: 30679765 NR Description: In2-1 protein, putative [Arabidopsis thaliana]
  misc_feature (1)..(235): Homolog of NCBI NO: 11357919 NR Description: hypothetical protein F9G14.90 - Arabidopsis
  misc_feature (1)..(235): Homolog of NCBI NO: 21537338 NR Description: In2-1 protein [Arabidopsis thaliana]
  misc_feature (1)..(235): Homolog of NCBI NO: 15241956 NR Description: In2-1 protein, putative
MAPSFIFVEDRPAPLDATSDPPSLFDGTTRLYTSYVCPFAQRVWITRNFKGLQEKIKLVPLDLGNRPAWYKEKVYPENKVPALEHNGKIIGESLDLIKYLDNTFEGPSLYPEDHAKREFGDELLKYTDTFVKTMYVSLKGDPSKETAPVLDYLENALYKFDDGPFFLGQLSLVDIAYIPFIERFQTVLNELFKCDITAERPKLSAWIEEINKSDGYAQTKMDPKEIVEVFKKKFM

SEQ ID NO: 29142 - DNA, 1247 bp, Arabidopsis thaliana
  misc_feature (1)..(1247): Ceres Seq. ID no. 13489989
  misc_feature: MA Experiment ID: 108463 Result: Down-regulated in Transcription
  misc_feature: MA Experiment 108463 PARAMETER Experiment Name: At_Germinating_Seeds_cDNA_P Parameter: Age (day) Value: 3 vs. 0
  misc_feature: MA Experiment 108463 PARAMETER Experiment Name: At_Germinating_Seeds_cDNA_P Parameter: Tissue Value: Germinating Seeds
  misc_feature: MA Experiment ID: 108488 Result: Up-regulated in Transcription
  misc_feature: MA Experiment ID: 108573 Result: Down-regulated in Transcription
  misc_feature: MA Experiment 108573 PARAMETER Experiment Name: At_Drought_cDNA_P Parameter: Timepoint (hr) Value: 6
  misc_feature: MA Experiment 108573 PARAMETER Experiment Name: At_Drought_cDNA_P Parameter: Tissue Value: Aerial
  misc_feature: MA Experiment 108573 PARAMETER Experiment Name: At_Drought_cDNA_P Parameter: Treatment Value: Drought vs. No Drought
  misc_feature: MA Experiment ID: 108577 Result: Down-regulated in Transcription
  misc_feature: MA Experiment 108577 PARAMETER Experiment Name: At_42deg_Heat_cDNA_P Parameter: Temperature (deg C) Value: 42 vs. 22
  misc_feature: MA Experiment 108577 PARAMETER Experiment Name: At_42deg_Heat_cDNA_P Parameter: Timepoint (hr) Value: 6
  misc_feature: MA Experiment 108577 PARAMETER Experiment Name: At_42deg_Heat_cDNA_P Parameter: Tissue Value: Aerial
  misc_feature: MA Experiment ID: 108585 Result: Down-regulated in Transcription
  misc_feature: MA Experiment 108585 PARAMETER Experiment Name: At_5mM_NaNP_cDNA_P Parameter: Timepoint (hr) Value: 6
  misc_feature: MA Experiment 108585 PARAMETER Experiment Name: At_5mM_NaNP_cDNA_P Parameter: Tissue Value: Aerial
  misc_feature: MA Experiment 108585 PARAMETER Experiment Name: At_5mM_NaNP_cDNA_P Parameter: Treatment Value: null
  misc_feature: MA Experiment ID: 108595 Result: Down-regulated in Transcription
  misc_feature: MA Experiment 108595 PARAMETER Experiment Name: At_Ler-pi_Ovule_cDNA_P Parameter: Plant Line Value: null
  misc_feature: MA Experiment ID: 20000117 Result: Down-regulated in Transcription
  misc_feature: MA Experiment 20000117 PARAMETER Experiment Name: At_100uM_ABA_Mutants_cDNA_P Parameter: Plant Line Value: Columbia
  misc_feature: MA Experiment 20000117 PARAMETER Experiment Name: At_100uM_ABA_Mutants_cDNA_P Parameter: Timepoint (hr) Value: 6
  misc_feature: MA Experiment 20000117 PARAMETER Experiment Name: At_100uM_ABA_Mutants_cDNA_P Parameter: Tissue Value: Aerial
  misc_feature: MA Experiment 20000117 PARAMETER Experiment Name: At_100uM_ABA_Mutants_cDNA_P Parameter: Treatment Value: 100uM ABA vs. No Treatment
  misc_feature: MA Experiment ID: 20000173 Result: Down-regulated in Transcription
  misc_feature: MA Experiment 20000173 PARAMETER Experiment Name: At_42deg_Heat_P Parameter: Age (day) Value: 14
  misc_feature: MA Experiment 20000173 PARAMETER Experiment Name: At_42deg_Heat_P Parameter: Organism Value: A. thaliana
  misc_feature: MA Experiment 20000173 PARAMETER Experiment Name: At_42deg_Heat_P Parameter: Plant Line Value: WS
  misc_feature: MA Experiment 20000173 PARAMETER Experiment Name: At_42deg_Heat_P Parameter: Temperature (deg C) Value: 42 vs. 22
  misc_feature: MA Experiment 20000173 PARAMETER Experiment Name: At_42deg_Heat_P Parameter: Timepoint (hr) Value: 6
  misc_feature: MA Experiment 20000173 PARAMETER Experiment Name: At_42deg_Heat_P Parameter: Tissue Value: Aerial
  misc_feature: MA Experiment ID: 20000185 Result: Down-regulated in Transcription
  misc_feature: MA Experiment 20000185 PARAMETER Experiment Name: At_Roots__P Parameter: Age (day) Value: 7 vs. 21
  misc_feature: MA Experiment 20000185 PARAMETER Experiment Name: At_Roots__P Parameter: Organism Value: A. thaliana
  misc_feature: MA Experiment 20000185 PARAMETER Experiment Name: At_Roots__P Parameter: Tissue Value: Roots vs. Whole Plant
  misc_feature: MA Experiment ID: 20000264 Result: Down-regulated in Transcription
  misc_feature: MA Experiment 20000264 PARAMETER Experiment Name: At_Open_Flower_P Parameter: Age (day) Value: 21
  misc_feature: MA Experiment 20000264 PARAMETER Experiment Name: At_Open_Flower_P Parameter: Plant Line Value: WS
  misc_feature: MA Experiment 20000264 PARAMETER Experiment Name: At_Open_Flower_P Parameter: Tissue Value: Open Flower vs. Whole Plant
  misc_feature: MA Experiment ID: 20000286 Result: Down-regulated in Transcription
  misc_feature: MA Experiment 20000286 PARAMETER Experiment Name: At_Open_Flower_P Parameter: Age (day) Value: 21
  misc_feature: MA Experiment 20000286 PARAMETER Experiment Name: At_Open_Flower_P Parameter: Plant Line Value: WS
  misc_feature: MA Experiment 20000286 PARAMETER Experiment Name: At_Open_Flower_P Parameter: Tissue Value: Half Open vs. Whole Plant
  misc_feature: MA Experiment ID: 20000437 Result: Down-regulated in Transcription
  misc_feature: MA Experiment 20000437 PARAMETER Experiment Name: At_Drought_P Parameter: Age (day) Value: 8
  misc_feature: MA Experiment 20000437 PARAMETER Experiment Name: At_Drought_P Parameter: Organism Value: A. thaliana
  misc_feature: MA Experiment 20000437 PARAMETER Experiment Name: At_Drought_P Parameter: Plant Line Value: WS
  misc_feature: MA Experiment 20000437 PARAMETER Experiment Name: At_Drought_P Parameter: Timepoint (hr) Value: 24
  misc_feature: MA Experiment 20000437 PARAMETER Experiment Name: At_Drought_P Parameter: Tissue Value: Whole Plant
  misc_feature: MA Experiment 20000437 PARAMETER Experiment Name: At_Drought_P Parameter: Treatment Value: Drought vs. No Drought
  misc_feature: MA Experiment ID: 20000439 Result: Down-regulated in Transcription
  misc_feature: MA Experiment 20000439 PARAMETER Experiment Name: At_Roots__P Parameter: Age (day) Value: 14 vs. 21
  misc_feature: MA Experiment 20000439 PARAMETER Experiment Name: At_Roots__P Parameter: Organism Value: A. thaliana
  misc_feature: MA Experiment 20000439 PARAMETER Experiment Name: At_Roots__P Parameter: Tissue Value: Roots vs. Whole Plant
  misc_feature: MA Experiment ID: 20000794 Result: Down-regulated in Transcription
  misc_feature: MA Experiment 20000794 PARAMETER Experiment Name: At_Petals_P Parameter: Age (day) Value: 23-25 days
  misc_feature: MA Experiment 20000794 PARAMETER Experiment Name: At_Petals_P Parameter: Plant Line Value: WS
  misc_feature: MA Experiment 20000794 PARAMETER Experiment Name: At_Petals_P Parameter: Tissue Value: Petals vs. Whole plant
  misc_feature: MA Experiment ID: 20001905 Result: Down-regulated in Transcription
  misc_feature: MA Experiment 20001905 PARAMETER Experiment Name: At_Drought_Reproduction_P Parameter: Age (day) Value: 40
  misc_feature: MA Experiment 20001905 PARAMETER Experiment Name: At_Drought_Reproduction_P Parameter: Organism Value: A. thaliana
  misc_feature: MA Experiment 20001905 PARAMETER Experiment Name: At_Drought_Reproduction_P Parameter: Plant Line Value: WS
  misc_feature: MA Experiment 20001905 PARAMETER Experiment Name: At_Drought_Reproduction_P Parameter: Timepoint (day) Value: 10
  misc_feature: MA Experiment 20001905 PARAMETER Experiment Name: At_Drought_Reproduction_P Parameter: Tissue Value: Rosettes
  misc_feature: MA Experiment 20001905 PARAMETER Experiment Name: At_Drought_Reproduction_P Parameter: Treatment Value: Drought vs. No Drought
  misc_feature: MA Experiment ID: 20001911 Result: Down-regulated in Transcription
  misc_feature: MA Experiment 20001911 PARAMETER Experiment Name: At_Drought_Reproduction_P Parameter: Age (day) Value: 40
  misc_feature: MA Experiment 20001911 PARAMETER Experiment Name: At_Drought_Reproduction_P Parameter: Organism Value: A. thaliana
  misc_feature: MA Experiment 20001911 PARAMETER Experiment Name: At_Drought_Reproduction_P Parameter: Plant Line Value: WS
  misc_feature: MA Experiment 20001911 PARAMETER Experiment Name: At_Drought_Reproduction_P Parameter: Timepoint (day) Value: 10
  misc_feature: MA Experiment 20001911 PARAMETER Experiment Name: At_Drought_Reproduction_P Parameter: Tissue Value: Flowers
  misc_feature: MA Experiment 20001911 PARAMETER Experiment Name: At_Drought_Reproduction_P Parameter: Treatment Value: Drought vs. No Drought
atggtgggatttaagaacagatacatgttaatggaagtttttctggatccggacaaggatcttctcggagaaggaacaccgatcattcttacacaattcaatctctcgaaagcaatcaaagacagtatcctcgtcaatttcggcgagtgtggtctaggttcgtctctcggttccttccaagtgaaatatgtgaatccaatcacgaagctatgcattgtaagatcatcaagagaagaacacagacaagtttggttagcaatcacattggtcaaaagcatcggaaactgtccggtgatcttaaacttgctcgatattagcggttgcatcagagcgtgtagagacacacttttaataaatccaaaatttctaatctggagagaacctatctctgaggtccaaactcttcggtggaggagaagaactgaaacggaaatgagatcccctagaaccttggaggtttggaagctaggcactgtcaactatttgaaatcccttaaactgcaggagaaattagtttcagagagaaaagctcatcagattccagataccctcctctcgcttcagcatccaccaacttatacgctcggaaagcgtagaaccgatcacaatctacttatccctgaatctgaacttacaaaaatcggagctgaacttcattatactcaaagaggaggagacatcaccttccatggccctcatcaagccatcttatatcccatcatttccttacgcagcattggttttggtgctaggaactacgtggagacattggagcggtcaatgatcgagtttgcttcgatttatggcgtgaaagctcgagcaggaaacaaatgtgagactggggtttgggttggggataggaagatcggtgctattggggttaggatatcttctggaatcactagtcatggtttggccttaaatatagatcctgatatgaagtactttgagcacattgtgccttgtgggattgctgataaagaagttacatctttgcgaagagagacggatactctgcttccttcagaagaagtgattcatgaacagttggtttcttgtttagccaaagcgttttcttatgatgatgttgtctggaaggaagatccttcactcattttggacacccaagataaagaataatccggtttgatccggttttgatttattgtctacaaaaaatgttattattttttgacgtgatgtggatttctgatattgtcttattcattctcaaattttcattaaaa

SEQ ID NO: 29143 - protein, 379 aa, Arabidopsis thaliana
  peptide (1)..(379): Ceres Seq. ID no. 13489990
  misc_feature (7)..(97): Pfam Name: Rpp14 family Pfam Description: Rpp14 family
  misc_feature (140)..(336): Homolog of NCBI NO: 32565879 NR Description: LiPoate Ligase (27.4 kD) (lpl-1) [Caenorhabditis
  misc_feature (151)..(358): Homolog of NCBI NO: 31203215 NR Description: ENSANGP00000017330 [Anopheles gambiae]
  misc_feature (150)..(363): Homolog of NCBI NO: 6685619 NR Description: Lipoate-protein ligase B (Lipoate biosynthesis
  misc_feature (153)..(358): Homolog of NCBI NO: 21355483 NR Description: CG9804-PA [Drosophila melanogaster]
  misc_feature (1)..(117): Homolog of NCBI NO: 38343977 NR Description: OSJNBa0041M21.1 [Oryza sativa (japonica
  misc_feature (138)..(361): Homolog of NCBI NO: 22971103 NR Description: hypothetical protein [Chloroflexus aurantiacus]
  misc_feature (1)..(152): Homolog of NCBI NO: 22329330 NR Description: Probable lipoate-protein ligase B -related
  misc_feature (145)..(379): Homolog of NCBI NO: 15219770 NR Description: lipoyltransferase [Arabidopsis thaliana]
  misc_feature (1)..(97): Homolog of NCBI NO: 3122357 NR Description: Probable lipoate-protein ligase (Lipoate
  misc_feature (144)..(379): Homolog of NCBI NO: 3122357 NR Description: Probable lipoate-protein ligase (Lipoate
MVGFKNRYMLMEVFLDPDKDLLGEGTPIILTQFNLSKAIKDSILVNFGECGLGSSLGSFQVKYVNPITKLCIVRSSREEHRQVWLAITLVKSIGNCPVILNLLDISGCIRACRDTLLINPKFLIWREPISEVQTLRWRRRTETEMRSPRTLEVWKLGTVNYLKSLKLQEKLVSERKAHQIPDTLLSLQHPPTYTLGKRRTDHNLLIPESELTKIGAELHYTQRGGDITFHGPHQAILYPIISLRSIGFGARNYVETLERSMIEFASIYGVKARAGNKCETGVWVGDRKIGAIGVRISSGITSHGLALNIDPDMKYFEHIVPCGIADKEVTSLRRETDTLLPSEEVIHEQLVSCLAKAFSYDDVVWKEDPSLILDTQDKE

SEQ ID NO: 29144 - protein, 371 aa, Arabidopsis thaliana
  peptide (1)..(371): Ceres Seq. ID no. 13489991
  misc_feature (1)..(89): Pfam Name: Rpp14 family Pfam Description: Rpp14 family
  misc_feature (132)..(328): Homolog of NCBI NO: 32565879 NR Description: LiPoate Ligase (27.4 kD) (lpl-1) [Caenorhabditis
  misc_feature (143)..(350): Homolog of NCBI NO: 31203215 NR Description: ENSANGP00000017330 [Anopheles gambiae]
  misc_feature (142)..(355): Homolog of NCBI NO: 6685619 NR Description: Lipoate-protein ligase B (Lipoate biosynthesis
  misc_feature (145)..(350): Homolog of NCBI NO: 21355483 NR Description: CG9804-PA [Drosophila melanogaster]
  misc_feature (1)..(109): Homolog of NCBI NO: 38343977 NR Description: OSJNBa0041M21.1 [Oryza sativa (japonica
  misc_feature (130)..(353): Homolog of NCBI NO: 22971103 NR Description: hypothetical protein [Chloroflexus aurantiacus]
  misc_feature (1)..(144): Homolog of NCBI NO: 22329330 NR Description: Probable lipoate-protein ligase B -related
  misc_feature (137)..(371): Homolog of NCBI NO: 15219770 NR Description: lipoyltransferase [Arabidopsis thaliana]
  misc_feature (1)..(89): Homolog of NCBI NO: 3122357 NR Description: Probable lipoate-protein ligase (Lipoate
  misc_feature (136)..(371): Homolog of NCBI NO: 3122357 NR Description: Probable lipoate-protein ligase (Lipoate
MLMEVFLDPDKDLLGEGTPIILTQFNLSKAIKDSILVNFGECGLGSSLGSFQVKYVNPITKLCIVRSSREEHRQVWLAITLVKSIGNCPVILNLLDISGCIRACRDTLLINPKFLIWREPISEVQTLRWRRRTETEMRSPRTLEVWKLGTVNYLKSLKLQEKLVSERKAHQIPDTLLSLQHPPTYTLGKRRTDHNLLIPESELTKIGAELHYTQRGGDITFHGPHQAILYPIISLRSIGFGARNYVETLERSMIEFASIYGVKARAGNKCETGVWVGDRKIGAIGVRISSGITSHGLALNIDPDMKYFEHIVPCGIADKEVTSLRRETDTLLPSEEVIHEQLVSCLAKAFSYDDVVWKEDPSLILDTQDKE

SEQ ID NO: 29145 - protein, 369 aa, Arabidopsis thaliana
  peptide (1)..(369): Ceres Seq. ID no. 13489992
  misc_feature (1)..(87): Pfam Name: Rpp14 family Pfam Description: Rpp14 family
  misc_feature (130)..(326): Homolog of NCBI NO: 32565879 NR Description: LiPoate Ligase (27.4 kD) (lpl-1) [Caenorhabditis
  misc_feature (141)..(348): Homolog of NCBI NO: 31203215 NR Description: ENSANGP00000017330 [Anopheles gambiae]
  misc_feature (140)..(353): Homolog of NCBI NO: 6685619 NR Description: Lipoate-protein ligase B (Lipoate biosynthesis
  misc_feature (143)..(348): Homolog of NCBI NO: 21355483 NR Description: CG9804-PA [Drosophila melanogaster]
  misc_feature (1)..(107): Homolog of NCBI NO: 38343977 NR Description: OSJNBa0041M21.1 [Oryza sativa (japonica
  misc_feature (128)..(351): Homolog of NCBI NO: 22971103 NR Description: hypothetical protein [Chloroflexus aurantiacus]
  misc_feature (1)..(142): Homolog of NCBI NO: 22329330 NR Description: Probable lipoate-protein ligase B -related
  misc_feature (135)..(369): Homolog of NCBI NO: 15219770 NR Description: lipoyltransferase [Arabidopsis thaliana]
  misc_feature (1)..(87): Homolog of NCBI NO: 3122357 NR Description: Probable lipoate-protein ligase (Lipoate
  misc_feature (134)..(369): Homolog of NCBI NO: 3122357 NR Description: Probable lipoate-protein ligase (Lipoate
MEVFLDPDKDLLGEGTPIILTQFNLSKAIKDSILVNFGECGLGSSLGSFQVKYVNPITKLCIVRSSREEHRQVWLAITLVKSIGNCPVILNLLDISGCIRACRDTLLINPKFLIWREPISEVQTLRWRRRTETEMRSPRTLEVWKLGTVNYLKSLKLQEKLVSERKAHQIPDTLLSLQHPPTYTLGKRRTDHNLLIPESELTKIGAELHYTQRGGDITFHGPHQAILYPIISLRSIGFGARNYVETLERSMIEFASIYGVKARAGNKCETGVWVGDRKIGAIGVRISSGITSHGLALNIDPDMKYFEHIVPCGIADKEVTSLRRETDTLLPSEEVIHEQLVSCLAKAFSYDDVVWKEDPSLILDTQDKE

SEQ ID NO: 29146 - DNA, 709 bp, Arabidopsis thaliana
  misc_feature (1)..(709): Ceres Seq. ID no. 12331898
  misc_feature: MA Experiment ID: 20000112 Result: Up-regulated in Transcription
  misc_feature: MA Experiment 20000112 PARAMETER Experiment Name: At_42deg_Heat_cDNA_P Parameter: Temperature (deg C) Value: 42 vs. 22
  misc_feature: MA Experiment 20000112 PARAMETER Experiment Name: At_42deg_Heat_cDNA_P Parameter: Timepoint (hr) Value: 2
  misc_feature: MA Experiment 20000112 PARAMETER Experiment Name: At_42deg_Heat_cDNA_P Parameter: Tissue Value: Aerial
  misc_feature: MA Experiment ID: 20001451 Result: Up-regulated in Transcription
  misc_feature: MA Experiment 20001451 PARAMETER Experiment Name: At_Far-red-induction_P Parameter: Age (day) Value: 7
  misc_feature: MA Experiment 20001451 PARAMETER Experiment Name: At_Far-red-induction_P Parameter: Light Value: Far-red vs. White
  misc_feature: MA Experiment 20001451 PARAMETER Experiment Name: At_Far-red-induction_P Parameter: Organism Value: A. thaliana
  misc_feature: MA Experiment 20001451 PARAMETER Experiment Name: At_Far-red-induction_P Parameter: Plant Line Value: Columbia
  misc_feature: MA Experiment 20001451 PARAMETER Experiment Name: At_Far-red-induction_P Parameter: Timepoint (hr) Value: 24
  misc_feature: MA Experiment 20001451 PARAMETER Experiment Name: At_Far-red-induction_P Parameter: Tissue Value: Whole Plant
atccaacaaacttatatgtgtatcggacacagaagaatactttcgacgatcatcagcttctggaaatctcttctgggaatcgagcttcactgttaaagattttccttcaatcggctaaaaatgatacatttcgtgttactagtcagtcgacaagggaaagtaaggctcaccaagtggtattcgccgtatacgcagaaggaaagatctaaggtcatacgtgaactcagcggagtgattctgaaccgaggtcccaagctctgcaattttattgaatggagaggatacaaggttgtctacaaaagatatgcaaggcttgtacttctgcatgtgcattgatgaggcggataacgagttagaggtactggagataattcatcactacgtcgagattcttgaccgctactttggcagtgtgtgtgaactcgatttgatttttaacttccacaaggcgtattatatactcgatgagctgttgatcgccggagaacttcaagagtcaagcaagaaaacagttgcaaggataatatcagcccaggatcaattggtggaagttgcgaaagaggaggcgagttccataagtaatataattgctcaggctaccaagtagtccttttctgaacttttcttatgcagctgaaacaatcgtaaatgagttaatattttccttaaactctgagatattctcttctgaatcacacttttgtttgtc

SEQ ID NO: 29147 - protein, 93 aa, Arabidopsis thaliana
  peptide (1)..(93): Ceres Seq. ID no. 12331899
  misc_feature (1)..(74): Pfam Name: Clathrin adaptor complex small chain Pfam Description: Clathrin adaptor complex small chain
  misc_feature (1)..(73): Homolog of NCBI NO: 30983940 NR Description: clathrin coat assembly protein [Gossypium
  misc_feature (1)..(73): Homolog of NCBI NO: 17149110 NR Description: clathrin assembly protein AP17-like protein
  misc_feature (1)..(77): Homolog of NCBI NO: 21541959 NR Description: Adapter-related protein complex 1 sigma 1C (Sigma-adaptin 1C) (Adaptor protein complex AP-1 sigma-1C (Golgi adaptor HA1/AP1 adaptin sigma-1C subunit) (Clathrin
  misc_feature (1)..(41): Homolog of NCBI NO: 30690340 NR Description: clathrin assembly protein AP19 homolog
  misc_feature (1)..(88): Homolog of NCBI NO: 23480730 NR Description: clathrin assembly protein AP19, small subunit
  misc_feature (1)..(93): Homolog of NCBI NO: 34897116 NR Description: putative clathrin assembly protein [Oryza sativa]
  misc_feature (1)..(93): Homolog of NCBI NO: 1762309 NR Description: AP-1 Golgi-related complex component
  misc_feature (1)..(92): Homolog of NCBI NO: 15237005 NR Description: clathrin assembly protein AP19 homolog
  misc_feature (1)..(93): Homolog of NCBI NO: 2231698 NR Description: clathrin assembly protein AP19 [Arabidopsis
  misc_feature (1)..(93): Homolog of NCBI NO: 18398407 NR Description: clathrin assembly protein AP19, small subunit
MCIDEADNELEVLEIIHHYVEILDRYFGSVCELDLIFNFHKAYYILDELLIAGELQESSKKTVARIISAQDQLVEVAKEEASSISNIIAQATK

SEQ ID NO: 29148 - protein, 71 aa, Arabidopsis thaliana
  peptide (1)..(71): Ceres Seq. ID no. 12331900
  misc_feature (1)..(65): Pfam Name: Clathrin adaptor complex small chain Pfam Description: Clathrin adaptor complex small chain
  misc_feature (1)..(65): Homolog of NCBI NO: 30983940 NR Description: clathrin coat assembly protein [Gossypium
  misc_feature (1)..(65): Homolog of NCBI NO: 17149110 NR Description: clathrin assembly protein AP17-like protein
  misc_feature (1)..(65): Homolog of NCBI NO: 21541959 NR Description: Adapter-related protein complex 1 sigma 1C (Sigma-adaptin 1C) (Adaptor protein complex AP-1 sigma-1C (Golgi adaptor HA1/AP1 adaptin sigma-1C subunit) (Clathrin
  misc_feature (1)..(65): Homolog of NCBI NO: 30690340 NR Description: clathrin assembly protein AP19 homolog
  misc_feature (1)..(68): Homolog of NCBI NO: 23480730 NR Description: clathrin assembly protein AP19, small subunit
  misc_feature (1)..(65): Homolog of NCBI NO: 34897116 NR Description: putative clathrin assembly protein [Oryza sativa]
  misc_feature (1)..(65): Homolog of NCBI NO: 1762309 NR Description: AP-1 Golgi-related complex component
  misc_feature (1)..(65): Homolog of NCBI NO: 15237005 NR Description: clathrin assembly protein AP19 homolog
  misc_feature (1)..(65): Homolog of NCBI NO: 2231698 NR Description: clathrin assembly protein AP19 [Arabidopsis
  misc_feature (1)..(65): Homolog of NCBI NO: 18398407 NR Description: clathrin assembly protein AP19, small subunit
MIHFVLLVSRQGKVRLTKWYSPYTQKERSKVIRELSGVILNRGPKLCNFIEWRGYKVVYKRYARLVLLHVH

SEQ ID NO: 29149 - protein, 100 aa, Arabidopsis thaliana
  peptide (1)..(100): Ceres Seq. ID no. 12331901
  misc_feature (1)..(81): Pfam Name: Clathrin adaptor complex small chain Pfam Description: Clathrin adaptor complex small chain
  misc_feature (3)..(80): Homolog of NCBI NO: 30983940 NR Description: clathrin coat assembly protein [Gossypium
  misc_feature (3)..(80): Homolog of NCBI NO: 17149110 NR Description: clathrin assembly protein AP17-like protein
  misc_feature (1)..(84): Homolog of NCBI NO: 21541959 NR Description: Adapter-related protein complex 1 sigma 1C (Sigma-adaptin 1C) (Adaptor protein complex AP-1 sigma-1C (Golgi adaptor HA1/AP1 adaptin sigma-1C subunit) (Clathrin
  misc_feature (1)..(48): Homolog of NCBI NO: 30690340 NR Description: clathrin assembly protein AP19 homolog
  misc_feature (4)..(95): Homolog of NCBI NO: 23480730 NR Description: clathrin assembly protein AP19, small subunit
  misc_feature (4)..(100): Homolog of NCBI NO: 34897116 NR Description: putative clathrin assembly protein [Oryza sativa]
  misc_feature (1)..(100): Homolog of NCBI NO: 1762309 NR Description: AP-1 Golgi-related complex component
  misc_feature (1)..(99): Homolog of NCBI NO: 15237005 NR Description: clathrin assembly protein AP19 homolog
  misc_feature (1)..(100): Homolog of NCBI NO: 2231698 NR Description: clathrin assembly protein AP19 [Arabidopsis
  misc_feature (1)..(100): Homolog of NCBI NO: 18398407 NR Description: clathrin assembly protein AP19, small subunit
MQGLYFCMCIDEADNELEVLEIIHHYVEILDRYFGSVCELDLIFNFHKAYYILDELLIAGELQESSKKTVARIISAQDQLVEVAKEEASSISNIIAQATK

SEQ ID NO: 29150 - DNA, 1087 bp, Arabidopsis thaliana
  misc_feature (1)..(1087): Ceres Seq. ID no. 12334939
  misc_feature: MA Experiment ID: 108573 Result: Up-regulated in Transcription
  misc_feature: MA Experiment 108573 PARAMETER Experiment Name: At_Drought_cDNA_P Parameter: Timepoint (hr) Value: 6
  misc_feature: MA Experiment 108573 PARAMETER Experiment Name: At_Drought_cDNA_P Parameter: Tissue Value: Aerial
  misc_feature: MA Experiment 108573 PARAMETER Experiment Name: At_Drought_cDNA_P Parameter: Treatment Value: Drought vs. No Drought
  misc_feature: MA Experiment ID: 108595 Result: Down-regulated in Transcription
  misc_feature: MA Experiment 108595 PARAMETER Experiment Name: At_Ler-pi_Ovule_cDNA_P Parameter: Plant Line Value: null
  misc_feature: MA Experiment ID: 108668 Result: Up-regulated in Transcription
  misc_feature: MA Experiment 108668 PARAMETER Experiment Name: At_2mM_SA_cDNA_P Parameter: Plant Line Value: WS
  misc_feature: MA Experiment 108668 PARAMETER Experiment Name: At_2mM_SA_cDNA_P Parameter: Timepoint (hr) Value: 6
  misc_feature: MA Experiment 108668 PARAMETER Experiment Name: At_2mM_SA_cDNA_P Parameter: Treatment Value: 2mM SA vs. No Treatment
  misc_feature: MA Experiment ID: 20000224 Result: Down-regulated in Transcription
  misc_feature: MA Experiment ID: 20000437 Result: Up-regulated in Transcription
  misc_feature: MA Experiment 20000437 PARAMETER Experiment Name: At_Drought_P Parameter: Age (day) Value: 8
  misc_feature: MA Experiment 20000437 PARAMETER Experiment Name: At_Drought_P Parameter: Organism Value: A. thaliana
  misc_feature: MA Experiment 20000437 PARAMETER Experiment Name: At_Drought_P Parameter: Plant Line Value: WS
  misc_feature: MA Experiment 20000437 PARAMETER Experiment Name: At_Drought_P Parameter: Timepoint (hr) Value: 24
  misc_feature: MA Experiment 20000437 PARAMETER Experiment Name: At_Drought_P Parameter: Tissue Value: Whole Plant
  misc_feature: MA Experiment 20000437 PARAMETER Experiment Name: At_Drought_P Parameter: Treatment Value: Drought vs. No Drought
tttttcccaaaattggattcaaagttctttctttttgtcttcctcgtacatcacagcatcaagggttttcgacattaccagctattatgcttgaatttgaggacgcaaggagttaaaagagcaagtcttttgagttgaggaagcttctgtagaggattattatttcaggggaaatttaagggtttgatcagcttttgtgtgttgtgcgggatggatcaaattgtttcaggagaagaagaagatcttgatgtagatattgaagatggtagattcaatgagacacaagagataacgacgaatcttgtttcagcggaaggggattcagagaatgttttgaatcatgtttggagtggacgtttgagttttgatgggtctgaaaagagtgctgatgatctagtagaccctttaatgggagagggaaagcggagagaaagaagcagtcaaagtttggatctttcggatatgaagtttgataatgataagtttaagaagacgagaaaaccttcaaagccaccgaggcctccaaaaggtccgttactgagtgctaatgaccagaagttgatgagggaaatcacggagcttgctatgagaaagcgtgctcggattgaacggatgaaaacactcagaagattgaaagcagcaaagtcctcgtctccctgcagtagcattttcgccatgatagtgacggttatattcttcgtcttcttaatctttcaagggttcttcacaagcaatgcgagtttgaattctgacaattcacctgcaccaaataattcagctaataaccgtatggtctctgttcagttctacaatgagtttgctcctcgtgagagaatcgatcccagccctactacttctttcaggtataagagagtctcaggtgcagacaatgaagaaaacacaagagaagttaccagatgagtttcttctctttggattcttgtaaaatgtaaccaaaaacactacttatgtttttgtttgttcgtaaattcttgacatcactctattgttcctttgatctgtttgtgttcacatgtttgtctctctgttactcttcttgtaaatattcttatggatgaatctgctc

SEQ ID NO: 29151 - protein, 236 aa, Arabidopsis thaliana
  peptide (1)..(236): Ceres Seq. ID no. 12334940
  misc_feature (91)..(233): Homolog of NCBI NO: 15228970 NR Description: hypothetical protein
  misc_feature (1)..(172): Homolog of NCBI NO: 30678287 NR Description: expressed protein [Arabidopsis thaliana]
  misc_feature (1)..(236): Homolog of NCBI NO: 25372617 NR Description: T6A9.7 protein - Arabidopsis thaliana
  misc_feature (1)..(236): Homolog of NCBI NO: 15235188 NR Description: PITSLRE protein kinase family
MDQIVSGEEEDLDVDIEDGRFNETQEITTNLVSAEGDSENVLNHVWSGRLSFDGSEKSADDLVDPLMGEGKRRERSSQSLDLSDMKFDNDKFKKTRKPSKPPRPPKGPLLSANDQKLMREITELAMRKRARIERMKTLRRLKAAKSSSPCSSIFAMIVTVIFFVFLIFQGFFTSNASLNSDNSPAPNNSANNRMVSVQFYNEFAPRERIDPSPTTSFRYKRVSGADNEENTREVTR

SEQ ID NO: 29152 - protein, 170 aa, Arabidopsis thaliana
  peptide (1)..(170): Ceres Seq. ID no. 12334941
  misc_feature (25)..(167): Homolog of NCBI NO: 15228970 NR Description: hypothetical protein
  misc_feature (1)..(106): Homolog of NCBI NO: 30678287 NR Description: expressed protein [Arabidopsis thaliana]
  misc_feature (1)..(170): Homolog of NCBI NO: 25372617 NR Description: T6A9.7 protein - Arabidopsis thaliana
  misc_feature (1)..(170): Homolog of NCBI NO: 15235188 NR Description: PITSLRE protein kinase family
MGEGKRRERSSQSLDLSDMKFDNDKFKKTRKPSKPPRPPKGPLLSANDQKLMREITELAMRKRARIERMKTLRRLKAAKSSSPCSSIFAMIVTVIFFVFLIFQGFFTSNASLNSDNSPAPNNSANNRMVSVQFYNEFAPRERIDPSPTTSFRYKRVSGADNEENTREVTR

SEQ ID NO: 29153 - protein, 152 aa, Arabidopsis thaliana
  peptide (1)..(152): Ceres Seq. ID no. 12334942
  misc_feature (7)..(149): Homolog of NCBI NO: 15228970 NR Description: hypothetical protein
  misc_feature (1)..(88): Homolog of NCBI NO: 30678287 NR Description: expressed protein [Arabidopsis thaliana]
  misc_feature (1)..(152): Homolog of NCBI NO: 25372617 NR Description: T6A9.7 protein - Arabidopsis thaliana
  misc_feature (1)..(152): Homolog of NCBI NO: 15235188 NR Description: PITSLRE protein kinase family
MKFDNDKFKKTRKPSKPPRPPKGPLLSANDQKLMREITELAMRKRARIERMKTLRRLKAAKSSSPCSSIFAMIVTVIFFVFLIFQGFFTSNASLNSDNSPAPNNSANNRMVSVQFYNEFAPRERIDPSPTTSFRYKRVSGADNEENTREVTR

SEQ ID NO: 29154 - DNA, 1856 bp, Arabidopsis thaliana
  misc_feature (1)..(1856): Ceres Seq. ID no. 13490623
  misc_feature: MA Experiment ID: 108434 Result: Down-regulated in Transcription
  misc_feature: MA Experiment 108434 PARAMETER Experiment Name: At_Root_Tips_cDNA_P Parameter: Tissue Value: Root Tips
  misc_feature: MA Experiment ID: 108573 Result: Up-regulated in Transcription
  misc_feature: MA Experiment 108573 PARAMETER Experiment Name: At_Drought_cDNA_P Parameter: Timepoint (hr) Value: 6
  misc_feature: MA Experiment 108573 PARAMETER Experiment Name: At_Drought_cDNA_P Parameter: Tissue Value: Aerial
  misc_feature: MA Experiment 108573 PARAMETER Experiment Name: At_Drought_cDNA_P Parameter: Treatment Value: Drought vs. No Drought
  misc_feature: MA Experiment ID: 108585 Result: Up-regulated in Transcription
  misc_feature: MA Experiment 108585 PARAMETER Experiment Name: At_5mM_NaNP_cDNA_P Parameter: Timepoint (hr) Value: 6
  misc_feature: MA Experiment 108585 PARAMETER Experiment Name: At_5mM_NaNP_cDNA_P Parameter: Tissue Value: Aerial
  misc_feature: MA Experiment 108585 PARAMETER Experiment Name: At_5mM_NaNP_cDNA_P Parameter: Treatment Value: null
  misc_feature: MA Experiment ID: 108668 Result: Up-regulated in Transcription
  misc_feature: MA Experiment 108668 PARAMETER Experiment Name: At_2mM_SA_cDNA_P Parameter: Plant Line Value: WS
  misc_feature: MA Experiment 108668 PARAMETER Experiment Name: At_2mM_SA_cDNA_P Parameter: Timepoint (hr) Value: 6
  misc_feature: MA Experiment 108668 PARAMETER Experiment Name: At_2mM_SA_cDNA_P Parameter: Treatment Value: 2mM SA vs. No Treatment
  misc_feature: MA Experiment ID: 20000111 Result: Down-regulated in Transcription
  misc_feature: MA Experiment 20000111 PARAMETER Experiment Name: At_42deg_Heat_cDNA_P Parameter: Temperature (deg C) Value: 42 vs. 22
  misc_feature: MA Experiment 20000111 PARAMETER Experiment Name: At_42deg_Heat_cDNA_P Parameter: Timepoint (hr) Value: 6
  misc_feature: MA Experiment 20000111 PARAMETER Experiment Name: At_42deg_Heat_cDNA_P Parameter: Tissue Value: Aerial
  misc_feature: MA Experiment ID: 20000182 Result: Up-regulated in Transcription
  misc_feature: MA Experiment 20000182 PARAMETER Experiment Name: At_2mM_SA_P Parameter: Age (day) Value: 14
  misc_feature: MA Experiment 20000182 PARAMETER Experiment Name: At_2mM_SA_P Parameter: Organism Value: A. thaliana
  misc_feature: MA Experiment 20000182 PARAMETER Experiment Name: At_2mM_SA_P Parameter: Plant Line Value: WS
  misc_feature: MA Experiment 20000182 PARAMETER Experiment Name: At_2mM_SA_P Parameter: Timepoint (hr) Value: 6
  misc_feature: MA Experiment 20000182 PARAMETER Experiment Name: At_2mM_SA_P Parameter: Tissue Value: Aerial
  misc_feature: MA Experiment 20000182 PARAMETER Experiment Name: At_2mM_SA_P Parameter: Treatment Value: 2mM SA vs. No Treatment
  misc_feature: MA Experiment ID: 20000227 Result: Down-regulated in Transcription
  misc_feature: MA Experiment 20000227 PARAMETER Experiment Name: At_Root-Tips-vs-Tops_P Parameter: Tissue Value: Root Tips vs. Root Tops
  misc_feature: MA Experiment ID: 20000265 Result: Down-regulated in Transcription
  misc_feature: MA Experiment 20000265 PARAMETER Experiment Name: At_Open_Flower_P Parameter: Age (day) Value: 21
  misc_feature: MA Experiment 20000265 PARAMETER Experiment Name: At_Open_Flower_P Parameter: Plant Line Value: WS
  misc_feature: MA Experiment 20000265 PARAMETER Experiment Name: At_Open_Flower_P Parameter: Tissue Value: Closed Flower vs. Whole Plant
  misc_feature: MA Experiment ID: 20000286 Result: Down-regulated in Transcription
  misc_feature: MA Experiment 20000286 PARAMETER Experiment Name: At_Open_Flower_P Parameter: Age (day) Value: 21
  misc_feature: MA Experiment 20000286 PARAMETER Experiment Name: At_Open_Flower_P Parameter: Plant Line Value: WS
  misc_feature: MA Experiment 20000286 PARAMETER Experiment Name: At_Open_Flower_P Parameter: Tissue Value: Half Open vs. Whole Plant
  misc_feature: MA Experiment ID: 20000495 Result: Down-regulated in Transcription
  misc_feature: MA Experiment 20000495 PARAMETER Experiment Name: At_Guard_Cells_P Parameter: Harvest Date Value: 8/2/2002
  misc_feature: MA Experiment 20000495 PARAMETER Experiment Name: At_Guard_Cells_P Parameter: Organism Value: A. thaliana
  misc_feature: MA Experiment 20000495 PARAMETER Experiment Name: At_Guard_Cells_P Parameter: Tissue Value: Guard Cells vs. Leaves
  misc_feature: MA Experiment ID: 20001905 Result: Up-regulated in Transcription
  misc_feature: MA Experiment 20001905 PARAMETER Experiment Name: At_Drought_Reproduction_P Parameter: Age (day) Value: 40
  misc_feature: MA Experiment 20001905 PARAMETER Experiment Name: At_Drought_Reproduction_P Parameter: Organism Value: A. thaliana
  misc_feature: MA Experiment 20001905 PARAMETER Experiment Name: At_Drought_Reproduction_P Parameter: Plant Line Value: WS
  misc_feature: MA Experiment 20001905 PARAMETER Experiment Name: At_Drought_Reproduction_P Parameter: Timepoint (day) Value: 10
  misc_feature: MA Experiment 20001905 PARAMETER Experiment Name: At_Drought_Reproduction_P Parameter: Tissue Value: Rosettes
  misc_feature: MA Experiment 20001905 PARAMETER Experiment Name: At_Drought_Reproduction_P Parameter: Treatment Value: Drought vs. No Drought
atgactcagtcttctctctctcttctctcaatgcccatgataacaccaaaccacttgcttctgcttctcacaccacaaaattctctattcaataaataaatctctcagaagaaatttcttcgaattggagaagataaaaaaagttttatcttttcttgattttttttcttttttttctaatcattcacacccaatttaaacgagacttgtccaatctctatccatcaatattgtatcatttcttgtaaagtactctgttttagcttcacacgccattttttgtttttccatttgacttctgtaaaatcctgacaaagaattgtttaagacatacatatacgtgttatatatttgtaaaggaagcaaaaagtgtttggcttttaatttctctctgttgggatgggtctttgttggggatctccatctgattctcctccaacaacaacaccttcctctactggtaacatcagttcagtagggacttttaagtcatcaaacaacacgacgactacaggaacatcaaggggaagtaacatatctagcaatagtgggttctctgtggcaagtggtgaagatgcttaccccgatggtcagatacttcccattccgaatttgaggatattcagcttagcagaacttagagcttcaacaaggaatttcaggtctgagaatgttcttggagagggaggatttgggaaagtctttaaaggctggcttgaagacaagactccagggaaacaaagcaacggaactgtgattgctgttaagaaactgaatgcagaaagcttccaaggattcgaagaatggcaatgtgaagtgaattttcttgggagggtttctcatccaaacctcgtgaagctgttgggatactgcttggaaggtgaagagttgcttcttgtgtatgagtatatgcaaaaagggagcttagagaatcatctcttccgaaaggggtctgccgttcagccactctcatgggagataaggcttaagattgcaataggagcagctaaaggcttagcattcttacacgcttcagagaagcaagtaatttatcgagacttcaaagcgtcaaacattctacttgatgggtcatataacgcaaagatatcagattttggattggcgaaattaggaccttccgctagtcaatctcacatcacaacacgggttatgggtacacacggttacgcagctccagagtatgttgctacaggtcacttgtatgtaaagagcgatgtttacgggtttggcgttgttttggctgagatcttaactggtttacatgcgcttgatcctactcgtcctaccgggcaacacaatctaaccgaatggatcaaacctcatctatccgaaagaagaaagctaagaagcataatggaccctcgtctagaaggaaaataccctttcaaatctgctttccgagtagctcaactggctctgaaatgccttggacccgaacccaaaaaccgtccatcgatgaaagaagtggtggaatcgctcgaactcatcgaagctgccaatgagaaaccgttagaacgaaggaccactagagcttccccatccatccgtcaacaacaaggccattatcgcccgcaacaactctcttcgtttcgtcctagacaaaacgtgtctcgagctcactagtgttgtttgaagacactgagattcttttcttagttttgtatttgttaagattatcaaaacccattcgtatgtatactacatgaaagagaaaacaaatgttgtacctgtattagtatgtagtgtttggtgtgtgtaatataactacttaaacggttaaaccagattatgaaaaggtttaactaatggtcatcaatatataagccattgttcac

SEQ ID NO: 29155 - protein, 414 aa, Arabidopsis thaliana
  peptide (1)..(414): Ceres Seq. ID no. 13490624
  misc_feature (74)..(398): Homolog of NCBI NO: 30699159 NR Description: protein kinase, putative [Arabidopsis thaliana]
  misc_feature (31)..(371): Homolog of NCBI NO: 34906046 NR Description: putative serine/threonine-specific protein kinase
  misc_feature (62)..(398): Homolog of NCBI NO: 25287650 NR Description: hypothetical protein F15M4.14 [imported] -
  misc_feature (1)..(397): Homolog of NCBI NO: 30690422 NR Description: protein kinase family [Arabidopsis thaliana]
  misc_feature (1)..(397): Homolog of NCBI NO: 25287611 NR Description: protein kinase-like protein [imported] -
  misc_feature (38)..(398): Homolog of NCBI NO: 20503002 NR Description: Putative protein kinase [Oryza sativa (japonica
  misc_feature (7)..(407): Homolog of NCBI NO: 38345396 NR Description: OSJNBa0017B10.2 [Oryza sativa (japonica
  misc_feature (1)..(414): Homolog of NCBI NO: 21537344 NR Description: putative protein kinase [Arabidopsis thaliana]
  misc_feature (1)..(414): Homolog of NCBI NO: 25287605 NR Description: probable protein kinase [imported] - Arabidopsis
  misc_feature (1)..(414): Homolog of NCBI NO: 18398350 NR Description: protein kinase -related [Arabidopsis thaliana]
MGLCWGSPSDSPPTTTPSSTGNISSVGTFKSSNNTTTTGTSRGSNISSNSGFSVASGEDAYPDGQILPIPNLRIFSLAELRASTRNFRSENVLGEGGFGKVFKGWLEDKTPGKQSNGTVIAVKKLNAESFQGFEEWQCEVNFLGRVSHPNLVKLLGYCLEGEELLLVYEYMQKGSLENHLFRKGSAVQPLSWEIRLKIAIGAAKGLAFLHASEKQVIYRDFKASNILLDGSYNAKISDFGLAKLGPSASQSHITTRVMGTHGYAAPEYVATGHLYVKSDVYGFGVVLAEILTGLHALDPTRPTGQHNLTEWIKPHLSERRKLRSIMDPRLEGKYPFKSAFRVAQLALKCLGPEPKNRPSMKEVVESLELIEAANEKPLERRTTRASPSIRQQQGHYRPQQLSSFRPRQNVSRAH

SEQ ID NO: 29156 - protein, 244 aa, Arabidopsis thaliana
  peptide (1)..(244): Ceres Seq. ID no. 13490625
  misc_feature (1)..(228): Homolog of NCBI NO: 30699159 NR Description: protein kinase, putative [Arabidopsis thaliana]
  misc_feature (1)..(201): Homolog of NCBI NO: 34906046 NR Description: putative serine/threonine-specific protein kinase
  misc_feature (1)..(228): Homolog of NCBI NO: 25287650 NR Description: hypothetical protein F15M4.14 [imported] -
  misc_feature (1)..(227): Homolog of NCBI NO: 30690422 NR Description: protein kinase family [Arabidopsis thaliana]
  misc_feature (1)..(227): Homolog of NCBI NO: 25287611 NR Description: protein kinase-like protein [imported] -
  misc_feature (1)..(228): Homolog of NCBI NO: 20503002 NR Description: Putative protein kinase [Oryza sativa (japonica
  misc_feature (1)..(237): Homolog of NCBI NO: 38345396 NR Description: OSJNBa0017B10.2 [Oryza sativa (japonica
  misc_feature (1)..(244): Homolog of NCBI NO: 21537344 NR Description: putative protein kinase [Arabidopsis thaliana]
  misc_feature (1)..(244): Homolog of NCBI NO: 25287605 NR Description: probable protein kinase [imported] - Arabidopsis
  misc_feature (1)..(244): Homolog of NCBI NO: 18398350 NR Description: protein kinase -related [Arabidopsis thaliana]
MQKGSLENHLFRKGSAVQPLSWEIRLKIAIGAAKGLAFLHASEKQVIYRDFKASNILLDGSYNAKISDFGLAKLGPSASQSHITTRVMGTHGYAAPEYVATGHLYVKSDVYGFGVVLAEILTGLHALDPTRPTGQHNLTEWIKPHLSERRKLRSIMDPRLEGKYPFKSAFRVAQLALKCLGPEPKNRPSMKEVVESLELIEAANEKPLERRTTRASPSIRQQQGHYRPQQLSSFRPRQNVSRAH

SEQ ID NO: 29157 - DNA, 2034 bp, Arabidopsis thaliana
  misc_feature (1)..(2034): Ceres Seq. ID no. 12324566
  misc_feature: MA Experiment ID: 108434 Result: Up-regulated in Transcription
  misc_feature: MA Experiment 108434 PARAMETER Experiment Name: At_Root_Tips_cDNA_P Parameter: Tissue Value: Root Tips
  misc_feature: MA Experiment ID: 108462 Result: Down-regulated in Transcription
  misc_feature: MA Experiment 108462 PARAMETER Experiment Name: At_Germinating_Seeds_cDNA_P Parameter: Age (day) Value: 2 vs. 0
  misc_feature: MA Experiment 108462 PARAMETER Experiment Name: At_Germinating_Seeds_cDNA_P Parameter: Tissue Value: Germinating Seeds
  misc_feature: MA Experiment ID: 108463 Result: Down-regulated in Transcription
  misc_feature: MA Experiment 108463 PARAMETER Experiment Name: At_Germinating_Seeds_cDNA_P Parameter: Age (day) Value: 3 vs. 0
  misc_feature: MA Experiment 108463 PARAMETER Experiment Name: At_Germinating_Seeds_cDNA_P Parameter: Tissue Value: Germinating Seeds
  misc_feature: MA Experiment ID: 108464 Result: Down-regulated in Transcription
  misc_feature: MA Experiment 108464 PARAMETER Experiment Name: At_Germinating_Seeds_cDNA_P Parameter: Age (day) Value: 4 vs. 0
  misc_feature: MA Experiment 108464 PARAMETER Experiment Name: At_Germinating_Seeds_cDNA_P Parameter: Tissue Value: Germinating Seeds
  misc_feature: MA Experiment ID: 108569 Result: Up-regulated in Transcription
  misc_feature: MA Experiment 108569 PARAMETER Experiment Name: At_0.001%_MeJA__cDNA_P Parameter: Timepoint (hr) Value: 6
  misc_feature: MA Experiment 108569 PARAMETER Experiment Name: At_0.001%_MeJA__cDNA_P Parameter: Tissue Value: Aerial
  misc_feature: MA Experiment 108569 PARAMETER Experiment Name: At_0.001%_MeJA__cDNA_P Parameter: Treatment Value: 0.001% MeJA vs. No Treatment
  misc_feature: MA Experiment ID: 108577 Result: Down-regulated in Transcription
  misc_feature: MA Experiment 108577 PARAMETER Experiment Name: At_42deg_Heat_cDNA_P Parameter: Temperature (deg C) Value: 42 vs. 22
  misc_feature: MA Experiment 108577 PARAMETER Experiment Name: At_42deg_Heat_cDNA_P Parameter: Timepoint (hr) Value: 6
  misc_feature: MA Experiment 108577 PARAMETER Experiment Name: At_42deg_Heat_cDNA_P Parameter: Tissue Value: Aerial
  misc_feature: MA Experiment ID: 108595 Result: Down-regulated in Transcription
  misc_feature: MA Experiment 108595 PARAMETER Experiment Name: At_Ler-pi_Ovule_cDNA_P Parameter: Plant Line Value: null
  misc_feature: MA Experiment ID: 108607 Result: Down-regulated in Transcription
  misc_feature: MA Experiment 108607 PARAMETER Experiment Name: At_100uM_ABA_cDNA_P Parameter: Timepoint (hr) Value: 4
  misc_feature: MA Experiment 108607 PARAMETER Experiment Name: At_100uM_ABA_cDNA_P Parameter: Tissue Value: Aerial
  misc_feature: MA Experiment 108607 PARAMETER Experiment Name: At_100uM_ABA_cDNA_P Parameter: Treatment Value: 100uM ABA vs. No Treatment
  misc_feature: MA Experiment ID: 108608 Result: Down-regulated in Transcription
  misc_feature: MA Experiment 108608 PARAMETER Experiment Name: At_100uM_ABA_cDNA_P Parameter: Timepoint (hr) Value: 1
  misc_feature: MA Experiment 108608 PARAMETER Experiment Name: At_100uM_ABA_cDNA_P Parameter: Tissue Value: Aerial
  misc_feature: MA Experiment 108608 PARAMETER Experiment Name: At_100uM_ABA_cDNA_P Parameter: Treatment Value: 100uM ABA vs. No Treatment
  misc_feature: MA Experiment ID: 20000072 Result: Up-regulated in Transcription
  misc_feature: MA Experiment 20000072 PARAMETER Experiment Name: At_100uM_ABA_Mutants_cDNA_P Parameter: Plant Line Value: CS8105
  misc_feature: MA Experiment 20000072 PARAMETER Experiment Name: At_100uM_ABA_Mutants_cDNA_P Parameter: Timepoint (hr) Value: 6
  misc_feature: MA Experiment 20000072 PARAMETER Experiment Name: At_100uM_ABA_Mutants_cDNA_P Parameter: Tissue Value: Aerial
  misc_feature: MA Experiment 20000072 PARAMETER Experiment Name: At_100uM_ABA_Mutants_cDNA_P Parameter: Treatment Value: 100uM ABA vs. No Treatment
  misc_feature: MA Experiment ID: 20000088 Result: Up-regulated in Transcription
  misc_feature: MA Experiment 20000088 PARAMETER Experiment Name: At_100uM_ABA_Mutants_cDNA_P Parameter: Plant Line Value: Landsberg
  misc_feature: MA Experiment 20000088 PARAMETER Experiment Name: At_100uM_ABA_Mutants_cDNA_P Parameter: Timepoint (hr) Value: 6
  misc_feature: MA Experiment 20000088 PARAMETER Experiment Name: At_100uM_ABA_Mutants_cDNA_P Parameter: Tissue Value: Aerial
  misc_feature: MA Experiment 20000088 PARAMETER Experiment Name: At_100uM_ABA_Mutants_cDNA_P Parameter: Treatment Value: 100uM ABA vs. No Treatment
  misc_feature: MA Experiment ID: 20000089 Result: Up-regulated in Transcription
  misc_feature: MA Experiment ID: 20000090 Result: Up-regulated in Transcription
  misc_feature: MA Experiment ID: 20000111 Result: Down-regulated in Transcription
  misc_feature: MA Experiment 20000111 PARAMETER Experiment Name: At_42deg_Heat_cDNA_P Parameter: Temperature (deg C) Value: 42 vs. 22
  misc_feature: MA Experiment 20000111 PARAMETER Experiment Name: At_42deg_Heat_cDNA_P Parameter: Timepoint (hr) Value: 6
  misc_feature: MA Experiment 20000111 PARAMETER Experiment Name: At_42deg_Heat_cDNA_P Parameter: Tissue Value: Aerial
  misc_feature: MA Experiment ID: 20000112 Result: Down-regulated in Transcription
  misc_feature: MA Experiment 20000112 PARAMETER Experiment Name: At_42deg_Heat_cDNA_P Parameter: Temperature (deg C) Value: 42 vs. 22
  misc_feature: MA Experiment 20000112 PARAMETER Experiment Name: At_42deg_Heat_cDNA_P Parameter: Timepoint (hr) Value: 2
  misc_feature: MA Experiment 20000112 PARAMETER Experiment Name: At_42deg_Heat_cDNA_P Parameter: Tissue Value: Aerial
  misc_feature: MA Experiment ID: 20000113 Result: Down-regulated in Transcription
  misc_feature: MA Experiment 20000113 PARAMETER Experiment Name: At_42deg_Heat_cDNA_P Parameter: Temperature (deg C) Value: 42 vs. 22
  misc_feature: MA Experiment 20000113 PARAMETER Experiment Name: At_42deg_Heat_cDNA_P Parameter: Timepoint (hr) Value: 8
  misc_feature: MA Experiment 20000113 PARAMETER Experiment Name: At_42deg_Heat_cDNA_P Parameter: Tissue Value: Aerial
  misc_feature: MA Experiment ID: 20000144 Result: Down-regulated in Transcription
  misc_feature: MA Experiment 20000144 PARAMETER Experiment Name: At_42deg_Heat_cDNA_P Parameter: Temperature (deg C) Value: 42 vs. 22
  misc_feature: MA Experiment 20000144 PARAMETER Experiment Name: At_42deg_Heat_cDNA_P Parameter: Timepoint (hr) Value: 1
  misc_feature: MA Experiment 20000144 PARAMETER Experiment Name: At_42deg_Heat_cDNA_P Parameter: Tissue Value: Aerial
  misc_feature: MA Experiment ID: 20000268 Result: Down-regulated in Transcription
  misc_feature: MA Experiment 20000268 PARAMETER Experiment Name: At_100mM_NaCl__P Parameter: Age (day) Value: 14
  misc_feature: MA Experiment 20000268 PARAMETER Experiment Name: At_100mM_NaCl__P Parameter: Organism Value: A. thaliana
  misc_feature: MA Experiment 20000268 PARAMETER Experiment Name: At_100mM_NaCl__P Parameter: Plant Line Value: WS
  misc_feature: MA Experiment 20000268 PARAMETER Experiment Name: At_100mM_NaCl__P Parameter: Timepoint (hr) Value: 6
  misc_feature: MA Experiment 20000268 PARAMETER Experiment Name: At_100mM_NaCl__P Parameter: Tissue Value: Whole Plant
  misc_feature: MA Experiment 20000268 PARAMETER Experiment Name: At_100mM_NaCl__P Parameter: Treatment Value: 100mM NaCl vs. No Treatment
  misc_feature: MA Experiment ID: 20000436 Result: Down-regulated in Transcription
  misc_feature: MA Experiment 20000436 PARAMETER Experiment Name: At_Drought_P Parameter: Age (day) Value: 7
  misc_feature: MA Experiment 20000436 PARAMETER Experiment Name: At_Drought_P Parameter: Organism Value: A. thaliana
  misc_feature: MA Experiment 20000436 PARAMETER Experiment Name: At_Drought_P Parameter: Plant Line Value: WS
  misc_feature: MA Experiment 20000436 PARAMETER Experiment Name: At_Drought_P Parameter: Timepoint (hr) Value: 12
  misc_feature: MA Experiment 20000436 PARAMETER Experiment Name: At_Drought_P Parameter: Tissue Value: Whole Plant
  misc_feature: MA Experiment 20000436 PARAMETER Experiment Name: At_Drought_P Parameter: Treatment Value: Drought vs. No Drought
  misc_feature: MA Experiment ID: 20000437 Result: Down-regulated in Transcription
  misc_feature: MA Experiment 20000437 PARAMETER Experiment Name: At_Drought_P Parameter: Age (day) Value: 8
  misc_feature: MA Experiment 20000437 PARAMETER Experiment Name: At_Drought_P Parameter: Organism Value: A. thaliana
  misc_feature: MA Experiment 20000437 PARAMETER Experiment Name: At_Drought_P Parameter: Plant Line Value: WS
  misc_feature: MA Experiment 20000437 PARAMETER Experiment Name: At_Drought_P Parameter: Timepoint (hr) Value: 24
  misc_feature: MA Experiment 20000437 PARAMETER Experiment Name: At_Drought_P Parameter: Tissue Value: Whole Plant
  misc_feature: MA Experiment 20000437 PARAMETER Experiment Name: At_Drought_P Parameter: Treatment Value: Drought vs. No Drought
  misc_feature: MA Experiment ID: 20000438 Result: Down-regulated in Transcription
  misc_feature: MA Experiment 20000438 PARAMETER Experiment Name: At_Shoots__P Parameter: Age (day) Value: 14
  misc_feature: MA Experiment 20000438 PARAMETER Experiment Name: At_Shoots__P Parameter: Tissue Value: Shoots vs. Whole Plant
  misc_feature: MA Experiment ID: 20000455 Result: Down-regulated in Transcription
  misc_feature: MA Experiment 20000455 PARAMETER Experiment Name: At_100uM_ABA_P Parameter: Age (day) Value: 16
  misc_feature: MA Experiment 20000455 PARAMETER Experiment Name: At_100uM_ABA_P Parameter: Organism Value: A. thaliana
  misc_feature: MA Experiment 20000455 PARAMETER Experiment Name: At_100uM_ABA_P Parameter: Plant Line Value: WS
  misc_feature: MA Experiment 20000455 PARAMETER Experiment Name: At_100uM_ABA_P Parameter: Timepoint (hr) Value: 48
  misc_feature: MA Experiment 20000455 PARAMETER Experiment Name: At_100uM_ABA_P Parameter: Tissue Value: Aerial
  misc_feature: MA Experiment 20000455 PARAMETER Experiment Name: At_100uM_ABA_P Parameter: Treatment Value: 100uM ABA vs. No Treatment
  misc_feature: MA Experiment ID: 20000527 Result: Down-regulated in Transcription
  misc_feature: MA Experiment 20000527 PARAMETER Experiment Name: At_10percent_PEG_P Parameter: Age (day) Value: 20
  misc_feature: MA Experiment 20000527 PARAMETER Experiment Name: At_10percent_PEG_P Parameter: Organism Value: A. thaliana
  misc_feature: MA Experiment 20000527 PARAMETER Experiment Name: At_10percent_PEG_P Parameter: Plant Line Value: WS
  misc_feature: MA Experiment 20000527 PARAMETER Experiment Name: At_10percent_PEG_P Parameter: Timepoint (day) Value: 20
  misc_feature: MA Experiment 20000527 PARAMETER Experiment Name: At_10percent_PEG_P Parameter: Tissue Value: Whole Plant
  misc_feature: MA Experiment 20000527 PARAMETER Experiment Name: At_10percent_PEG_P Parameter: Treatment Value: 10percent PEG vs. No Treatment
  misc_feature: MA Experiment ID: 20001248 Result: Up-regulated in Transcription
  misc_feature: MA Experiment 20001248 PARAMETER Experiment Name: At_Far-red-induction_P Parameter: Age (day) Value: 7
  misc_feature: MA Experiment 20001248 PARAMETER Experiment Name: At_Far-red-induction_P Parameter: Light Value: Far-red vs. White
  misc_feature: MA Experiment 20001248 PARAMETER Experiment Name: At_Far-red-induction_P Parameter: Organism Value: A. thaliana
  misc_feature: MA Experiment 20001248 PARAMETER Experiment Name: At_Far-red-induction_P Parameter: Plant Line Value: Columbia
  misc_feature: MA Experiment 20001248 PARAMETER Experiment Name: At_Far-red-induction_P Parameter: Timepoint (hr) Value: 4
  misc_feature: MA Experiment 20001248 PARAMETER Experiment Name: At_Far-red-induction_P Parameter: Tissue Value: Whole Plant
  misc_feature: MA Experiment ID: 20001905 Result: Down-regulated in Transcription
  misc_feature: MA Experiment 20001905 PARAMETER Experiment Name: At_Drought_Reproduction_P Parameter: Age (day) Value: 40
  misc_feature: MA Experiment 20001905 PARAMETER Experiment Name: At_Drought_Reproduction_P Parameter: Organism Value: A. thaliana
  misc_feature: MA Experiment 20001905 PARAMETER Experiment Name: At_Drought_Reproduction_P Parameter: Plant Line Value: WS
  misc_feature: MA Experiment 20001905 PARAMETER Experiment Name: At_Drought_Reproduction_P Parameter: Timepoint (day) Value: 10
  misc_feature: MA Experiment 20001905 PARAMETER Experiment Name: At_Drought_Reproduction_P Parameter: Tissue Value: Rosettes
  misc_feature: MA Experiment 20001905 PARAMETER Experiment Name: At_Drought_Reproduction_P Parameter: Treatment Value: Drought vs. No Drought
  misc_feature: MA Experiment ID: 20001906 Result: Down-regulated in Transcription
  misc_feature: MA Experiment 20001906 PARAMETER Experiment Name: At_Drought_Reproduction_P Parameter: Age (day) Value: 35
  misc_feature: MA Experiment 20001906 PARAMETER Experiment Name: At_Drought_Reproduction_P Parameter: Organism Value: A. thaliana
  misc_feature: MA Experiment 20001906 PARAMETER Experiment Name: At_Drought_Reproduction_P Parameter: Plant Line Value: WS
  misc_feature: MA Experiment 20001906 PARAMETER Experiment Name: At_Drought_Reproduction_P Parameter: Timepoint (day) Value: 5
  misc_feature: MA Experiment 20001906 PARAMETER Experiment Name: At_Drought_Reproduction_P Parameter: Tissue Value: Siliques
  misc_feature: MA Experiment 20001906 PARAMETER Experiment Name: At_Drought_Reproduction_P Parameter: Treatment Value: Drought vs. No Drought
  misc_feature: MA Experiment ID: 20001908 Result: Down-regulated in Transcription
  misc_feature: MA Experiment 20001908 PARAMETER Experiment Name: At_Drought_Reproduction_P Parameter: Age (day) Value: 40
  misc_feature: MA Experiment 20001908 PARAMETER Experiment Name: At_Drought_Reproduction_P Parameter: Organism Value: A. thaliana
  misc_feature: MA Experiment 20001908 PARAMETER Experiment Name: At_Drought_Reproduction_P Parameter: Plant Line Value: WS
  misc_feature: MA Experiment 20001908 PARAMETER Experiment Name: At_Drought_Reproduction_P Parameter: Timepoint (day) Value: 10
  misc_feature: MA Experiment 20001908 PARAMETER Experiment Name: At_Drought_Reproduction_P Parameter: Tissue Value: Siliques
  misc_feature: MA Experiment 20001908 PARAMETER Experiment Name: At_Drought_Reproduction_P Parameter: Treatment Value: Drought vs. No Drought
  misc_feature: MA Experiment ID: 20001911 Result: Down-regulated in Transcription
  misc_feature: MA Experiment 20001911 PARAMETER Experiment Name: At_Drought_Reproduction_P Parameter: Age (day) Value: 40
  misc_feature: MA Experiment 20001911 PARAMETER Experiment Name: At_Drought_Reproduction_P Parameter: Organism Value: A. thaliana
  misc_feature: MA Experiment 20001911 PARAMETER Experiment Name: At_Drought_Reproduction_P Parameter: Plant Line Value: WS
  misc_feature: MA Experiment 20001911 PARAMETER Experiment Name: At_Drought_Reproduction_P Parameter: Timepoint (day) Value: 10
  misc_feature: MA Experiment 20001911 PARAMETER Experiment Name: At_Drought_Reproduction_P Parameter: Tissue Value: Flowers
  misc_feature: MA Experiment 20001911 PARAMETER Experiment Name: At_Drought_Reproduction_P Parameter: Treatment Value: Drought vs. No Drought
atcatcactcactagtgtcgaacaatggcaccatcaatgaaagaaattttttctaaagataatttcaagaaaaacaagaaacttgttttgctatccgccgccgtagctttgctcttcgtagccgccgtcgccggaatctctgccggagcttcaaaagccaacgaaaaacgaactctatccccgtcgtctcacgccgtgctaagatcctcatgcagctccacgcgttaccctgagctctgtatctctgccgtggtaactgccggcggcgtcgagctaacgtcgcaaaaagatgtcatcgaggcatcggtgaacctaacaataaccgccgtggagcacaattacttcaccgtgaagaagctgatcaagaagaggaaaggactgacgccgcgcgagaagacggcgcttcatgactgtttggagactattgatgagacgctggacgagctccatgaaacggtggaagatctccatttgtatccaaccaaaaaaactctccgggaacacgccggagatctcaaaacactaattagctccgccattaccaaccaggagacttgtctcgacggcttctctcatgacgacgccgataagcaagttcgtaaagccttgttgaaggggcagatacacgtagagcacatgtgcagcaacgctctagcaatgatcaagaacatgactgatactgacatagccaacttcgagcaaaaagctaaaataacctcaaacaaccgtaagctcaaggaggagaatcaggaaactacggtggctgtagatatcgccggagccggagaactagactcggagggatggccaacttggttatccgctggagataggaggcttcttcagggttcaggtgtgaaagctgacgccaccgtggcagctgacggtagcggtacatttaaaactgtggctgctgcggttgccgcggcccctgaaaatagtaataagaggtatgtgatacatataaaagccggagtttacagagagaatgtggaggttgctaagaagaaaaagaatataatgtttatgggagatggtcggacgagaactattatcaccggaagtcgaaacgttgtagacggtagcaccactttccactccgccaccgttgctgctgtcggcgagagattcttagctcgtgacatcactttccaaaacacggcgggtccgtcgaagcaccaagcggtggctctccgtgtgggttctgatttctccgccttctacaattgcgacatgttagcttatcaagacactctatacgtccactctaaccgtcaattcttcgtcaaatgtctcatcgccggaaccgttgacttcatcttcggaaacgccgccgtcgtgctccaagactgtgacatccacgctcgccgccctaattccggtcagaaaaacatggtcacagctcagggaagaacggatcctaaccagaacacagggatcgttatccagaaatgtaggatcggtgccacgtcggatttacagtcggtgaaaggtagttttccgacgtacttgggtcggccatggaaggaatattcacaaacggtgataatgcagtcggctatctccgacgtgatccgacccgaagggtggtccgagtggaccgggacttttgcgttgaacactctgacttacagagagtattcgaacacaggagcaggggctggaactgcaaatagagtgaagtggaggggctttaaggtaattacggctgctgctgaagctcaaaaatatacggctggtcagtttattggtggtggaggctggttatcgtcgaccggtttccccttctcgctcggtctttgagagattgttgtgtaatgtgttcctacgtattgttggctacaaaaattattgattaatattgtatgaagcaaatcgtgttgtcctctttgttttgtttgggttgtgtactttctctagatcatcgtagtattagaaacgagatgaaataatgcgggtttttgcgccttgagaatatggatttgagaaaggagggatgttgcctatttgatgatgatgcatgatggatgtcat

SEQ ID NO: 29158 - protein, 592 aa, Arabidopsis thaliana
  peptide (1)..(592): Ceres Seq. ID no. 12324567
  misc_feature (281)..(578): Pfam Name: Pectinesterase Pfam Description: Pectinesterase
  misc_feature (1)..(592): Homolog of NCBI NO: 24250746 NR Description: putative thermostable pectinesterase [Citrus
  misc_feature (29)..(223): Homolog of NCBI NO: 10441573 NR Description: putative pectin methylesterase 3 [Linum
  misc_feature (245)..(592): Homolog of NCBI NO: 10441573 NR Description: putative pectin methylesterase 3 [Linum
  misc_feature (205)..(592): Homolog of NCBI NO: 16604545 NR Description: AT3g14310/MLN21_9 [Arabidopsis thaliana]
  misc_feature (15)..(242): Homolog of NCBI NO: 9716271 NR Description: putative pectin methylesterase
  misc_feature (229)..(592): Homolog of NCBI NO: 9716271 NR Description: putative pectin methylesterase
  misc_feature (7)..(592): Homolog of NCBI NO: 2129667 NR Description: pectinesterase (EC 3.1.1.11) 2 precursor -
  misc_feature (1)..(592): Homolog of NCBI NO: 15220955 NR Description: pectin methylesterase (PMEU1), putative
  misc_feature (1)..(592): Homolog of NCBI NO: 2895510 NR Description: putative pectin methylesterase [Arabidopsis
  misc_feature (1)..(592): Homolog of NCBI NO: 15231828 NR Description: putative pectin methylesterase
MAPSMKEIFSKDNFKKNKKLVLLSAAVALLFVAAVAGISAGASKANEKRTLSPSSHAVLRSSCSSTRYPELCISAVVTAGGVELTSQKDVIEASVNLTITAVEHNYFTVKKLIKKRKGLTPREKTALHDCLETIDETLDELHETVEDLHLYPTKKTLREHAGDLKTLISSAITNQETCLDGFSHDDADKQVRKALLKGQIHVEHMCSNALAMIKNMTDTDIANFEQKAKITSNNRKLKEENQETTVAVDIAGAGELDSEGWPTWLSAGDRRLLQGSGVKADATVAADGSGTFKTVAAAVAAAPENSNKRYVIHIKAGVYRENVEVAKKKKNIMFMGDGRTRTIITGSRNVVDGSTTFHSATVAAVGERFLARDITFQNTAGPSKHQAVALRVGSDFSAFYNCDMLAYQDTLYVHSNRQFFVKCLIAGTVDFIFGNAAVVLQDCDIHARRPNSGQKNMVTAQGRTDPNQNTGIVIQKCRIGATSDLQSVKGSFPTYLGRPWKEYSQTVIMQSAISDVIRPEGWSEWTGTFALNTLTYREYSNTGAGAGTANRVKWRGFKVITAAAEAQKYTAGQFIGGGGWLSSTGFPFSLGL

SEQ ID NO: 29159 - protein, 588 aa, Arabidopsis thaliana
  peptide (1)..(588): Ceres Seq. ID no. 12324568
  misc_feature (277)..(574): Pfam Name: Pectinesterase Pfam Description: Pectinesterase
  misc_feature (1)..(588): Homolog of NCBI NO: 24250746 NR Description: putative thermostable pectinesterase [Citrus
  misc_feature (25)..(219): Homolog of NCBI NO: 10441573 NR Description: putative pectin methylesterase 3 [Linum
  misc_feature (241)..(588): Homolog of NCBI NO: 10441573 NR Description: putative pectin methylesterase 3 [Linum
  misc_feature (201)..(588): Homolog of NCBI NO: 16604545 NR Description: AT3g14310/MLN21_9 [Arabidopsis thaliana]
  misc_feature (11)..(238): Homolog of NCBI NO: 9716271 NR Description: putative pectin methylesterase
  misc_feature (225)..(588): Homolog of NCBI NO: 9716271 NR Description: putative pectin methylesterase
  misc_feature (3)..(588): Homolog of NCBI NO: 2129667 NR Description: pectinesterase (EC 3.1.1.11) 2 precursor -
  misc_feature (1)..(588): Homolog of NCBI NO: 15220955 NR Description: pectin methylesterase (PMEU1), putative
  misc_feature (1)..(588): Homolog of NCBI NO: 2895510 NR Description: putative pectin methylesterase [Arabidopsis
  misc_feature (1)..(588): Homolog of NCBI NO: 15231828 NR Description: putative pectin methylesterase
MKEIFSKDNFKKNKKLVLLSAAVALLFVAAVAGISAGASKANEKRTLSPSSHAVLRSSCSSTRYPELCISAVVTAGGVELTSQKDVIEASVNLTITAVEHNYFTVKKLIKKRKGLTPREKTALHDCLETIDETLDELHETVEDLHLYPTKKTLREHAGDLKTLISSAITNQETCLDGFSHDDADKQVRKALLKGQIHVEHMCSNALAMIKNMTDTDIANFEQKAKITSNNRKLKEENQETTVAVDIAGAGELDSEGWPTWLSAGDRRLLQGSGVKADATVAADGSGTFKTVAAAVAAAPENSNKRYVIHIKAGVYRENVEVAKKKKNIMFMGDGRTRTIITGSRNVVDGSTTFHSATVAAVGERFLARDITFQNTAGPSKHQAVALRVGSDFSAFYNCDMLAYQDTLYVHSNRQFFVKCLIAGTVDFIFGNAAVVLQDCDIHARRPNSGQKNMVTAQGRTDPNQNTGIVIQKCRIGATSDLQSVKGSFPTYLGRPWKEYSQTVIMQSAISDVIRPEGWSEWTGTFALNTLTYREYSNTGAGAGTANRVKWRGFKVITAAAEAQKYTAGQFIGGGGWLSSTGFPFSLGL

SEQ ID NO: 29160 - protein, 388 aa, Arabidopsis thaliana
  peptide (1)..(388): Ceres Seq. ID no. 12324569
  misc_feature (77)..(374): Pfam Name: Pectinesterase Pfam Description: Pectinesterase
  misc_feature (1)..(388): Homolog of NCBI NO: 24250746 NR Description: putative thermostable pectinesterase [Citrus
  misc_feature (1)..(19): Homolog of NCBI NO: 10441573 NR Description: putative pectin methylesterase 3 [Linum
  misc_feature (41)..(388): Homolog of NCBI NO: 10441573 NR Description: putative pectin methylesterase 3 [Linum
  misc_feature (1)..(388): Homolog of NCBI NO: 16604545 NR Description: AT3g14310/MLN21_9 [Arabidopsis thaliana]
  misc_feature (1)..(38): Homolog of NCBI NO: 9716271 NR Description: putative pectin methylesterase
  misc_feature (25)..(388): Homolog of NCBI NO: 9716271 NR Description: putative pectin methylesterase
  misc_feature (1)..(388): Homolog of NCBI NO: 2129667 NR Description: pectinesterase (EC 3.1.1.11) 2 precursor -
  misc_feature (1)..(388): Homolog of NCBI NO: 15220955 NR Description: pectin methylesterase (PMEU1), putative
  misc_feature (1)..(388): Homolog of NCBI NO: 2895510 NR Description: putative pectin methylesterase [Arabidopsis
  misc_feature (1)..(388): Homolog of NCBI NO: 15231828 NR Description: putative pectin methylesterase
MCSNALAMIKNMTDTDIANFEQKAKITSNNRKLKEENQETTVAVDIAGAGELDSEGWPTWLSAGDRRLLQGSGVKADATVAADGSGTFKTVAAAVAAAPENSNKRYVIHIKAGVYRENVEVAKKKKNIMFMGDGRTRTIITGSRNVVDGSTTFHSATVAAVGERFLARDITFQNTAGPSKHQAVALRVGSDFSAFYNCDMLAYQDTLYVHSNRQFFVKCLIAGTVDFIFGNAAVVLQDCDIHARRPNSGQKNMVTAQGRTDPNQNTGIVIQKCRIGATSDLQSVKGSFPTYLGRPWKEYSQTVIMQSAISDVIRPEGWSEWTGTFALNTLTYREYSNTGAGAGTANRVKWRGFKVITAAAEAQKYTAGQFIGGGGWLSSTGFPFSLGL

SEQ ID NO: 29161 - DNA, 1203 bp, Arabidopsis thaliana
  misc_feature (1)..(1203): Ceres Seq. ID no. 12334431
  misc_feature: MA Experiment ID: 108462 Result: Down-regulated in Transcription
  misc_feature: MA Experiment 108462 PARAMETER Experiment Name: At_Germinating_Seeds_cDNA_P Parameter: Age (day) Value: 2 vs. 0
  misc_feature: MA Experiment 108462 PARAMETER Experiment Name: At_Germinating_Seeds_cDNA_P Parameter: Tissue Value: Germinating Seeds
  misc_feature: MA Experiment ID: 108463 Result: Down-regulated in Transcription
  misc_feature: MA Experiment 108463 PARAMETER Experiment Name: At_Germinating_Seeds_cDNA_P Parameter: Age (day) Value: 3 vs. 0
  misc_feature: MA Experiment 108463 PARAMETER Experiment Name: At_Germinating_Seeds_cDNA_P Parameter: Tissue Value: Germinating Seeds
  misc_feature: MA Experiment ID: 108464 Result: Down-regulated in Transcription
  misc_feature: MA Experiment 108464 PARAMETER Experiment Name: At_Germinating_Seeds_cDNA_P Parameter: Age (day) Value: 4 vs. 0
  misc_feature: MA Experiment 108464 PARAMETER Experiment Name: At_Germinating_Seeds_cDNA_P Parameter: Tissue Value: Germinating Seeds
  misc_feature: MA Experiment ID: 108576 Result: Down-regulated in Transcription
  misc_feature: MA Experiment 108576 PARAMETER Experiment Name: At_42deg_Heat_cDNA_P Parameter: Temperature (deg C) Value: 42 vs. 22
  misc_feature: MA Experiment 108576 PARAMETER Experiment Name: At_42deg_Heat_cDNA_P Parameter: Timepoint (hr) Value: 1
  misc_feature: MA Experiment 108576 PARAMETER Experiment Name: At_42deg_Heat_cDNA_P Parameter: Tissue Value: Aerial
  misc_feature: MA Experiment ID: 108595 Result: Down-regulated in Transcription
  misc_feature: MA Experiment 108595 PARAMETER Experiment Name: At_Ler-pi_Ovule_cDNA_P Parameter: Plant Line Value: null
  misc_feature: MA Experiment ID: 20000184 Result: Up-regulated in Transcription
  misc_feature: MA Experiment 20000184 PARAMETER Experiment Name: At_Shoots__P Parameter: Age (day) Value: 7
  misc_feature: MA Experiment 20000184 PARAMETER Experiment Name: At_Shoots__P Parameter: Tissue Value: Shoots vs. Whole Plant
  misc_feature: MA Experiment ID: 20000185 Result: Down-regulated in Transcription
  misc_feature: MA Experiment 20000185 PARAMETER Experiment Name: At_Roots__P Parameter: Age (day) Value: 7 vs. 21
  misc_feature: MA Experiment 20000185 PARAMETER Experiment Name: At_Roots__P Parameter: Organism Value: A. thaliana
  misc_feature: MA Experiment 20000185 PARAMETER Experiment Name: At_Roots__P Parameter: Tissue Value: Roots vs. Whole Plant
  misc_feature: MA Experiment ID: 20000234 Result: Down-regulated in Transcription
  misc_feature: MA Experiment 20000234 PARAMETER Experiment Name: At_Siliques_P Parameter: Age (day) Value: 21
  misc_feature: MA Experiment 20000234 PARAMETER Experiment Name: At_Siliques_P Parameter: Organism Value: A. thaliana
  misc_feature: MA Experiment 20000234 PARAMETER Experiment Name: At_Siliques_P Parameter: Plant Line Value: WS
  misc_feature: MA Experiment 20000234 PARAMETER Experiment Name: At_Siliques_P Parameter: Tissue Value: Less Than 5mm Siliques vs. Whole Plant
  misc_feature: MA Experiment ID: 20000235 Result: Down-regulated in Transcription
  misc_feature: MA Experiment 20000235 PARAMETER Experiment Name: At_Siliques_P Parameter: Age (day) Value: 21
  misc_feature: MA Experiment 20000235 PARAMETER Experiment Name: At_Siliques_P Parameter: Organism Value: A. thaliana
  misc_feature: MA Experiment 20000235 PARAMETER Experiment Name: At_Siliques_P Parameter: Plant Line Value: WS
  misc_feature: MA Experiment 20000235 PARAMETER Experiment Name: At_Siliques_P Parameter: Tissue Value: 5-10mm Siliques vs. Whole Plant
  misc_feature: MA Experiment ID: 20000265 Result: Up-regulated in Transcription
  misc_feature: MA Experiment 20000265 PARAMETER Experiment Name: At_Open_Flower_P Parameter: Age (day) Value: 21
  misc_feature: MA Experiment 20000265 PARAMETER Experiment Name: At_Open_Flower_P Parameter: Plant Line Value: WS
  misc_feature: MA Experiment 20000265 PARAMETER Experiment Name: At_Open_Flower_P Parameter: Tissue Value: Closed Flower vs. Whole Plant
  misc_feature: MA Experiment ID: 20000438 Result: Up-regulated in Transcription
  misc_feature: MA Experiment 20000438 PARAMETER Experiment Name: At_Shoots__P Parameter: Age (day) Value: 14
  misc_feature: MA Experiment 20000438 PARAMETER Experiment Name: At_Shoots__P Parameter: Tissue Value: Shoots vs. Whole Plant
  misc_feature: MA Experiment ID: 20000439 Result: Down-regulated in Transcription
  misc_feature: MA Experiment 20000439 PARAMETER Experiment Name: At_Roots__P Parameter: Age (day) Value: 14 vs. 21
  misc_feature: MA Experiment 20000439 PARAMETER Experiment Name: At_Roots__P Parameter: Organism Value: A. thaliana
  misc_feature: MA Experiment 20000439 PARAMETER Experiment Name: At_Roots__P Parameter: Tissue Value: Roots vs. Whole Plant
  misc_feature: MA Experiment ID: 20001451 Result: Up-regulated in Transcription
  misc_feature: MA Experiment 20001451 PARAMETER Experiment Name: At_Far-red-induction_P Parameter: Age (day) Value: 7
  misc_feature: MA Experiment 20001451 PARAMETER Experiment Name: At_Far-red-induction_P Parameter: Light Value: Far-red vs. White
  misc_feature: MA Experiment 20001451 PARAMETER Experiment Name: At_Far-red-induction_P Parameter: Organism Value: A. thaliana
  misc_feature: MA Experiment 20001451 PARAMETER Experiment Name: At_Far-red-induction_P Parameter: Plant Line Value: Columbia
  misc_feature: MA Experiment 20001451 PARAMETER Experiment Name: At_Far-red-induction_P Parameter: Timepoint (hr) Value: 24
  misc_feature: MA Experiment 20001451 PARAMETER Experiment Name: At_Far-red-induction_P Parameter: Tissue Value: Whole Plant
  misc_feature: MA Experiment ID: 20001904 Result: Down-regulated in Transcription
  misc_feature: MA Experiment 20001904 PARAMETER Experiment Name: At_Drought_Reproduction_P Parameter: Age (day) Value: 37
  misc_feature: MA Experiment 20001904 PARAMETER Experiment Name: At_Drought_Reproduction_P Parameter: Organism Value: A. thaliana
  misc_feature: MA Experiment 20001904 PARAMETER Experiment Name: At_Drought_Reproduction_P Parameter: Plant Line Value: WS
  misc_feature: MA Experiment 20001904 PARAMETER Experiment Name: At_Drought_Reproduction_P Parameter: Timepoint (day) Value: 7
  misc_feature: MA Experiment 20001904 PARAMETER Experiment Name: At_Drought_Reproduction_P Parameter: Tissue Value: Rosettes
  misc_feature: MA Experiment 20001904 PARAMETER Experiment Name: At_Drought_Reproduction_P Parameter: Treatment Value: Drought vs. No Drought
  misc_feature: MA Experiment ID: 20001905 Result: Down-regulated in Transcription
  misc_feature: MA Experiment 20001905 PARAMETER Experiment Name: At_Drought_Reproduction_P Parameter: Age (day) Value: 40
  misc_feature: MA Experiment 20001905 PARAMETER Experiment Name: At_Drought_Reproduction_P Parameter: Organism Value: A. thaliana
  misc_feature: MA Experiment 20001905 PARAMETER Experiment Name: At_Drought_Reproduction_P Parameter: Plant Line Value: WS
  misc_feature: MA Experiment 20001905 PARAMETER Experiment Name: At_Drought_Reproduction_P Parameter: Timepoint (day) Value: 10
  misc_feature: MA Experiment 20001905 PARAMETER Experiment Name: At_Drought_Reproduction_P Parameter: Tissue Value: Rosettes
  misc_feature: MA Experiment 20001905 PARAMETER Experiment Name: At_Drought_Reproduction_P Parameter: Treatment Value: Drought vs. No Drought
  misc_feature: Phenotype: ROSETTE LEAVES Curled-Curled 5
  misc_feature: Phenotype: ROSETTE LEAVES Shape-Lanceolate
  misc_feature: Phenotype: ROSETTE LEAVES Shape-Lanceolate
  misc_feature: Phenotype: ROSETTE LEAVES Other
  misc_feature: Phenotype: ROSETTE LEAVES Other
  misc_feature: Phenotype: WHOLE PLANT Color-Dark Green
  misc_feature: Phenotype: INFLORESCENCE Flowering Time-Late Flowering
  misc_feature: Phenotype: SENESCENCE TIME Senescence Time-Late Senescence
  misc_feature: Phenotype: ROSETTE LEAVES Curled-Curled 5
  misc_feature: Phenotype: ROSETTE LEAVES Shape-Lanceolate
  misc_feature: Phenotype: ROSETTE LEAVES Shape-Lanceolate
  misc_feature: Phenotype: ROSETTE LEAVES Other
  misc_feature: Phenotype: ROSETTE LEAVES Other
  misc_feature: Phenotype: WHOLE PLANT Color-Dark Green
  misc_feature: Phenotype: INFLORESCENCE Flowering Time-Late Flowering
  misc_feature: Phenotype: SENESCENCE TIME Senescence Time-Late Senescence
  misc_feature: Phenotype: SILIQUES Length-Short
  misc_feature: Phenotype: SILIQUES Other
  misc_feature: Phenotype: FERTILITY Fertility-Reduced
  misc_feature: Phenotype: SENESCENCE TIME Senescence Time-Late Senescence
  misc_feature: Phenotype: ROSETTE LEAVES Curled-Curled 5
  misc_feature: Phenotype: ROSETTE LEAVES Shape-Lanceolate
  misc_feature: Phenotype: ROSETTE LEAVES Shape-Lanceolate
  misc_feature: Phenotype: ROSETTE LEAVES Other
  misc_feature: Phenotype: ROSETTE LEAVES Other
  misc_feature: Phenotype: WHOLE PLANT Color-Dark Green
  misc_feature: Phenotype: WHOLE PLANT Color-High Anthocyanin
  misc_feature: Phenotype: INFLORESCENCE Flowering Time-Late Flowering
  misc_feature: Phenotype: SENESCENCE TIME Senescence Time-Late Senescence
  misc_feature: Phenotype: SILIQUES Length-Short
  misc_feature: Phenotype: SILIQUES Other
  misc_feature: Phenotype: FERTILITY Fertility-Reduced
  misc_feature: Phenotype: SENESCENCE TIME Senescence Time-Late Senescence
  misc_feature: Phenotype: ROSETTE LEAVES Curled-Curled 5
  misc_feature: Phenotype: ROSETTE LEAVES Shape-Lanceolate
  misc_feature: Phenotype: ROSETTE LEAVES Shape-Lanceolate
  misc_feature: Phenotype: ROSETTE LEAVES Other
  misc_feature: Phenotype: ROSETTE LEAVES Other
  misc_feature: Phenotype: WHOLE PLANT Color-Dark Green
  misc_feature: Phenotype: WHOLE PLANT Color-High Anthocyanin
  misc_feature: Phenotype: INFLORESCENCE Flowering Time-Late Flowering
  misc_feature: Phenotype: SENESCENCE TIME Senescence Time-Late Senescence
  misc_feature: Phenotype: ROSETTE LEAVES Curled-Curled 5
  misc_feature: Phenotype: ROSETTE LEAVES Shape-Lanceolate
  misc_feature: Phenotype: ROSETTE LEAVES Shape-Lanceolate
  misc_feature: Phenotype: ROSETTE LEAVES Other
  misc_feature: Phenotype: ROSETTE LEAVES Other
  misc_feature: Phenotype: WHOLE PLANT Color-Dark Green
  misc_feature: Phenotype: INFLORESCENCE Flowering Time-Late Flowering
  misc_feature: Phenotype: INFLORESCENCE Height-Short
  misc_feature: Phenotype: FERTILITY Fertility-Sterile
  misc_feature: Phenotype: SENESCENCE TIME Senescence Time-Late Senescence
  misc_feature: Phenotype: SILIQUES Length-Short
  misc_feature: Phenotype: SILIQUES Other
  misc_feature: Phenotype: FERTILITY Fertility-Reduced
  misc_feature: Phenotype: SENESCENCE TIME Senescence Time-Late Senescence
agtgtctcttcatatttacataaatagatatctctctctctctctctctctaaaccacatcttcctctccaccgttctttctcttccttctctctctggacttcaacttctggagaagtacaagacatttataaagtactgctcatcacccaacactaaacacaattgtcaaaagggtgtggtggaaggagaatctacttctatctgaacatcgatcagtcatatcttttcaatcaaatcaaagccctcctctctctcttactccttttttgttttaaatcaagaaaaagactccatgtcgagcatgtccatgtcgtcctcctcagctccagcttttccaccggaccacttctcatctacggaccagctctgttacgtccattgcagcttctgcgacactgtccttgctgtgagtgttcctccgagtagtttgttcaagacggtgacggtcagatgcggccactgttcgaaccttttgtcggtgaccgtgagcatgagagctcttcttcttccatccgtttccaaccttggccattcctttttacctccccctcctcctcctcctcctccaaatcttttggaggaaatgcgaagcggagggcagaatataaacatgaacatgatgatgagccatcacgcttcagctcaccacccgaacgagcatttggttatggcgactcgcaacggaagatcagtggatcatctacaagagatgcctcggccaccaccagccaatagacccccagagaagcgacaaagagtaccatctgcatacaaccgattcatcaaagaggagatccaacgtataaaggcaggcaaccctgatatcagccacagagaagccttcagtgctgctgccaaaaactgggctcatttccctcacatacactttggactcatggctgaccatcctcccacgaagaaggctaacgtgcgccaacaggaaggagaggatgggatgatgggaagagaagggttttacggttcagctgccaacgttggggtggcccataactagctacgaagactttcccaatcttttgtaatcttcaaaatgtggttactttcagctcaaacttaactttcttattactattttatgatatttgataatcgatcaggagaccttttttttttttcttaaagaaattttcggaactactagaattttctcttggaattgaaaatatattgttttctcag

SEQ ID NO: 29162 - protein, 240 aa, Arabidopsis thaliana
  peptide (1)..(240): Ceres Seq. ID no. 12334432
  misc_feature (16)..(201): Pfam Name: YABBY protein Pfam Description: YABBY protein
  misc_feature (147)..(213): Homolog of NCBI NO: 30683176 NR Description: expressed protein [Arabidopsis thaliana]
  misc_feature (1)..(238): Homolog of NCBI NO: 38605890 NR Description: OSJNBb0020O11.2 [Oryza sativa (japonica
  misc_feature (4)..(238): Homolog of NCBI NO: 27804377 NR Description: MADS-box transcription factor CDM51
  misc_feature (20)..(92): Homolog of NCBI NO: 37535908 NR Description: hypothetical protein [Oryza sativa (japonica
  misc_feature (73)..(240): Homolog of NCBI NO: 37535908 NR Description: hypothetical protein [Oryza sativa (japonica
  misc_feature (1)..(237): Homolog of NCBI NO: 18406725 NR Description: expressed protein
  misc_feature (216)..(240): Homolog of NCBI NO: 7486543 NR Description: hypothetical protein F6N15.22 - Arabidopsis
  misc_feature (150)..(217): Homolog of NCBI NO: 7486543 NR Description: hypothetical protein F6N15.22 - Arabidopsis
  misc_feature (1)..(77): Homolog of NCBI NO: 7486543 NR Description: hypothetical protein F6N15.22 - Arabidopsis
  misc_feature (1)..(240): Homolog of NCBI NO: 18411242 NR Description: putative YABBY3 axial regulator
MSSMSMSSSSAPAFPPDHFSSTDQLCYVHCSFCDTVLAVSVPPSSLFKTVTVRCGHCSNLLSVTVSMRALLLPSVSNLGHSFLPPPPPPPPPNLLEEMRSGGQNINMNMMMSHHASAHHPNEHLVMATRNGRSVDHLQEMPRPPPANRPPEKRQRVPSAYNRFIKEEIQRIKAGNPDISHREAFSAAAKNWAHFPHIHFGLMADHPPTKKANVRQQEGEDGMMGREGFYGSAANVGVAHN

SEQ ID NO: 29163 - protein, 237 aa, Arabidopsis thaliana
  peptide (1)..(237): Ceres Seq. ID no. 12334433
  misc_feature (13)..(198): Pfam Name: YABBY protein Pfam Description: YABBY protein
  misc_feature (144)..(210): Homolog of NCBI NO: 30683176 NR Description: expressed protein [Arabidopsis thaliana]
  misc_feature (1)..(235): Homolog of NCBI NO: 38605890 NR Description: OSJNBb0020O11.2 [Oryza sativa (japonica
  misc_feature (1)..(235): Homolog of NCBI NO: 27804377 NR Description: MADS-box transcription factor CDM51
  misc_feature (17)..(89): Homolog of NCBI NO: 37535908 NR Description: hypothetical protein [Oryza sativa (japonica
  misc_feature (70)..(237): Homolog of NCBI NO: 37535908 NR Description: hypothetical protein [Oryza sativa (japonica
  misc_feature (1)..(234): Homolog of NCBI NO: 18406725 NR Description: expressed protein
  misc_feature (213)..(237): Homolog of NCBI NO: 7486543 NR Description: hypothetical protein F6N15.22 - Arabidopsis
  misc_feature (147)..(214): Homolog of NCBI NO: 7486543 NR Description: hypothetical protein F6N15.22 - Arabidopsis
  misc_feature (1)..(74): Homolog of NCBI NO: 7486543 NR Description: hypothetical protein F6N15.22 - Arabidopsis
  misc_feature (1)..(237): Homolog of NCBI NO: 18411242 NR Description: putative YABBY3 axial regulator
MSMSSSSAPAFPPDHFSSTDQLCYVHCSFCDTVLAVSVPPSSLFKTVTVRCGHCSNLLSVTVSMRALLLPSVSNLGHSFLPPPPPPPPPNLLEEMRSGGQNINMNMMMSHHASAHHPNEHLVMATRNGRSVDHLQEMPRPPPANRPPEKRQRVPSAYNRFIKEEIQRIKAGNPDISHREAFSAAAKNWAHFPHIHFGLMADHPPTKKANVRQQEGEDGMMGREGFYGSAANVGVAHN

SEQ ID NO: 29164 - protein, 235 aa, Arabidopsis thaliana
  peptide (1)..(235): Ceres Seq. ID no. 12334434
  misc_feature (11)..(196): Pfam Name: YABBY protein Pfam Description: YABBY protein
  misc_feature (142)..(208): Homolog of NCBI NO: 30683176 NR Description: expressed protein [Arabidopsis thaliana]
  misc_feature (1)..(233): Homolog of NCBI NO: 38605890 NR Description: OSJNBb0020O11.2 [Oryza sativa (japonica
  misc_feature (1)..(233): Homolog of NCBI NO: 27804377 NR Description: MADS-box transcription factor CDM51
  misc_feature (15)..(87): Homolog of NCBI NO: 37535908 NR Description: hypothetical protein [Oryza sativa (japonica
  misc_feature (68)..(235): Homolog of NCBI NO: 37535908 NR Description: hypothetical protein [Oryza sativa (japonica
  misc_feature (1)..(232): Homolog of NCBI NO: 18406725 NR Description: expressed protein
  misc_feature (211)..(235): Homolog of NCBI NO: 7486543 NR Description: hypothetical protein F6N15.22 - Arabidopsis
  misc_feature (145)..(212): Homolog of NCBI NO: 7486543 NR Description: hypothetical protein F6N15.22 - Arabidopsis
  misc_feature (1)..(72): Homolog of NCBI NO: 7486543 NR Description: hypothetical protein F6N15.22 - Arabidopsis
  misc_feature (1)..(235): Homolog of NCBI NO: 18411242 NR Description: putative YABBY3 axial regulator
MSSSSAPAFPPDHFSSTDQLCYVHCSFCDTVLAVSVPPSSLFKTVTVRCGHCSNLLSVTVSMRALLLPSVSNLGHSFLPPPPPPPPPNLLEEMRSGGQNINMNMMMSHHASAHHPNEHLVMATRNGRSVDHLQEMPRPPPANRPPEKRQRVPSAYNRFIKEEIQRIKAGNPDISHREAFSAAAKNWAHFPHIHFGLMADHPPTKKANVRQQEGEDGMMGREGFYGSAANVGVAHN

SEQ ID NO: 29165 - DNA, 1384 bp, Arabidopsis thaliana
  misc_feature (1)..(1384): Ceres Seq. ID no. 13487636
  misc_feature: MA Experiment ID: 108434 Result: Up-regulated in Transcription
  misc_feature: MA Experiment 108434 PARAMETER Experiment Name: At_Root_Tips_cDNA_P Parameter: Tissue Value: Root Tips
  misc_feature: MA Experiment ID: 108561 Result: Up-regulated in Transcription
  misc_feature: MA Experiment 108561 PARAMETER Experiment Name: At_100uM_ABA_cDNA_P Parameter: Timepoint (hr) Value: 6
  misc_feature: MA Experiment 108561 PARAMETER Experiment Name: At_100uM_ABA_cDNA_P Parameter: Tissue Value: Aerial
  misc_feature: MA Experiment 108561 PARAMETER Experiment Name: At_100uM_ABA_cDNA_P Parameter: Treatment Value: 100uM ABA vs. No Treatment
  misc_feature: MA Experiment ID: 20000184 Result: Down-regulated in Transcription
  misc_feature: MA Experiment 20000184 PARAMETER Experiment Name: At_Shoots__P Parameter: Age (day) Value: 7
  misc_feature: MA Experiment 20000184 PARAMETER Experiment Name: At_Shoots__P Parameter: Tissue Value: Shoots vs. Whole Plant
  misc_feature: MA Experiment ID: 20001248 Result: Up-regulated in Transcription
  misc_feature: MA Experiment 20001248 PARAMETER Experiment Name: At_Far-red-induction_P Parameter: Age (day) Value: 7
  misc_feature: MA Experiment 20001248 PARAMETER Experiment Name: At_Far-red-induction_P Parameter: Light Value: Far-red vs. White
  misc_feature: MA Experiment 20001248 PARAMETER Experiment Name: At_Far-red-induction_P Parameter: Organism Value: A. thaliana
  misc_feature: MA Experiment 20001248 PARAMETER Experiment Name: At_Far-red-induction_P Parameter: Plant Line Value: Columbia
  misc_feature: MA Experiment 20001248 PARAMETER Experiment Name: At_Far-red-induction_P Parameter: Timepoint (hr) Value: 4
  misc_feature: MA Experiment 20001248 PARAMETER Experiment Name: At_Far-red-induction_P Parameter: Tissue Value: Whole Plant
  misc_feature: MA Experiment ID: 20001450 Result: Up-regulated in Transcription
  misc_feature: MA Experiment 20001450 PARAMETER Experiment Name: At_Far-red-induction_P Parameter: Age (day) Value: 7
  misc_feature: MA Experiment 20001450 PARAMETER Experiment Name: At_Far-red-induction_P Parameter: Light Value: Far-red vs. White
  misc_feature: MA Experiment 20001450 PARAMETER Experiment Name: At_Far-red-induction_P Parameter: Organism Value: A. thaliana
  misc_feature: MA Experiment 20001450 PARAMETER Experiment Name: At_Far-red-induction_P Parameter: Plant Line Value: Columbia
  misc_feature: MA Experiment 20001450 PARAMETER Experiment Name: At_Far-red-induction_P Parameter: Timepoint (hr) Value: 8
  misc_feature: MA Experiment 20001450 PARAMETER Experiment Name: At_Far-red-induction_P Parameter: Tissue Value: Whole Plant
  misc_feature: MA Experiment ID: 20001451 Result: Up-regulated in Transcription
  misc_feature: MA Experiment 20001451 PARAMETER Experiment Name: At_Far-red-induction_P Parameter: Age (day) Value: 7
  misc_feature: MA Experiment 20001451 PARAMETER Experiment Name: At_Far-red-induction_P Parameter: Light Value: Far-red vs. White
  misc_feature: MA Experiment 20001451 PARAMETER Experiment Name: At_Far-red-induction_P Parameter: Organism Value: A. thaliana
  misc_feature: MA Experiment 20001451 PARAMETER Experiment Name: At_Far-red-induction_P Parameter: Plant Line Value: Columbia
  misc_feature: MA Experiment 20001451 PARAMETER Experiment Name: At_Far-red-induction_P Parameter: Timepoint (hr) Value: 24
  misc_feature: MA Experiment 20001451 PARAMETER Experiment Name: At_Far-red-induction_P Parameter: Tissue Value: Whole Plant
cctttcttgtcgtcgtttcgaagagactaaaggcgacggagagaatcggagaagaagatgggaacggcggtgggacagtggctagaggaagcgcttgttgacctctgccgcaaaccagagaccggtttgaatttcgatcgtgatgtcatctccggtttagtctcctattgcgatcttgctcagcctgtcgatgccaaggaatatctcgacaatattattggaaaagaaggcaaaagcatcattgcagaatatctacagcgaagaggatacaaagatccatctagccatgtagcagccagttcaggtccagaactgcaaatgtatgttaagccaaaagtggataatggtgcttctagtggaaccaagaaaccgtttaaaacaccaaaagagggaacatcttctaatcagcaagctggaactgggaaattaacagctcccgcccagcaagttaatcctaagaagaaaaaaggtggaaaggtgatttctcttgccgaagcagctaaaggatcaatagtgtttcagcaaggaaaaccgtgtgcatgccaagctcgtagacaccacttagtgagcaactgcttgtcgtgtgggaaaatagtgtgcgaacaagaaggagaagggccttgcagtttttgcggagcacttgtgctgaaagaaggaagtacatatgctgggctagaggtagggtatactccagtatctgatgctgatgtggcagctgaagcatatgcgaaaaggcttgtagagtatgatagaaattcggccgcacgtacaacggttattgatgaccaaagcgattactatgaatctgagagcagtacttggctctctgcggaggaaaaagagctagtgaggaagaagcgagaggagattgaagaagctgaacgagtaaaaaagagcaaagtggttatgacatttgatttaatcggccgtaaggttctgttaaatgaagatgatatctcagaactagaatcagggaacaggattctgggaccacctgagactaaaaacgtgaacagaataaaaccgaacccgactgcaagactcgttccaatcttcttagacccaggaccaaccgagaagaagccaaacagcaccaccaccaagaaagacaacaagaaaaaccgaaacggtttgtgtctagagatcacaggaagggtgcaacatgacagaagtgaactcaaatacttacaagccgatccaaaatcggacggtaaatcttggccatcaggaaacgatggacttcatgtagaagatggtggtgaatgttccttagattacgactaaatatttttcagtaaccaaacccggttcaatgttttcggtttaccgaacctgatactatttgttcagtttaaaagtcaacaacttttctcttgttgagtcc

SEQ ID NO: 29166 - protein, 408 aa, Arabidopsis thaliana
  peptide (1)..(408): Ceres Seq. ID no. 13487637
  misc_feature (156)..(208): Pfam Name: Putative zinc finger motif, C2HC5-type Pfam Description: Putative zinc finger motif, C2HC5-type
  misc_feature (173)..(305): Homolog of NCBI NO: 26332983 NR Description: unnamed protein product [Mus musculus]
  misc_feature (6)..(196): Homolog of NCBI NO: 26332983 NR Description: unnamed protein product [Mus musculus]
  misc_feature (104)..(303): Homolog of NCBI NO: 31203161 NR Description: ENSANGP00000017311 [Anopheles gambiae]
  misc_feature (126)..(196): Homolog of NCBI NO: 703112 NR Description: thyroid receptor interactor
  misc_feature (173)..(356): Homolog of NCBI NO: 703112 NR Description: thyroid receptor interactor
  misc_feature (11)..(196): Homolog of NCBI NO: 19863480 NR Description: Activating signal cointegrator 1 (ASC-1) (Thyroid
  misc_feature (173)..(369): Homolog of NCBI NO: 19863480 NR Description: Activating signal cointegrator 1 (ASC-1) (Thyroid
  misc_feature (11)..(196): Homolog of NCBI NO: 32189376 NR Description: thyroid hormone receptor interactor 4
  misc_feature (173)..(369): Homolog of NCBI NO: 32189376 NR Description: thyroid hormone receptor interactor 4
  misc_feature (1)..(408): Homolog of NCBI NO: 15228204 NR Description: expressed protein [Arabidopsis thaliana]
MGTAVGQWLEEALVDLCRKPETGLNFDRDVISGLVSYCDLAQPVDAKEYLDNIIGKEGKSIIAEYLQRRGYKDPSSHVAASSGPELQMYVKPKVDNGASSGTKKPFKTPKEGTSSNQQAGTGKLTAPAQQVNPKKKKGGKVISLAEAAKGSIVFQQGKPCACQARRHHLVSNCLSCGKIVCEQEGEGPCSFCGALVLKEGSTYAGLEVGYTPVSDADVAAEAYAKRLVEYDRNSAARTTVIDDQSDYYESESSTWLSAEEKELVRKKREEIEEAERVKKSKVVMTFDLIGRKVLLNEDDISELESGNRILGPPETKNVNRIKPNPTARLVPIFLDPGPTEKKPNSTTTKKDNKKNRNGLCLEITGRVQHDRSELKYLQADPKSDGKSWPSGNDGLHVEDGGECSLDYD

SEQ ID NO: 29167 - protein, 321 aa, Arabidopsis thaliana
  peptide (1)..(321): Ceres Seq. ID no. 13487638
  misc_feature (69)..(121): Pfam Name: Putative zinc finger motif, C2HC5-type Pfam Description: Putative zinc finger motif, C2HC5-type
  misc_feature (86)..(218): Homolog of NCBI NO: 26332983 NR Description: unnamed protein product [Mus musculus]
  misc_feature (1)..(109): Homolog of NCBI NO: 26332983 NR Description: unnamed protein product [Mus musculus]
  misc_feature (17)..(216): Homolog of NCBI NO: 31203161 NR Description: ENSANGP00000017311 [Anopheles gambiae]
  misc_feature (39)..(109): Homolog of NCBI NO: 703112 NR Description: thyroid receptor interactor
  misc_feature (86)..(269): Homolog of NCBI NO: 703112 NR Description: thyroid receptor interactor
  misc_feature (1)..(109): Homolog of NCBI NO: 19863480 NR Description: Activating signal cointegrator 1 (ASC-1) (Thyroid
  misc_feature (86)..(282): Homolog of NCBI NO: 19863480 NR Description: Activating signal cointegrator 1 (ASC-1) (Thyroid
  misc_feature (1)..(109): Homolog of NCBI NO: 32189376 NR Description: thyroid hormone receptor interactor 4
  misc_feature (86)..(282): Homolog of NCBI NO: 32189376 NR Description: thyroid hormone receptor interactor 4
  misc_feature (1)..(321): Homolog of NCBI NO: 15228204 NR Description: expressed protein [Arabidopsis thaliana]
MYVKPKVDNGASSGTKKPFKTPKEGTSSNQQAGTGKLTAPAQQVNPKKKKGGKVISLAEAAKGSIVFQQGKPCACQARRHHLVSNCLSCGKIVCEQEGEGPCSFCGALVLKEGSTYAGLEVGYTPVSDADVAAEAYAKRLVEYDRNSAARTTVIDDQSDYYESESSTWLSAEEKELVRKKREEIEEAERVKKSKVVMTFDLIGRKVLLNEDDISELESGNRILGPPETKNVNRIKPNPTARLVPIFLDPGPTEKKPNSTTTKKDNKKNRNGLCLEITGRVQHDRSELKYLQADPKSDGKSWPSGNDGLHVEDGGECSLDYD

SEQ ID NO: 29168 - DNA, 1301 bp, Arabidopsis thaliana
  misc_feature (1)..(1301): Ceres Seq. ID no. 12334435
  misc_feature: MA Experiment ID: 108434 Result: Up-regulated in Transcription
  misc_feature: MA Experiment 108434 PARAMETER Experiment Name: At_Root_Tips_cDNA_P Parameter: Tissue Value: Root Tips
  misc_feature: MA Experiment ID: 108572 Result: Up-regulated in Transcription
  misc_feature: MA Experiment 108572 PARAMETER Experiment Name: At_Drought_cDNA_P Parameter: Timepoint (hr) Value: 1
  misc_feature: MA Experiment 108572 PARAMETER Experiment Name: At_Drought_cDNA_P Parameter: Tissue Value: Aerial
  misc_feature: MA Experiment 108572 PARAMETER Experiment Name: At_Drought_cDNA_P Parameter: Treatment Value: Drought vs. No Drought
  misc_feature: MA Experiment ID: 108607 Result: Up-regulated in Transcription
  misc_feature: MA Experiment 108607 PARAMETER Experiment Name: At_100uM_ABA_cDNA_P Parameter: Timepoint (hr) Value: 4
  misc_feature: MA Experiment 108607 PARAMETER Experiment Name: At_100uM_ABA_cDNA_P Parameter: Tissue Value: Aerial
  misc_feature: MA Experiment 108607 PARAMETER Experiment Name: At_100uM_ABA_cDNA_P Parameter: Treatment Value: 100uM ABA vs. No Treatment
  misc_feature: MA Experiment ID: 108668 Result: Down-regulated in Transcription
  misc_feature: MA Experiment 108668 PARAMETER Experiment Name: At_2mM_SA_cDNA_P Parameter: Plant Line Value: WS
  misc_feature: MA Experiment 108668 PARAMETER Experiment Name: At_2mM_SA_cDNA_P Parameter: Timepoint (hr) Value: 6
  misc_feature: MA Experiment 108668 PARAMETER Experiment Name: At_2mM_SA_cDNA_P Parameter: Treatment Value: 2mM SA vs. No Treatment
  misc_feature: MA Experiment ID: 20000069 Result: Up-regulated in Transcription
  misc_feature: MA Experiment 20000069 PARAMETER Experiment Name: At_100uM_ABA_Mutants_cDNA_P Parameter: Plant Line Value: CS23
  misc_feature: MA Experiment 20000069 PARAMETER Experiment Name: At_100uM_ABA_Mutants_cDNA_P Parameter: Timepoint (hr) Value: 6
  misc_feature: MA Experiment 20000069 PARAMETER Experiment Name: At_100uM_ABA_Mutants_cDNA_P Parameter: Tissue Value: Aerial
  misc_feature: MA Experiment 20000069 PARAMETER Experiment Name: At_100uM_ABA_Mutants_cDNA_P Parameter: Treatment Value: 100uM ABA vs. No Treatment
  misc_feature: MA Experiment ID: 20000071 Result: Up-regulated in Transcription
  misc_feature: MA Experiment 20000071 PARAMETER Experiment Name: At_100uM_ABA_Mutants_cDNA_P Parameter: Plant Line Value: CS8104
  misc_feature: MA Experiment 20000071 PARAMETER Experiment Name: At_100uM_ABA_Mutants_cDNA_P Parameter: Timepoint (hr) Value: 6
  misc_feature: MA Experiment 20000071 PARAMETER Experiment Name: At_100uM_ABA_Mutants_cDNA_P Parameter: Tissue Value: Aerial
  misc_feature: MA Experiment 20000071 PARAMETER Experiment Name: At_100uM_ABA_Mutants_cDNA_P Parameter: Treatment Value: 100uM ABA vs. No Treatment
  misc_feature: MA Experiment ID: 20000113 Result: Down-regulated in Transcription
  misc_feature: MA Experiment 20000113 PARAMETER Experiment Name: At_42deg_Heat_cDNA_P Parameter: Temperature (deg C) Value: 42 vs. 22
  misc_feature: MA Experiment 20000113 PARAMETER Experiment Name: At_42deg_Heat_cDNA_P Parameter: Timepoint (hr) Value: 8
  misc_feature: MA Experiment 20000113 PARAMETER Experiment Name: At_42deg_Heat_cDNA_P Parameter: Tissue Value: Aerial
  misc_feature: MA Experiment ID: 20000144 Result: Down-regulated in Transcription
  misc_feature: MA Experiment 20000144 PARAMETER Experiment Name: At_42deg_Heat_cDNA_P Parameter: Temperature (deg C) Value: 42 vs. 22
  misc_feature: MA Experiment 20000144 PARAMETER Experiment Name: At_42deg_Heat_cDNA_P Parameter: Timepoint (hr) Value: 1
  misc_feature: MA Experiment 20000144 PARAMETER Experiment Name: At_42deg_Heat_cDNA_P Parameter: Tissue Value: Aerial
  misc_feature: MA Experiment ID: 20000166 Result: Up-regulated in Transcription
  misc_feature: MA Experiment 20000166 PARAMETER Experiment Name: At_100uM_ABA_P Parameter: Age (day) Value: 14
  misc_feature: MA Experiment 20000166 PARAMETER Experiment Name: At_100uM_ABA_P Parameter: Organism Value: A. thaliana
  misc_feature: MA Experiment 20000166 PARAMETER Experiment Name: At_100uM_ABA_P Parameter: Plant Line Value: WS
  misc_feature: MA Experiment 20000166 PARAMETER Experiment Name: At_100uM_ABA_P Parameter: Timepoint (hr) Value: 1
  misc_feature: MA Experiment 20000166 PARAMETER Experiment Name: At_100uM_ABA_P Parameter: Tissue Value: Aerial
  misc_feature: MA Experiment 20000166 PARAMETER Experiment Name: At_100uM_ABA_P Parameter: Treatment Value: 100uM ABA vs. No Treatment
  misc_feature: MA Experiment ID: 20000173 Result: Down-regulated in Transcription
  misc_feature: MA Experiment 20000173 PARAMETER Experiment Name: At_42deg_Heat_P Parameter: Age (day) Value: 14
  misc_feature: MA Experiment 20000173 PARAMETER Experiment Name: At_42deg_Heat_P Parameter: Organism Value: A. thaliana
  misc_feature: MA Experiment 20000173 PARAMETER Experiment Name: At_42deg_Heat_P Parameter: Plant Line Value: WS
  misc_feature: MA Experiment 20000173 PARAMETER Experiment Name: At_42deg_Heat_P Parameter: Temperature (deg C) Value: 42 vs. 22
  misc_feature: MA Experiment 20000173 PARAMETER Experiment Name: At_42deg_Heat_P Parameter: Timepoint (hr) Value: 6
  misc_feature: MA Experiment 20000173 PARAMETER Experiment Name: At_42deg_Heat_P Parameter: Tissue Value: Aerial
  misc_feature: MA Experiment ID: 20000185 Result: Up-regulated in Transcription
  misc_feature: MA Experiment 20000185 PARAMETER Experiment Name: At_Roots__P Parameter: Age (day) Value: 7 vs. 21
  misc_feature: MA Experiment 20000185 PARAMETER Experiment Name: At_Roots__P Parameter: Organism Value: A. thaliana
  misc_feature: MA Experiment 20000185 PARAMETER Experiment Name: At_Roots__P Parameter: Tissue Value: Roots vs. Whole Plant
  misc_feature: MA Experiment ID: 20000227 Result: Down-regulated in Transcription
  misc_feature: MA Experiment 20000227 PARAMETER Experiment Name: At_Root-Tips-vs-Tops_P Parameter: Tissue Value: Root Tips vs. Root Tops
  misc_feature: MA Experiment ID: 20000234 Result: Up-regulated in Transcription
  misc_feature: MA Experiment 20000234 PARAMETER Experiment Name: At_Siliques_P Parameter: Age (day) Value: 21
  misc_feature: MA Experiment 20000234 PARAMETER Experiment Name: At_Siliques_P Parameter: Organism Value: A. thaliana
  misc_feature: MA Experiment 20000234 PARAMETER Experiment Name: At_Siliques_P Parameter: Plant Line Value: WS
  misc_feature: MA Experiment 20000234 PARAMETER Experiment Name: At_Siliques_P Parameter: Tissue Value: Less Than 5mm Siliques vs. Whole Plant
  misc_feature: MA Experiment ID: 20000235 Result: Up-regulated in Transcription
  misc_feature: MA Experiment 20000235 PARAMETER Experiment Name: At_Siliques_P Parameter: Age (day) Value: 21
  misc_feature: MA Experiment 20000235 PARAMETER Experiment Name: At_Siliques_P Parameter: Organism Value: A. thaliana
  misc_feature: MA Experiment 20000235 PARAMETER Experiment Name: At_Siliques_P Parameter: Plant Line Value: WS
  misc_feature: MA Experiment 20000235 PARAMETER Experiment Name: At_Siliques_P Parameter: Tissue Value: 5-10mm Siliques vs. Whole Plant
  misc_feature: MA Experiment ID: 20000264 Result: Up-regulated in Transcription
  misc_feature: MA Experiment 20000264 PARAMETER Experiment Name: At_Open_Flower_P Parameter: Age (day) Value: 21
  misc_feature: MA Experiment 20000264 PARAMETER Experiment Name: At_Open_Flower_P Parameter: Plant Line Value: WS
  misc_feature: MA Experiment 20000264 PARAMETER Experiment Name: At_Open_Flower_P Parameter: Tissue Value: Open Flower vs. Whole Plant
  misc_feature: MA Experiment ID: 20000265 Result: Up-regulated in Transcription
  misc_feature: MA Experiment 20000265 PARAMETER Experiment Name: At_Open_Flower_P Parameter: Age (day) Value: 21
  misc_feature: MA Experiment 20000265 PARAMETER Experiment Name: At_Open_Flower_P Parameter: Plant Line Value: WS
  misc_feature: MA Experiment 20000265 PARAMETER Experiment Name: At_Open_Flower_P Parameter: Tissue Value: Closed Flower vs. Whole Plant
  misc_feature: MA Experiment ID: 20000286 Result: Up-regulated in Transcription
  misc_feature: MA Experiment 20000286 PARAMETER Experiment Name: At_Open_Flower_P Parameter: Age (day) Value: 21
  misc_feature: MA Experiment 20000286 PARAMETER Experiment Name: At_Open_Flower_P Parameter: Plant Line Value: WS
  misc_feature: MA Experiment 20000286 PARAMETER Experiment Name: At_Open_Flower_P Parameter: Tissue Value: Half Open vs. Whole Plant
  misc_feature: MA Experiment ID: 20000438 Result: Up-regulated in Transcription
  misc_feature: MA Experiment 20000438 PARAMETER Experiment Name: At_Shoots__P Parameter: Age (day) Value: 14
  misc_feature: MA Experiment 20000438 PARAMETER Experiment Name: At_Shoots__P Parameter: Tissue Value: Shoots vs. Whole Plant
  misc_feature: MA Experiment ID: 20000439 Result: Up-regulated in Transcription
  misc_feature: MA Experiment 20000439 PARAMETER Experiment Name: At_Roots__P Parameter: Age (day) Value: 14 vs. 21
  misc_feature: MA Experiment 20000439 PARAMETER Experiment Name: At_Roots__P Parameter: Organism Value: A. thaliana
  misc_feature: MA Experiment 20000439 PARAMETER Experiment Name: At_Roots__P Parameter: Tissue Value: Roots vs. Whole Plant
  misc_feature: MA Experiment ID: 20000451 Result: Up-regulated in Transcription
  misc_feature: MA Experiment 20000451 PARAMETER Experiment Name: At_CS6879_Shoots-Roots_P Parameter: Age (day) Value: 14
  misc_feature: MA Experiment 20000451 PARAMETER Experiment Name: At_CS6879_Shoots-Roots_P Parameter: Organism Value: A. thaliana
  misc_feature: MA Experiment 20000451 PARAMETER Experiment Name: At_CS6879_Shoots-Roots_P Parameter: Plant Line Value: CS6879 vs. WS
  misc_feature: MA Experiment 20000451 PARAMETER Experiment Name: At_CS6879_Shoots-Roots_P Parameter: Tissue Value: Roots
  misc_feature: MA Experiment ID: 20000794 Result: Up-regulated in Transcription
  misc_feature: MA Experiment 20000794 PARAMETER Experiment Name: At_Petals_P Parameter: Age (day) Value: 23-25 days
  misc_feature: MA Experiment 20000794 PARAMETER Experiment Name: At_Petals_P Parameter: Plant Line Value: WS
  misc_feature: MA Experiment 20000794 PARAMETER Experiment Name: At_Petals_P Parameter: Tissue Value: Petals vs. Whole plant
  misc_feature: MA Experiment ID: 20001560 Result: Up-regulated in Transcription
  misc_feature: MA Experiment 20001560 PARAMETER Experiment Name: At_Drought_Soil_Dry_P Parameter: Age (day) Value: 28
  misc_feature: MA Experiment 20001560 PARAMETER Experiment Name: At_Drought_Soil_Dry_P Parameter: Organism Value: A. thaliana
  misc_feature: MA Experiment 20001560 PARAMETER Experiment Name: At_Drought_Soil_Dry_P Parameter: Plant Line Value: WS
  misc_feature: MA Experiment 20001560 PARAMETER Experiment Name: At_Drought_Soil_Dry_P Parameter: Post Timepoint (hr) Value: None
  misc_feature: MA Experiment 20001560 PARAMETER Experiment Name: At_Drought_Soil_Dry_P Parameter: Post-Treatment Value: None
  misc_feature: MA Experiment 20001560 PARAMETER Experiment Name: At_Drought_Soil_Dry_P Parameter: Timepoint (day) Value: 14
  misc_feature: MA Experiment 20001560 PARAMETER Experiment Name: At_Drought_Soil_Dry_P Parameter: Treatment Value: Drought vs. No Drought
tcacacacacacacacacactctgttttcttcgtccattctattaccagaaaacagagtttgatagagagaaaagaatggaactgtcgactcaaatgaatgtgttcgaagagcttcttgttccgacaaagcaagaaacaaccgacaacaacatcaacaatctgagctttaatggcggatttgatcatcatcatcatcaattcttcccaaatggatataatattgattacctctgtttcaacaatgaagaagaagacgaaaatacccttttgtatccttcttctttcatggatctaatctctcaacctcctccattgcttcttcaccaaccgccaccgttacaaccactgtcgccgccgttatcctcctccgcgaccgccggagcaacatttgactacccttttcttgaggctttgcaagagataattgactcttcttcctcatcgcctccattgatccttcaaaatggtcaagaagagaactttaataatccgatgtcgtatccctctccattgatggagtctgatcagagcaagagcttcagtgttggttactgtggagggagagacgaacaagaagaagagcaaaaagcttgaaggccaaccttctaagaatctcatggcggagagacgcccggagaaaaccgacttaacgatcgtctttctaatggctccggatcccatcgtccccaaaaatcagtaagatggacaggacatcgatattaggagatgccatagattacatgaaagagcttttagacaaaatcaacaaattacaagatgaggaacaagaacttggaaatagcaacaattcacatcactctaagctcttcggtgatctcaaggatcttaatgcgaacgaacctctggtcagaaactcaccaaagtttgaaatagatcgtagagacgaggatactcgagttgatatatgctgctcgccaaaaccgggattgctactatctactgtgaatacattagagactctaggcttggagattgaacaatgtgttataagctgctttagtgatttctctttgcaggcttcttgttctgagggagctgagcagagagatttcataacatcagaagagataaaacaagcattattcagaaacgcaggttatggtggaagctgcttgtaatgagtcatgattgaaactaataaaccaaaactattgtttatttctaataatactagcgcttataaactttagatgttgttttaattcccttgtgagtttggtttttttttcctaggggaaaacattatgagttcagttgtataaacaaaagaaggaaattt

SEQ ID NO: 29169 - protein, 197 aa, Arabidopsis thaliana
  peptide (1)..(197): Ceres Seq. ID no. 12334436
  misc_feature (37)..(197): Homolog of NCBI NO: 20127062 NR Description: putative bHLH transcription factor [Arabidopsis
  misc_feature (37)..(197): Homolog of NCBI NO: 15238199 NR Description: bHLH protein
  misc_feature (26)..(197): Homolog of NCBI NO: 21537346 NR Description: unknown [Arabidopsis thaliana]
  misc_feature (26)..(197): Homolog of NCBI NO: 18424973 NR Description: bHLH protein; protein id: At5g65640.1, supported
HTHTHTLCFLRPFYYQKTEFDREKRMELSTQMNVFEELLVPTKQETTDNNINNLSFNGGFDHHHHQFFPNGYNIDYLCFNNEEEDENTLLYPSSFMDLISQPPPLLLHQPPPLQPLSPPLSSSATAGATFDYPFLEALQEIIDSSSSSPPLILQNGQEENFNNPMSYPSPLMESDQSKSFSVGYCGGRDEQEEEQKA

SEQ ID NO: 29170 - protein, 172 aa, Arabidopsis thaliana
  peptide (1)..(172): Ceres Seq. ID no. 12334437
  misc_feature (12)..(172): Homolog of NCBI NO: 20127062 NR Description: putative bHLH transcription factor [Arabidopsis
  misc_feature (12)..(172): Homolog of NCBI NO: 15238199 NR Description: bHLH protein
  misc_feature (1)..(172): Homolog of NCBI NO: 21537346 NR Description: unknown [Arabidopsis thaliana]
  misc_feature (1)..(172): Homolog of NCBI NO: 18424973 NR Description: bHLH protein; protein id: At5g65640.1, supported
MELSTQMNVFEELLVPTKQETTDNNINNLSFNGGFDHHHHQFFPNGYNIDYLCFNNEEEDENTLLYPSSFMDLISQPPPLLLHQPPPLQPLSPPLSSSATAGATFDYPFLEALQEIIDSSSSSPPLILQNGQEENFNNPMSYPSPLMESDQSKSFSVGYCGGRDEQEEEQKA

SEQ ID NO: 29171 - protein, 166 aa, Arabidopsis thaliana
  peptide (1)..(166): Ceres Seq. ID no. 12334438
  misc_feature (6)..(166): Homolog of NCBI NO: 20127062 NR Description: putative bHLH transcription factor [Arabidopsis
  misc_feature (6)..(166): Homolog of NCBI NO: 15238199 NR Description: bHLH protein
  misc_feature (1)..(166): Homolog of NCBI NO: 21537346 NR Description: unknown [Arabidopsis thaliana]
  misc_feature (1)..(166): Homolog of NCBI NO: 18424973 NR Description: bHLH protein; protein id: At5g65640.1, supported
MNVFEELLVPTKQETTDNNINNLSFNGGFDHHHHQFFPNGYNIDYLCFNNEEEDENTLLYPSSFMDLISQPPPLLLHQPPPLQPLSPPLSSSATAGATFDYPFLEALQEIIDSSSSSPPLILQNGQEENFNNPMSYPSPLMESDQSKSFSVGYCGGRDEQEEEQKA

SEQ ID NO: 29172 - DNA, 1049 bp, Arabidopsis thaliana
  misc_feature (1)..(1049): Ceres Seq. ID no. 12334427
  misc_feature: MA Experiment ID: 108434 Result: Up-regulated in Transcription
  misc_feature: MA Experiment 108434 PARAMETER Experiment Name: At_Root_Tips_cDNA_P Parameter: Tissue Value: Root Tips
  misc_feature: MA Experiment ID: 20001905 Result: Down-regulated in Transcription
  misc_feature: MA Experiment 20001905 PARAMETER Experiment Name: At_Drought_Reproduction_P Parameter: Age (day) Value: 40
  misc_feature: MA Experiment 20001905 PARAMETER Experiment Name: At_Drought_Reproduction_P Parameter: Organism Value: A. thaliana
  misc_feature: MA Experiment 20001905 PARAMETER Experiment Name: At_Drought_Reproduction_P Parameter: Plant Line Value: WS
  misc_feature: MA Experiment 20001905 PARAMETER Experiment Name: At_Drought_Reproduction_P Parameter: Timepoint (day) Value: 10
  misc_feature: MA Experiment 20001905 PARAMETER Experiment Name: At_Drought_Reproduction_P Parameter: Tissue Value: Rosettes
  misc_feature: MA Experiment 20001905 PARAMETER Experiment Name: At_Drought_Reproduction_P Parameter: Treatment Value: Drought vs. No Drought
agttcttcttcttctcgtcacaggaagaaaaatgttctgttcctcgcagctctcacagccaatgaatggcctcaaagacatagttgagacgagaaattttaaggcttggctcttagatcagtatggagttcttcatgatggcaaaaaaccttaccccggtgctatctcaacattgaaaaatcttgcaacagcgggtgccaaaattgtgatcattagtaattcttctagacgtgcttcaactacaatggaaaagttgaaaggccttggctttgatccttctttcttcaccggagctataactagtggtgaactaactcatcaatctttgcagaggagagatgatccttggtttgctgcactgggaaggaggtgcattcacattacttggaatgaccgaggagcaatctctttggagggtctagatctaaatgttgtggagaatgtggaagaagctgactttgttttagcgcacggcactgaagccctaggacttccttcaggcagtgtatctccaaggactattgatgagctagagaagattttggagaaatctgcagctcgaggacttcccatgatcgtagctaatccagattacgtgactgttgaagcaaatgtttttcatatcatgccaggtacactagcttccaagtatgaagaactgggaggagaagtgaagtcgatgggaaaacctcataagatgatctatgagtctgctatagcaattgcgggagtcaatccgtctgagtctatcgcagtaggagattcgctacatcatgatataaggggagcaaatgtttcaggaattgaatcaatattcatcactggagggattcatggtaatgagcttggtctcacttcttttgatgaaactgcaagtctagactcagtcaagacccttactgctaaacacaatgcattcccaacttatgtattatcagcctttaaatggtagttttcgttttgttgtacaaatcatattattgcttcttgaactacattttgccttcatttaacactcagagagagtaatttaaaaagctcatttgccg

SEQ ID NO: 29173 - protein, 316 aa, Arabidopsis thaliana
  peptide (1)..(316): Ceres Seq. ID no. 12334428
  misc_feature (33)..(276): Pfam Name: haloacid dehalogenase-like hydrolase Pfam Description: haloacid dehalogenase-like hydrolase
  misc_feature (33)..(315): Homolog of NCBI NO: 22958772 NR Description: hypothetical protein [Rhodobacter sphaeroides]
  misc_feature (37)..(296): Homolog of NCBI NO: 22963159 NR Description: hypothetical protein [Rhodopseudomonas palustris]
  misc_feature (37)..(294): Homolog of NCBI NO: 27382589 NR Description: blr7478 [Bradyrhizobium japonicum]
  misc_feature (14)..(289): Homolog of NCBI NO: 13473111 NR Description: hypothetical protein [Mesorhizobium loti]
  misc_feature (23)..(281): Homolog of NCBI NO: 36958658 NR Description: HAD superfamily protein involved in
  misc_feature (33)..(277): Homolog of NCBI NO: 15965982 NR Description: CONSERVED HYPOTHETICAL PROTEIN [Sinorhizobium
  misc_feature (31)..(316): Homolog of NCBI NO: 22968911 NR Description: hypothetical protein [Rhodospirillum rubrum]
  misc_feature (21)..(316): Homolog of NCBI NO: 23014406 NR Description: hypothetical protein [Magnetospirillum
  misc_feature (82)..(316): Homolog of NCBI NO: 15238168 NR Description: putative protein; protein id: At5g10460.1
  misc_feature (1)..(316): Homolog of NCBI NO: 19310550 NR Description: unknown protein [Arabidopsis thaliana]
VLLLLVTGRKMFCSSQLSQPMNGLKDIVETRNFKAWLLDQYGVLHDGKKPYPGAISTLKNLATAGAKIVIISNSSRRASTTMEKLKGLGFDPSFFTGAITSGELTHQSLQRRDDPWFAALGRRCIHITWNDRGAISLEGLDLNVVENVEEADFVLAHGTEALGLPSGSVSPRTIDELEKILEKSAARGLPMIVANPDYVTVEANVFHIMPGTLASKYEELGGEVKSMGKPHKMIYESAIAIAGVNPSESIAVGDSLHHDIRGANVSGIESIFITGGIHGNELGLTSFDETASLDSVKTLTAKHNAFPTYVLSAFKW

SEQ ID NO: 29174 - protein, 306 aa, Arabidopsis thaliana
  peptide (1)..(306): Ceres Seq. ID no. 12334429
  misc_feature (23)..(266): Pfam Name: haloacid dehalogenase-like hydrolase Pfam Description: haloacid dehalogenase-like hydrolase
  misc_feature (23)..(305): Homolog of NCBI NO: 22958772 NR Description: hypothetical protein [Rhodobacter sphaeroides]
  misc_feature (27)..(286): Homolog of NCBI NO: 22963159 NR Description: hypothetical protein [Rhodopseudomonas palustris]
  misc_feature (27)..(284): Homolog of NCBI NO: 27382589 NR Description: blr7478 [Bradyrhizobium japonicum]
  misc_feature (4)..(279): Homolog of NCBI NO: 13473111 NR Description: hypothetical protein [Mesorhizobium loti]
  misc_feature (13)..(271): Homolog of NCBI NO: 36958658 NR Description: HAD superfamily protein involved in
  misc_feature (23)..(267): Homolog of NCBI NO: 15965982 NR Description: CONSERVED HYPOTHETICAL PROTEIN [Sinorhizobium
  misc_feature (21)..(306): Homolog of NCBI NO: 22968911 NR Description: hypothetical protein [Rhodospirillum rubrum]
  misc_feature (11)..(306): Homolog of NCBI NO: 23014406 NR Description: hypothetical protein [Magnetospirillum
  misc_feature (72)..(306): Homolog of NCBI NO: 15238168 NR Description: putative protein; protein id: At5g10460.1
  misc_feature (1)..(306): Homolog of NCBI NO: 19310550 NR Description: unknown protein [Arabidopsis thaliana]
MFCSSQLSQPMNGLKDIVETRNFKAWLLDQYGVLHDGKKPYPGAISTLKNLATAGAKIVIISNSSRRASTTMEKLKGLGFDPSFFTGAITSGELTHQSLQRRDDPWFAALGRRCIHITWNDRGAISLEGLDLNVVENVEEADFVLAHGTEALGLPSGSVSPRTIDELEKILEKSAARGLPMIVANPDYVTVEANVFHIMPGTLASKYEELGGEVKSMGKPHKMIYESAIAIAGVNPSESIAVGDSLHHDIRGANVSGIESIFITGGIHGNELGLTSFDETASLDSVKTLTAKHNAFPTYVLSAFKW

SEQ ID NO: 29175 - protein, 296 aa, Arabidopsis thaliana
  peptide (1)..(296): Ceres Seq. ID no. 12334430
  misc_feature (13)..(256): Pfam Name: haloacid dehalogenase-like hydrolase Pfam Description: haloacid dehalogenase-like hydrolase
  misc_feature (13)..(295): Homolog of NCBI NO: 22958772 NR Description: hypothetical protein [Rhodobacter sphaeroides]
  misc_feature (17)..(276): Homolog of NCBI NO: 22963159 NR Description: hypothetical protein [Rhodopseudomonas palustris]
  misc_feature (17)..(274): Homolog of NCBI NO: 27382589 NR Description: blr7478 [Bradyrhizobium japonicum]
  misc_feature (1)..(269): Homolog of NCBI NO: 13473111 NR Description: hypothetical protein [Mesorhizobium loti]
  misc_feature (3)..(261): Homolog of NCBI NO: 36958658 NR Description: HAD superfamily protein involved in
  misc_feature (13)..(257): Homolog of NCBI NO: 15965982 NR Description: CONSERVED HYPOTHETICAL PROTEIN [Sinorhizobium
  misc_feature (11)..(296): Homolog of NCBI NO: 22968911 NR Description: hypothetical protein [Rhodospirillum rubrum]
  misc_feature (1)..(296): Homolog of NCBI NO: 23014406 NR Description: hypothetical protein [Magnetospirillum
  misc_feature (62)..(296): Homolog of NCBI NO: 15238168 NR Description: putative protein; protein id: At5g10460.1
  misc_feature (1)..(296): Homolog of NCBI NO: 19310550 NR Description: unknown protein [Arabidopsis thaliana]
MNGLKDIVETRNFKAWLLDQYGVLHDGKKPYPGAISTLKNLATAGAKIVIISNSSRRASTTMEKLKGLGFDPSFFTGAITSGELTHQSLQRRDDPWFAALGRRCIHITWNDRGAISLEGLDLNVVENVEEADFVLAHGTEALGLPSGSVSPRTIDELEKILEKSAARGLPMIVANPDYVTVEANVFHIMPGTLASKYEELGGEVKSMGKPHKMIYESAIAIAGVNPSESIAVGDSLHHDIRGANVSGIESIFITGGIHGNELGLTSFDETASLDSVKTLTAKHNAFPTYVLSAFKW

SEQ ID NO: 29176 - DNA, 1168 bp, Arabidopsis thaliana
  misc_feature (1)..(1168): Ceres Seq. ID no. 12334928
  misc_feature: MA Experiment ID: 108434 Result: Up-regulated in Transcription
  misc_feature: MA Experiment 108434 PARAMETER Experiment Name: At_Root_Tips_cDNA_P Parameter: Tissue Value: Root Tips
  misc_feature: MA Experiment ID: 108464 Result: Up-regulated in Transcription
  misc_feature: MA Experiment 108464 PARAMETER Experiment Name: At_Germinating_Seeds_cDNA_P Parameter: Age (day) Value: 4 vs. 0
  misc_feature: MA Experiment 108464 PARAMETER Experiment Name: At_Germinating_Seeds_cDNA_P Parameter: Tissue Value: Germinating Seeds
  misc_feature: MA Experiment ID: 108469 Result: Up-regulated in Transcription
  misc_feature: MA Experiment ID: 108501 Result: Down-regulated in Transcription
  misc_feature: MA Experiment 108501 PARAMETER Experiment Name: At_ap2_floral_buds_cDNA_P Parameter: Plant Line Value: ap2 (Ler.)
  misc_feature: MA Experiment 108501 PARAMETER Experiment Name: At_ap2_floral_buds_cDNA_P Parameter: Tissue Value: Closed Flower
  misc_feature: MA Experiment ID: 108572 Result: Up-regulated in Transcription
  misc_feature: MA Experiment 108572 PARAMETER Experiment Name: At_Drought_cDNA_P Parameter: Timepoint (hr) Value: 1
  misc_feature: MA Experiment 108572 PARAMETER Experiment Name: At_Drought_cDNA_P Parameter: Tissue Value: Aerial
  misc_feature: MA Experiment 108572 PARAMETER Experiment Name: At_Drought_cDNA_P Parameter: Treatment Value: Drought vs. No Drought
  misc_feature: MA Experiment ID: 108573 Result: Up-regulated in Transcription
  misc_feature: MA Experiment 108573 PARAMETER Experiment Name: At_Drought_cDNA_P Parameter: Timepoint (hr) Value: 6
  misc_feature: MA Experiment 108573 PARAMETER Experiment Name: At_Drought_cDNA_P Parameter: Tissue Value: Aerial
  misc_feature: MA Experiment 108573 PARAMETER Experiment Name: At_Drought_cDNA_P Parameter: Treatment Value: Drought vs. No Drought
  misc_feature: MA Experiment ID: 108574 Result: Down-regulated in Transcription
  misc_feature: MA Experiment 108574 PARAMETER Experiment Name: At_Wounding__cDNA_P Parameter: Timepoint (hr) Value: 1
  misc_feature: MA Experiment 108574 PARAMETER Experiment Name: At_Wounding__cDNA_P Parameter: Tissue Value: Aerial
  misc_feature: MA Experiment 108574 PARAMETER Experiment Name: At_Wounding__cDNA_P Parameter: Treatment Value: Wounding vs. No Wounding
  misc_feature: MA Experiment ID: 108579 Result: Down-regulated in Transcription
  misc_feature: MA Experiment 108579 PARAMETER Experiment Name: At_4deg_Cold_cDNA_P Parameter: Temperature (deg C) Value: 4 vs. 22
  misc_feature: MA Experiment 108579 PARAMETER Experiment Name: At_4deg_Cold_cDNA_P Parameter: Timepoint (hr) Value: 6
  misc_feature: MA Experiment 108579 PARAMETER Experiment Name: At_4deg_Cold_cDNA_P Parameter: Tissue Value: Aerial
  misc_feature: MA Experiment ID: 108585 Result: Up-regulated in Transcription
  misc_feature: MA Experiment 108585 PARAMETER Experiment Name: At_5mM_NaNP_cDNA_P Parameter: Timepoint (hr) Value: 6
  misc_feature: MA Experiment 108585 PARAMETER Experiment Name: At_5mM_NaNP_cDNA_P Parameter: Tissue Value: Aerial
  misc_feature: MA Experiment 108585 PARAMETER Experiment Name: At_5mM_NaNP_cDNA_P Parameter: Treatment Value: null
  misc_feature: MA Experiment ID: 108595 Result: Down-regulated in Transcription
  misc_feature: MA Experiment 108595 PARAMETER Experiment Name: At_Ler-pi_Ovule_cDNA_P Parameter: Plant Line Value: null
  misc_feature: MA Experiment ID: 20000185 Result: Down-regulated in Transcription
  misc_feature: MA Experiment 20000185 PARAMETER Experiment Name: At_Roots__P Parameter: Age (day) Value: 7 vs. 21
  misc_feature: MA Experiment 20000185 PARAMETER Experiment Name: At_Roots__P Parameter: Organism Value: A. thaliana
  misc_feature: MA Experiment 20000185 PARAMETER Experiment Name: At_Roots__P Parameter: Tissue Value: Roots vs. Whole Plant
  misc_feature: MA Experiment ID: 20000213 Result: Down-regulated in Transcription
  misc_feature: MA Experiment 20000213 PARAMETER Experiment Name: At_4deg_Cold_P Parameter: Timepoint (hr) Value: 2
  misc_feature: MA Experiment ID: 20000214 Result: Down-regulated in Transcription
  misc_feature: MA Experiment 20000214 PARAMETER Experiment Name: At_4deg_Cold_P Parameter: Timepoint (hr) Value: 6
  misc_feature: MA Experiment ID: 20000224 Result: Down-regulated in Transcription
  misc_feature: MA Experiment ID: 20000234 Result: Down-regulated in Transcription
  misc_feature: MA Experiment 20000234 PARAMETER Experiment Name: At_Siliques_P Parameter: Age (day) Value: 21
  misc_feature: MA Experiment 20000234 PARAMETER Experiment Name: At_Siliques_P Parameter: Organism Value: A. thaliana
  misc_feature: MA Experiment 20000234 PARAMETER Experiment Name: At_Siliques_P Parameter: Plant Line Value: WS
  misc_feature: MA Experiment 20000234 PARAMETER Experiment Name: At_Siliques_P Parameter: Tissue Value: Less Than 5mm Siliques vs. Whole Plant
  misc_feature: MA Experiment ID: 20000264 Result: Down-regulated in Transcription
  misc_feature: MA Experiment 20000264 PARAMETER Experiment Name: At_Open_Flower_P Parameter: Age (day) Value: 21
  misc_feature: MA Experiment 20000264 PARAMETER Experiment Name: At_Open_Flower_P Parameter: Plant Line Value: WS
  misc_feature: MA Experiment 20000264 PARAMETER Experiment Name: At_Open_Flower_P Parameter: Tissue Value: Open Flower vs. Whole Plant
  misc_feature: MA Experiment ID: 20000265 Result: Down-regulated in Transcription
  misc_feature: MA Experiment 20000265 PARAMETER Experiment Name: At_Open_Flower_P Parameter: Age (day) Value: 21
  misc_feature: MA Experiment 20000265 PARAMETER Experiment Name: At_Open_Flower_P Parameter: Plant Line Value: WS
  misc_feature: MA Experiment 20000265 PARAMETER Experiment Name: At_Open_Flower_P Parameter: Tissue Value: Closed Flower vs. Whole Plant
  misc_feature: MA Experiment ID: 20000268 Result: Down-regulated in Transcription
  misc_feature: MA Experiment 20000268 PARAMETER Experiment Name: At_100mM_NaCl__P Parameter: Age (day) Value: 14
  misc_feature: MA Experiment 20000268 PARAMETER Experiment Name: At_100mM_NaCl__P Parameter: Organism Value: A. thaliana
  misc_feature: MA Experiment 20000268 PARAMETER Experiment Name: At_100mM_NaCl__P Parameter: Plant Line Value: WS
  misc_feature: MA Experiment 20000268 PARAMETER Experiment Name: At_100mM_NaCl__P Parameter: Timepoint (hr) Value: 6
  misc_feature: MA Experiment 20000268 PARAMETER Experiment Name: At_100mM_NaCl__P Parameter: Tissue Value: Whole Plant
  misc_feature: MA Experiment 20000268 PARAMETER Experiment Name: At_100mM_NaCl__P Parameter: Treatment Value: 100mM NaCl vs. No Treatment
  misc_feature: MA Experiment ID: 20000286 Result: Down-regulated in Transcription
  misc_feature: MA Experiment 20000286 PARAMETER Experiment Name: At_Open_Flower_P Parameter: Age (day) Value: 21
  misc_feature: MA Experiment 20000286 PARAMETER Experiment Name: At_Open_Flower_P Parameter: Plant Line Value: WS
  misc_feature: MA Experiment 20000286 PARAMETER Experiment Name: At_Open_Flower_P Parameter: Tissue Value: Half Open vs. Whole Plant
  misc_feature: MA Experiment ID: 20000308 Result: Down-regulated in Transcription
  misc_feature: MA Experiment 20000308 PARAMETER Experiment Name: At_100mM_NaCl__P Parameter: Age (day) Value: 17
  misc_feature: MA Experiment 20000308 PARAMETER Experiment Name: At_100mM_NaCl__P Parameter: Organism Value: A. thaliana
  misc_feature: MA Experiment 20000308 PARAMETER Experiment Name: At_100mM_NaCl__P Parameter: Plant Line Value: WS
  misc_feature: MA Experiment 20000308 PARAMETER Experiment Name: At_100mM_NaCl__P Parameter: Timepoint (hr) Value: 72
  misc_feature: MA Experiment 20000308 PARAMETER Experiment Name: At_100mM_NaCl__P Parameter: Tissue Value: Whole Plant
  misc_feature: MA Experiment 20000308 PARAMETER Experiment Name: At_100mM_NaCl__P Parameter: Treatment Value: 100mM NaCl vs. No Treatment
  misc_feature: MA Experiment ID: 20000439 Result: Down-regulated in Transcription
  misc_feature: MA Experiment 20000439 PARAMETER Experiment Name: At_Roots__P Parameter: Age (day) Value: 14 vs. 21
  misc_feature: MA Experiment 20000439 PARAMETER Experiment Name: At_Roots__P Parameter: Organism Value: A. thaliana
  misc_feature: MA Experiment 20000439 PARAMETER Experiment Name: At_Roots__P Parameter: Tissue Value: Roots vs. Whole Plant
  misc_feature: MA Experiment ID: 20000441 Result: Up-regulated in Transcription
  misc_feature: MA Experiment 20000441 PARAMETER Experiment Name: At_1uM_BR-BRZ__P Parameter: Tissue Value: Shoot Apices
  misc_feature: MA Experiment 20000441 PARAMETER Experiment Name: At_1uM_BR-BRZ__P Parameter: Treatment Value: 1uM BR vs. No Treatment
  misc_feature: MA Experiment ID: 20000443 Result: Up-regulated in Transcription
  misc_feature: MA Experiment 20000443 PARAMETER Experiment Name: At_1uM_BR-BRZ__P Parameter: Tissue Value: Shoot Apices
  misc_feature: MA Experiment 20000443 PARAMETER Experiment Name: At_1uM_BR-BRZ__P Parameter: Treatment Value: 1uM BRZ vs. No Treatment
  misc_feature: MA Experiment ID: 20000573 Result: Up-regulated in Transcription
  misc_feature: MA Experiment 20000573 PARAMETER Experiment Name: At_100uM_ABA_Mutants__P Parameter: Organism Value: A. thaliana
  misc_feature: MA Experiment 20000573 PARAMETER Experiment Name: At_100uM_ABA_Mutants__P Parameter: Plant Line Value: CS22 vs. Ler wt
  misc_feature: MA Experiment 20000573 PARAMETER Experiment Name: At_100uM_ABA_Mutants__P Parameter: Timepoint (hr) Value: N/A
  misc_feature: MA Experiment 20000573 PARAMETER Experiment Name: At_100uM_ABA_Mutants__P Parameter: Tissue Value: Whole Plant
  misc_feature: MA Experiment 20000573 PARAMETER Experiment Name: At_100uM_ABA_Mutants__P Parameter: Treatment Value: None
  misc_feature: MA Experiment ID: 20000794 Result: Down-regulated in Transcription
  misc_feature: MA Experiment 20000794 PARAMETER Experiment Name: At_Petals_P Parameter: Age (day) Value: 23-25 days
  misc_feature: MA Experiment 20000794 PARAMETER Experiment Name: At_Petals_P Parameter: Plant Line Value: WS
  misc_feature: MA Experiment 20000794 PARAMETER Experiment Name: At_Petals_P Parameter: Tissue Value: Petals vs. Whole plant
  misc_feature: MA Experiment ID: 20001248 Result: Up-regulated in Transcription
  misc_feature: MA Experiment 20001248 PARAMETER Experiment Name: At_Far-red-induction_P Parameter: Age (day) Value: 7
  misc_feature: MA Experiment 20001248 PARAMETER Experiment Name: At_Far-red-induction_P Parameter: Light Value: Far-red vs. White
  misc_feature: MA Experiment 20001248 PARAMETER Experiment Name: At_Far-red-induction_P Parameter: Organism Value: A. thaliana
  misc_feature: MA Experiment 20001248 PARAMETER Experiment Name: At_Far-red-induction_P Parameter: Plant Line Value: Columbia
  misc_feature: MA Experiment 20001248 PARAMETER Experiment Name: At_Far-red-induction_P Parameter: Timepoint (hr) Value: 4
  misc_feature: MA Experiment 20001248 PARAMETER Experiment Name: At_Far-red-induction_P Parameter: Tissue Value: Whole Plant
  misc_feature: MA Experiment ID: 20001450 Result: Up-regulated in Transcription
  misc_feature: MA Experiment 20001450 PARAMETER Experiment Name: At_Far-red-induction_P Parameter: Age (day) Value: 7
  misc_feature: MA Experiment 20001450 PARAMETER Experiment Name: At_Far-red-induction_P Parameter: Light Value: Far-red vs. White
  misc_feature: MA Experiment 20001450 PARAMETER Experiment Name: At_Far-red-induction_P Parameter: Organism Value: A. thaliana
  misc_feature: MA Experiment 20001450 PARAMETER Experiment Name: At_Far-red-induction_P Parameter: Plant Line Value: Columbia
  misc_feature: MA Experiment 20001450 PARAMETER Experiment Name: At_Far-red-induction_P Parameter: Timepoint (hr) Value: 8
  misc_feature: MA Experiment 20001450 PARAMETER Experiment Name: At_Far-red-induction_P Parameter: Tissue Value: Whole Plant
  misc_feature: MA Experiment ID: 20001451 Result: Up-regulated in Transcription
  misc_feature: MA Experiment 20001451 PARAMETER Experiment Name: At_Far-red-induction_P Parameter: Age (day) Value: 7
  misc_feature: MA Experiment 20001451 PARAMETER Experiment Name: At_Far-red-induction_P Parameter: Light Value: Far-red vs. White
  misc_feature: MA Experiment 20001451 PARAMETER Experiment Name: At_Far-red-induction_P Parameter: Organism Value: A. thaliana
  misc_feature: MA Experiment 20001451 PARAMETER Experiment Name: At_Far-red-induction_P Parameter: Plant Line Value: Columbia
  misc_feature: MA Experiment 20001451 PARAMETER Experiment Name: At_Far-red-induction_P Parameter: Timepoint (hr) Value: 24
  misc_feature: MA Experiment 20001451 PARAMETER Experiment Name: At_Far-red-induction_P Parameter: Tissue Value: Whole Plant
  misc_feature: MA Experiment ID: 20001556 Result: Down-regulated in Transcription
  misc_feature: MA Experiment 20001556 PARAMETER Experiment Name: At_Drought_Soil_Dry_P Parameter: Age (day) Value: 26
  misc_feature: MA Experiment 20001556 PARAMETER Experiment Name: At_Drought_Soil_Dry_P Parameter: Organism Value: A. thaliana
  misc_feature: MA Experiment 20001556 PARAMETER Experiment Name: At_Drought_Soil_Dry_P Parameter: Plant Line Value: WS
  misc_feature: MA Experiment 20001556 PARAMETER Experiment Name: At_Drought_Soil_Dry_P Parameter: Post Timepoint (hr) Value: None
  misc_feature: MA Experiment 20001556 PARAMETER Experiment Name: At_Drought_Soil_Dry_P Parameter: Post-Treatment Value: None
  misc_feature: MA Experiment 20001556 PARAMETER Experiment Name: At_Drought_Soil_Dry_P Parameter: Timepoint (day) Value: 12
  misc_feature: MA Experiment 20001556 PARAMETER Experiment Name: At_Drought_Soil_Dry_P Parameter: Treatment Value: Drought vs. No Drought
  misc_feature: MA Experiment ID: 20001557 Result: Down-regulated in Transcription
  misc_feature: MA Experiment 20001557 PARAMETER Experiment Name: At_Drought_Soil_Dry_P Parameter: Age (day) Value: 27
  misc_feature: MA Experiment 20001557 PARAMETER Experiment Name: At_Drought_Soil_Dry_P Parameter: Organism Value: A. thaliana
  misc_feature: MA Experiment 20001557 PARAMETER Experiment Name: At_Drought_Soil_Dry_P Parameter: Plant Line Value: WS
  misc_feature: MA Experiment 20001557 PARAMETER Experiment Name: At_Drought_Soil_Dry_P Parameter: Post Timepoint (hr) Value: 3
  misc_feature: MA Experiment 20001557 PARAMETER Experiment Name: At_Drought_Soil_Dry_P Parameter: Post-Treatment Value: Re-Water vs. No Drought
  misc_feature: MA Experiment 20001557 PARAMETER Experiment Name: At_Drought_Soil_Dry_P Parameter: Timepoint (day) Value: 13
  misc_feature: MA Experiment 20001557 PARAMETER Experiment Name: At_Drought_Soil_Dry_P Parameter: Treatment Value: Drought vs. No Drought
  misc_feature: MA Experiment ID: 20001558 Result: Down-regulated in Transcription
  misc_feature: MA Experiment 20001558 PARAMETER Experiment Name: At_Drought_Soil_Dry_P Parameter: Age (day) Value: 27
  misc_feature: MA Experiment 20001558 PARAMETER Experiment Name: At_Drought_Soil_Dry_P Parameter: Organism Value: A. thaliana
  misc_feature: MA Experiment 20001558 PARAMETER Experiment Name: At_Drought_Soil_Dry_P Parameter: Plant Line Value: WS
  misc_feature: MA Experiment 20001558 PARAMETER Experiment Name: At_Drought_Soil_Dry_P Parameter: Post Timepoint (hr) Value: 6
  misc_feature: MA Experiment 20001558 PARAMETER Experiment Name: At_Drought_Soil_Dry_P Parameter: Post-Treatment Value: Re-Water vs. No Drought
  misc_feature: MA Experiment 20001558 PARAMETER Experiment Name: At_Drought_Soil_Dry_P Parameter: Timepoint (day) Value: 13
  misc_feature: MA Experiment 20001558 PARAMETER Experiment Name: At_Drought_Soil_Dry_P Parameter: Treatment Value: Drought vs. No Drought
  misc_feature: MA Experiment ID: 20001559 Result: Down-regulated in Transcription
  misc_feature: MA Experiment 20001559 PARAMETER Experiment Name: At_Drought_Soil_Dry_P Parameter: Age (day) Value: 28
  misc_feature: MA Experiment 20001559 PARAMETER Experiment Name: At_Drought_Soil_Dry_P Parameter: Organism Value: A. thaliana
  misc_feature: MA Experiment 20001559 PARAMETER Experiment Name: At_Drought_Soil_Dry_P Parameter: Plant Line Value: WS
  misc_feature: MA Experiment 20001559 PARAMETER Experiment Name: At_Drought_Soil_Dry_P Parameter: Post Timepoint (hr) Value: 29
  misc_feature: MA Experiment 20001559 PARAMETER Experiment Name: At_Drought_Soil_Dry_P Parameter: Post-Treatment Value: Re-Water vs. No Drought
  misc_feature: MA Experiment 20001559 PARAMETER Experiment Name: At_Drought_Soil_Dry_P Parameter: Timepoint (day) Value: 14
  misc_feature: MA Experiment 20001559 PARAMETER Experiment Name: At_Drought_Soil_Dry_P Parameter: Treatment Value: Drought vs. No Drought
  misc_feature: MA Experiment ID: 20001560 Result: Down-regulated in Transcription
  misc_feature: MA Experiment 20001560 PARAMETER Experiment Name: At_Drought_Soil_Dry_P Parameter: Age (day) Value: 28
  misc_feature: MA Experiment 20001560 PARAMETER Experiment Name: At_Drought_Soil_Dry_P Parameter: Organism Value: A. thaliana
  misc_feature: MA Experiment 20001560 PARAMETER Experiment Name: At_Drought_Soil_Dry_P Parameter: Plant Line Value: WS
  misc_feature: MA Experiment 20001560 PARAMETER Experiment Name: At_Drought_Soil_Dry_P Parameter: Post Timepoint (hr) Value: None
  misc_feature: MA Experiment 20001560 PARAMETER Experiment Name: At_Drought_Soil_Dry_P Parameter: Post-Treatment Value: None
  misc_feature: MA Experiment 20001560 PARAMETER Experiment Name: At_Drought_Soil_Dry_P Parameter: Timepoint (day) Value: 14
  misc_feature: MA Experiment 20001560 PARAMETER Experiment Name: At_Drought_Soil_Dry_P Parameter: Treatment Value: Drought vs. No Drought
  misc_feature: MA Experiment ID: 20001757 Result: Up-regulated in Transcription
  misc_feature: MA Experiment 20001757 PARAMETER Experiment Name: At_50mM_NH4NO3_L-to-H_P Parameter: Timepoint (hr) Value: 6
  misc_feature: MA Experiment 20001757 PARAMETER Experiment Name: At_50mM_NH4NO3_L-to-H_P Parameter: Tissue Value: Leaf
  misc_feature: MA Experiment 20001757 PARAMETER Experiment Name: At_50mM_NH4NO3_L-to-H_P Parameter: Treatment Value: 50mM NH4NO3 vs 100mM Mannitol
  misc_feature: MA Experiment ID: 20001906 Result: Down-regulated in Transcription
  misc_feature: MA Experiment 20001906 PARAMETER Experiment Name: At_Drought_Reproduction_P Parameter: Age (day) Value: 35
  misc_feature: MA Experiment 20001906 PARAMETER Experiment Name: At_Drought_Reproduction_P Parameter: Organism Value: A. thaliana
  misc_feature: MA Experiment 20001906 PARAMETER Experiment Name: At_Drought_Reproduction_P Parameter: Plant Line Value: WS
  misc_feature: MA Experiment 20001906 PARAMETER Experiment Name: At_Drought_Reproduction_P Parameter: Timepoint (day) Value: 5
  misc_feature: MA Experiment 20001906 PARAMETER Experiment Name: At_Drought_Reproduction_P Parameter: Tissue Value: Siliques
  misc_feature: MA Experiment 20001906 PARAMETER Experiment Name: At_Drought_Reproduction_P Parameter: Treatment Value: Drought vs. No Drought
  misc_feature: MA Experiment ID: 20001908 Result: Down-regulated in Transcription
  misc_feature: MA Experiment 20001908 PARAMETER Experiment Name: At_Drought_Reproduction_P Parameter: Age (day) Value: 40
  misc_feature: MA Experiment 20001908 PARAMETER Experiment Name: At_Drought_Reproduction_P Parameter: Organism Value: A. thaliana
  misc_feature: MA Experiment 20001908 PARAMETER Experiment Name: At_Drought_Reproduction_P Parameter: Plant Line Value: WS
  misc_feature: MA Experiment 20001908 PARAMETER Experiment Name: At_Drought_Reproduction_P Parameter: Timepoint (day) Value: 10
  misc_feature: MA Experiment 20001908 PARAMETER Experiment Name: At_Drought_Reproduction_P Parameter: Tissue Value: Siliques
  misc_feature: MA Experiment 20001908 PARAMETER Experiment Name: At_Drought_Reproduction_P Parameter: Treatment Value: Drought vs. No Drought
atctctctcctctctttgtctctctcgcttctgtgatttgggctttttcagatgggaaatgcgaacggcaaagacgaagacgccgccgccggtagcggtggtgcagatgttacctcgtcctcggcgagatctaatggcggcgatccttctgcacgcagtcgtcaccgtcgtccttcttcagactctatgagcagttctcctcccggaagtcctgctcgatctccatctcctttcttattcgctcctcagcccacattgttattccacgttacatcttacaacatttgctcacctatgcgtcacctcttccattgtttaggcttaacatgtgtacctaatggctgcatttcgtgtcggatggttcccgtggctccattgcagagagcaaacgcccctccttctcctaataacatccaatggaaccaatcacagagagtttttgataatcccccagagcaaggaatccctaccatcattacatggaaccaaggaggtaatgatgtggcggtggaaggatcatgggacaattggagatcaaggaagaagctgcagaaatcagggaaagaccactcgattctctttgtccttccatctggcatataccactacaaggtgattgtggacggtgaatccaaatacatcccagatttaccctttgtagcagacgaagttggcaatgtctgtaacattctcgatgttcataactttgtgccagaaaacccagaaagcatagtggagtttgaggcgccaccatcacctgatcatagctacggtcaaaccctaccagccgcagaagattacgcgaaagagccactggcggtgccacctcagcttcatctaacacttcttggcactactgaagagacagcgatagccacaaagcctcaacatgtggtgcttaaccatgtgttcatagagcaaggatggactcctcaatccatagtagctttgggtttaacccacaggttcgagtctaagtacataactgttgtcctctacaaaccgctcacacggtaaccctaaaaattcagtgccacattgttctctctctttctttctttttcatctctcaattatgtgaaaacatgttctttgttcatagtgactagtgagtgcccaacatttgagtttattaacctctttcttacctggtttgtggtgcttgtgc

SEQ ID NO: 29177 - protein, 321 aa, Arabidopsis thaliana
  peptide (1)..(321): Ceres Seq. ID no. 12334929
  misc_feature (233)..(319): Pfam Name: 5'-AMP-activated protein kinase, beta subunit, Pfam Description: 5'-AMP-activated protein kinase, beta subunit,
  misc_feature (23)..(66): Homolog of NCBI NO: 29725558 NR Description: SNF1 kinase complex anchoring protein
  misc_feature (104)..(279): Homolog of NCBI NO: 29725558 NR Description: SNF1 kinase complex anchoring protein
  misc_feature (1)..(69): Homolog of NCBI NO: 6686784 NR Description: AKIN beta2 [Arabidopsis thaliana]
  misc_feature (104)..(321): Homolog of NCBI NO: 6686784 NR Description: AKIN beta2 [Arabidopsis thaliana]
  misc_feature (1)..(66): Homolog of NCBI NO: 5702015 NR Description: GAL83 protein [Solanum tuberosum]
  misc_feature (104)..(321): Homolog of NCBI NO: 5702015 NR Description: GAL83 protein [Solanum tuberosum]
  misc_feature (1)..(66): Homolog of NCBI NO: 15242175 NR Description: AKIN beta1; protein id: At5g21170.1, supported by
  misc_feature (95)..(321): Homolog of NCBI NO: 15242175 NR Description: AKIN beta1; protein id: At5g21170.1, supported by
  misc_feature (1)..(66): Homolog of NCBI NO: 6686782 NR Description: AKIN gamma [Arabidopsis thaliana]
  misc_feature (95)..(321): Homolog of NCBI NO: 6686782 NR Description: AKIN gamma [Arabidopsis thaliana]
MGNANGKDEDAAAGSGGADVTSSSARSNGGDPSARSRHRRPSSDSMSSSPPGSPARSPSPFLFAPQPTLLFHVTSYNICSPMRHLFHCLGLTCVPNGCISCRMVPVAPLQRANAPPSPNNIQWNQSQRVFDNPPEQGIPTIITWNQGGNDVAVEGSWDNWRSRKKLQKSGKDHSILFVLPSGIYHYKVIVDGESKYIPDLPFVADEVGNVCNILDVHNFVPENPESIVEFEAPPSPDHSYGQTLPAAEDYAKEPLAVPPQLHLTLLGTTEETAIATKPQHVVLNHVFIEQGWTPQSIVALGLTHRFESKYITVVLYKPLTR

SEQ ID NO: 29178 - protein, 276 aa, Arabidopsis thaliana
  peptide (1)..(276): Ceres Seq. ID no. 12334930
  misc_feature (188)..(274): Pfam Name: 5'-AMP-activated protein kinase, beta subunit, Pfam Description: 5'-AMP-activated protein kinase, beta subunit,
  misc_feature (1)..(21): Homolog of NCBI NO: 29725558 NR Description: SNF1 kinase complex anchoring protein
  misc_feature (59)..(234): Homolog of NCBI NO: 29725558 NR Description: SNF1 kinase complex anchoring protein
  misc_feature (1)..(24): Homolog of NCBI NO: 6686784 NR Description: AKIN beta2 [Arabidopsis thaliana]
  misc_feature (59)..(276): Homolog of NCBI NO: 6686784 NR Description: AKIN beta2 [Arabidopsis thaliana]
  misc_feature (1)..(21): Homolog of NCBI NO: 5702015 NR Description: GAL83 protein [Solanum tuberosum]
  misc_feature (59)..(276): Homolog of NCBI NO: 5702015 NR Description: GAL83 protein [Solanum tuberosum]
  misc_feature (1)..(21): Homolog of NCBI NO: 15242175 NR Description: AKIN beta1; protein id: At5g21170.1, supported by
  misc_feature (50)..(276): Homolog of NCBI NO: 15242175 NR Description: AKIN beta1; protein id: At5g21170.1, supported by
  misc_feature (1)..(21): Homolog of NCBI NO: 6686782 NR Description: AKIN gamma [Arabidopsis thaliana]
  misc_feature (50)..(276): Homolog of NCBI NO: 6686782 NR Description: AKIN gamma [Arabidopsis thaliana]
MSSSPPGSPARSPSPFLFAPQPTLLFHVTSYNICSPMRHLFHCLGLTCVPNGCISCRMVPVAPLQRANAPPSPNNIQWNQSQRVFDNPPEQGIPTIITWNQGGNDVAVEGSWDNWRSRKKLQKSGKDHSILFVLPSGIYHYKVIVDGESKYIPDLPFVADEVGNVCNILDVHNFVPENPESIVEFEAPPSPDHSYGQTLPAAEDYAKEPLAVPPQLHLTLLGTTEETAIATKPQHVVLNHVFIEQGWTPQSIVALGLTHRFESKYITVVLYKPLTR

SEQ ID NO: 29179 - protein, 240 aa, Arabidopsis thaliana
  peptide (1)..(240): Ceres Seq. ID no. 12334931
  misc_feature (152)..(238): Pfam Name: 5'-AMP-activated protein kinase, beta subunit, Pfam Description: 5'-AMP-activated protein kinase, beta subunit,
  misc_feature (25)..(238): Homolog of NCBI NO: 12018316 NR Description: AMP-activated protein kinase beta-2 regulatory
  misc_feature (25)..(238): Homolog of NCBI NO: 4885561 NR Description: protein kinase, AMP-activated, beta 2
  misc_feature (24)..(240): Homolog of NCBI NO: 22324436 NR Description: AKIN beta1-like protein [Oryza sativa (japonica
  misc_feature (23)..(240): Homolog of NCBI NO: 15234895 NR Description: kinase like protein; protein id: At4g16360.1
  misc_feature (23)..(240): Homolog of NCBI NO: 11935162 NR Description: SNF1-related kinase complex anchoring protein
  misc_feature (23)..(198): Homolog of NCBI NO: 29725558 NR Description: SNF1 kinase complex anchoring protein
  misc_feature (23)..(240): Homolog of NCBI NO: 6686784 NR Description: AKIN beta2 [Arabidopsis thaliana]
  misc_feature (23)..(240): Homolog of NCBI NO: 5702015 NR Description: GAL83 protein [Solanum tuberosum]
  misc_feature (14)..(240): Homolog of NCBI NO: 15242175 NR Description: AKIN beta1; protein id: At5g21170.1, supported by
  misc_feature (14)..(240): Homolog of NCBI NO: 6686782 NR Description: AKIN gamma [Arabidopsis thaliana]
MRHLFHCLGLTCVPNGCISCRMVPVAPLQRANAPPSPNNIQWNQSQRVFDNPPEQGIPTIITWNQGGNDVAVEGSWDNWRSRKKLQKSGKDHSILFVLPSGIYHYKVIVDGESKYIPDLPFVADEVGNVCNILDVHNFVPENPESIVEFEAPPSPDHSYGQTLPAAEDYAKEPLAVPPQLHLTLLGTTEETAIATKPQHVVLNHVFIEQGWTPQSIVALGLTHRFESKYITVVLYKPLTR

SEQ ID NO: 29180 - DNA, 1255 bp, Arabidopsis thaliana
  misc_feature (1)..(1255): Ceres Seq. ID no. 12329816
cttatttttcttctccttcttgttccgtctgcttctctccatctccttccatatctattgttctctctctcttcatgcccgaacgcatcgggtctcaaaaaccattgatacagacatcgatccttgtcaactagtactgatctataaatcttataaaaatctgtagagatatggccgccgcagccgtttcctctaaccctcgcaccgttgaagagatcttcaaagattattccgctcgtcgtgccgctcttcttcgtgctctcactaaagatgttgatgatttttactctcaatgcgatccggaaaaggagaatttgtgtttgtacggacaccctaatgagtcatgggaagtgaatctaccagcagaggaagtgcctccggagctacctgagcctgctcttggtatcaatttcgctagagatggtatgcagaggaaagattggctttctcttgttgctgttcacagtgattgttggttgctctctgtttctttctactttggagcccgtcttaatcgcaatgagaggaagcggttattcagtctgatcaacgatctcccaactctcttcgatgtagtgactggtaggaaagccatgaaagacaacaagccaagctcggactcaggaagcaaatccagaaatggcactaagagatcaatagacgggcagacaaagagctcaacaccgaaactaatggaagagagctatgaggaggaggaagaagaagacgagcatggagacactctctgtggaagctgtggaggtcattacacaaatgaggagttctggatttgctgtgatgtttgtgaacgttggtaccatggaaaatgcgtcaagataactccggctaaagcagagagcatcaagcagtataaatgcccgccttgctgtgcaaagaaaggaagacagtgatgctgatcaattgatgatgatgatgatgatgatctctcagagagactctggttctcatgttttaatcaatatgttaatcaactttttttcttttcttctctttttttctttaaccttcttaattttaaagcatacaaaactctctctttagatctcaagaaagggatttcaagaagttgagggagagagtagcaaactgtttgaataatattattattattcatattaaaaaaaaaaaaactgggttgtgtcatcaattgtgttgtgtcatggggtttgtatatgttagacttagtcaaatctttaagcttcgaaccgaattttgaacaaatatgtttttaatc

SEQ ID NO: 29181 - protein, 246 aa, Arabidopsis thaliana
  peptide (1)..(246): Ceres Seq. ID no. 12329817
  misc_feature (192)..(242): Pfam Name: PHD-finger Pfam Description: PHD-finger
  misc_feature (10)..(243): Homolog of NCBI NO: 15223786 NR Description: nucleic acid binding protein (alfin-1), putative
  misc_feature (10)..(245): Homolog of NCBI NO: 7488751 NR Description: probable zinc finger protein - alfalfa (fragment)
  misc_feature (1)..(245): Homolog of NCBI NO: 30687843 NR Description: zinc finger protein - like [Arabidopsis thaliana]
  misc_feature (9)..(245): Homolog of NCBI NO: 15239624 NR Description: nucleic acid binding protein - like
  misc_feature (1)..(245): Homolog of NCBI NO: 15229157 NR Description: nucleic acid binding protein-like
  misc_feature (3)..(246): Homolog of NCBI NO: 29124114 NR Description: putative PHD-type zinc finger protein
  misc_feature (1)..(246): Homolog of NCBI NO: 28876028 NR Description: putative PHD-finger domain containing protein
  misc_feature (3)..(246): Homolog of NCBI NO: 34900462 NR Description: putative nucleic acid binding protein
  misc_feature (4)..(246): Homolog of NCBI NO: 15239180 NR Description: nucleic acid binding protein-like
  misc_feature (1)..(246): Homolog of NCBI NO: 15229696 NR Description: putative nucleic acid binding protein
MAAAAVSSNPRTVEEIFKDYSARRAALLRALTKDVDDFYSQCDPEKENLCLYGHPNESWEVNLPAEEVPPELPEPALGINFARDGMQRKDWLSLVAVHSDCWLLSVSFYFGARLNRNERKRLFSLINDLPTLFDVVTGRKAMKDNKPSSDSGSKSRNGTKRSIDGQTKSSTPKLMEESYEEEEEEDEHGDTLCGSCGGHYTNEEFWICCDVCERWYHGKCVKITPAKAESIKQYKCPPCCAKKGRQ

SEQ ID NO: 29182 - protein, 161 aa, Arabidopsis thaliana
  peptide (1)..(161): Ceres Seq. ID no. 12329818
  misc_feature (107)..(157): Pfam Name: PHD-finger Pfam Description: PHD-finger
  misc_feature (1)..(158): Homolog of NCBI NO: 15223786 NR Description: nucleic acid binding protein (alfin-1), putative
  misc_feature (1)..(160): Homolog of NCBI NO: 7488751 NR Description: probable zinc finger protein - alfalfa (fragment)
  misc_feature (1)..(160): Homolog of NCBI NO: 30687843 NR Description: zinc finger protein - like [Arabidopsis thaliana]
  misc_feature (1)..(160): Homolog of NCBI NO: 15239624 NR Description: nucleic acid binding protein - like
  misc_feature (1)..(160): Homolog of NCBI NO: 15229157 NR Description: nucleic acid binding protein-like
  misc_feature (1)..(161): Homolog of NCBI NO: 29124114 NR Description: putative PHD-type zinc finger protein
  misc_feature (1)..(161): Homolog of NCBI NO: 28876028 NR Description: putative PHD-finger domain containing protein
  misc_feature (1)..(161): Homolog of NCBI NO: 34900462 NR Description: putative nucleic acid binding protein
  misc_feature (1)..(161): Homolog of NCBI NO: 15239180 NR Description: nucleic acid binding protein-like
  misc_feature (1)..(161): Homolog of NCBI NO: 15229696 NR Description: putative nucleic acid binding protein
MQRKDWLSLVAVHSDCWLLSVSFYFGARLNRNERKRLFSLINDLPTLFDVVTGRKAMKDNKPSSDSGSKSRNGTKRSIDGQTKSSTPKLMEESYEEEEEEDEHGDTLCGSCGGHYTNEEFWICCDVCERWYHGKCVKITPAKAESIKQYKCPPCCAKKGRQ

SEQ ID NO: 29183 - DNA, 999 bp, Arabidopsis thaliana
  misc_feature (1)..(999): Ceres Seq. ID no. 12330335
  misc_feature: MA Experiment ID: 108434 Result: Up-regulated in Transcription
  misc_feature: MA Experiment 108434 PARAMETER Experiment Name: At_Root_Tips_cDNA_P Parameter: Tissue Value: Root Tips
  misc_feature: MA Experiment ID: 108462 Result: Down-regulated in Transcription
  misc_feature: MA Experiment 108462 PARAMETER Experiment Name: At_Germinating_Seeds_cDNA_P Parameter: Age (day) Value: 2 vs. 0
  misc_feature: MA Experiment 108462 PARAMETER Experiment Name: At_Germinating_Seeds_cDNA_P Parameter: Tissue Value: Germinating Seeds
  misc_feature: MA Experiment ID: 108463 Result: Down-regulated in Transcription
  misc_feature: MA Experiment 108463 PARAMETER Experiment Name: At_Germinating_Seeds_cDNA_P Parameter: Age (day) Value: 3 vs. 0
  misc_feature: MA Experiment 108463 PARAMETER Experiment Name: At_Germinating_Seeds_cDNA_P Parameter: Tissue Value: Germinating Seeds
  misc_feature: MA Experiment ID: 108573 Result: Down-regulated in Transcription
  misc_feature: MA Experiment 108573 PARAMETER Experiment Name: At_Drought_cDNA_P Parameter: Timepoint (hr) Value: 6
  misc_feature: MA Experiment 108573 PARAMETER Experiment Name: At_Drought_cDNA_P Parameter: Tissue Value: Aerial
  misc_feature: MA Experiment 108573 PARAMETER Experiment Name: At_Drought_cDNA_P Parameter: Treatment Value: Drought vs. No Drought
  misc_feature: MA Experiment ID: 108595 Result: Down-regulated in Transcription
  misc_feature: MA Experiment 108595 PARAMETER Experiment Name: At_Ler-pi_Ovule_cDNA_P Parameter: Plant Line Value: null
  misc_feature: MA Experiment ID: 20000224 Result: Down-regulated in Transcription
  misc_feature: MA Experiment ID: 20000234 Result: Up-regulated in Transcription
  misc_feature: MA Experiment 20000234 PARAMETER Experiment Name: At_Siliques_P Parameter: Age (day) Value: 21
  misc_feature: MA Experiment 20000234 PARAMETER Experiment Name: At_Siliques_P Parameter: Organism Value: A. thaliana
  misc_feature: MA Experiment 20000234 PARAMETER Experiment Name: At_Siliques_P Parameter: Plant Line Value: WS
  misc_feature: MA Experiment 20000234 PARAMETER Experiment Name: At_Siliques_P Parameter: Tissue Value: Less Than 5mm Siliques vs. Whole Plant
  misc_feature: MA Experiment ID: 20000437 Result: Down-regulated in Transcription
  misc_feature: MA Experiment 20000437 PARAMETER Experiment Name: At_Drought_P Parameter: Age (day) Value: 8
  misc_feature: MA Experiment 20000437 PARAMETER Experiment Name: At_Drought_P Parameter: Organism Value: A. thaliana
  misc_feature: MA Experiment 20000437 PARAMETER Experiment Name: At_Drought_P Parameter: Plant Line Value: WS
  misc_feature: MA Experiment 20000437 PARAMETER Experiment Name: At_Drought_P Parameter: Timepoint (hr) Value: 24
  misc_feature: MA Experiment 20000437 PARAMETER Experiment Name: At_Drought_P Parameter: Tissue Value: Whole Plant
  misc_feature: MA Experiment 20000437 PARAMETER Experiment Name: At_Drought_P Parameter: Treatment Value: Drought vs. No Drought
  misc_feature: MA Experiment ID: 20000794 Result: Down-regulated in Transcription
  misc_feature: MA Experiment 20000794 PARAMETER Experiment Name: At_Petals_P Parameter: Age (day) Value: 23-25 days
  misc_feature: MA Experiment 20000794 PARAMETER Experiment Name: At_Petals_P Parameter: Plant Line Value: WS
  misc_feature: MA Experiment 20000794 PARAMETER Experiment Name: At_Petals_P Parameter: Tissue Value: Petals vs. Whole plant
  misc_feature: MA Experiment ID: 20001451 Result: Down-regulated in Transcription
  misc_feature: MA Experiment 20001451 PARAMETER Experiment Name: At_Far-red-induction_P Parameter: Age (day) Value: 7
  misc_feature: MA Experiment 20001451 PARAMETER Experiment Name: At_Far-red-induction_P Parameter: Light Value: Far-red vs. White
  misc_feature: MA Experiment 20001451 PARAMETER Experiment Name: At_Far-red-induction_P Parameter: Organism Value: A. thaliana
  misc_feature: MA Experiment 20001451 PARAMETER Experiment Name: At_Far-red-induction_P Parameter: Plant Line Value: Columbia
  misc_feature: MA Experiment 20001451 PARAMETER Experiment Name: At_Far-red-induction_P Parameter: Timepoint (hr) Value: 24
  misc_feature: MA Experiment 20001451 PARAMETER Experiment Name: At_Far-red-induction_P Parameter: Tissue Value: Whole Plant
  misc_feature: MA Experiment ID: 20001558 Result: Up-regulated in Transcription
  misc_feature: MA Experiment 20001558 PARAMETER Experiment Name: At_Drought_Soil_Dry_P Parameter: Age (day) Value: 27
  misc_feature: MA Experiment 20001558 PARAMETER Experiment Name: At_Drought_Soil_Dry_P Parameter: Organism Value: A. thaliana
  misc_feature: MA Experiment 20001558 PARAMETER Experiment Name: At_Drought_Soil_Dry_P Parameter: Plant Line Value: WS
  misc_feature: MA Experiment 20001558 PARAMETER Experiment Name: At_Drought_Soil_Dry_P Parameter: Post Timepoint (hr) Value: 6
  misc_feature: MA Experiment 20001558 PARAMETER Experiment Name: At_Drought_Soil_Dry_P Parameter: Post-Treatment Value: Re-Water vs. No Drought
  misc_feature: MA Experiment 20001558 PARAMETER Experiment Name: At_Drought_Soil_Dry_P Parameter: Timepoint (day) Value: 13
  misc_feature: MA Experiment 20001558 PARAMETER Experiment Name: At_Drought_Soil_Dry_P Parameter: Treatment Value: Drought vs. No Drought
  misc_feature: MA Experiment ID: 20001757 Result: Up-regulated in Transcription
  misc_feature: MA Experiment 20001757 PARAMETER Experiment Name: At_50mM_NH4NO3_L-to-H_P Parameter: Timepoint (hr) Value: 6
  misc_feature: MA Experiment 20001757 PARAMETER Experiment Name: At_50mM_NH4NO3_L-to-H_P Parameter: Tissue Value: Leaf
  misc_feature: MA Experiment 20001757 PARAMETER Experiment Name: At_50mM_NH4NO3_L-to-H_P Parameter: Treatment Value: 50mM NH4NO3 vs 100mM Mannitol
ataaaactcacatcgccgctgataattccgcctctgagaaattgcgttcgattacagctccacagaggattcggaaatggttgagtcaaaggttgtagttccagagtcggtgttgaagaagaggaagagagaggaggaatgggctttggagaagaagcagaatgttgaagccgccaagaagaagaacgccgagaacaggaagcttatcttcaaaagagccgagcaatactccaaggaatatgccgagaaggagaaggagttgatctcgttgaaacgcgaggccaagcttaagggaggtttctatgttgaccctgaagctaagctcttgttcatcatccgtatccgtggtatcaatgccattgaccctaagactaagaagattctccagctcttgcgtttgagacagattttcaatggtgttttccttaaagtcaacaaggctacgatgaacatgcttcgccgtgttgagccctatgtcacttacggattccctaacttgaagagtgtcaaggaattgatctacaagagaggttacggaaagcttaaccaccagaggatagctttgactgacaactctattgtagagcaggctcttggaaagcatggtatcatttgcactgaggatttgatccacgagattctaacagtaggacctcatttcaaggaagccaacaacttcctttggccattccagcttaaggcaccactaggtggcctcaagaagaagagaaatcactacgtggaaggtggtgatgccggaaaccgtgagaacttcatcaatgagcttatcaggaggatgaattagaatgttatcgttttcaatgtcaaacttctctgcgttttcattatgtgcctcctcctggattttgatcttctttctcaagttaaaagacattttgaatcttctcttttgttctctttggatcttaatttgtgctttgattactgcaagtgattctacatttctctttaataggattattaagaaactgtttctcc

SEQ ID NO: 29184 - protein, 242 aa, Arabidopsis thaliana
  peptide (1)..(242): Ceres Seq. ID no. 12330336
  misc_feature (82)..(134): Pfam Name: Ribosomal protein L30p/L7e Pfam Description: Ribosomal protein L30p/L7e
  misc_feature (8)..(242): Homolog of NCBI NO: 307388 NR Description: ribosomal protein L7
  misc_feature (8)..(241): Homolog of NCBI NO: 28630259 NR Description: ribosomal protein L7 [Branchiostoma lanceolatum]
  misc_feature (4)..(242): Homolog of NCBI NO: 38346542 NR Description: OSJNBa0035M09.3 [Oryza sativa (japonica
  misc_feature (2)..(242): Homolog of NCBI NO: 38637548 NR Description: putative 60S ribosomal protein L7
  misc_feature (1)..(242): Homolog of NCBI NO: 445613 NR Description: ribosomal protein L7
  misc_feature (1)..(242): Homolog of NCBI NO: 27311547 NR Description: Unknown protein [Arabidopsis thaliana]
  misc_feature (1)..(242): Homolog of NCBI NO: 30689617 NR Description: 60S ribosomal protein L7 (RPL7C) [Arabidopsis
  misc_feature (3)..(242): Homolog of NCBI NO: 15231288 NR Description: ribosomal protein, putative
  misc_feature (1)..(242): Homolog of NCBI NO: 30689623 NR Description: 60S ribosomal protein L7 (RPL7C) [Arabidopsis
  misc_feature (1)..(242): Homolog of NCBI NO: 15226212 NR Description: putative ribosomal protein L7
MVESKVVVPESVLKKRKREEEWALEKKQNVEAAKKKNAENRKLIFKRAEQYSKEYAEKEKELISLKREAKLKGGFYVDPEAKLLFIIRIRGINAIDPKTKKILQLLRLRQIFNGVFLKVNKATMNMLRRVEPYVTYGFPNLKSVKELIYKRGYGKLNHQRIALTDNSIVEQALGKHGIICTEDLIHEILTVGPHFKEANNFLWPFQLKAPLGGLKKKRNHYVEGGDAGNRENFINELIRRMN

SEQ ID NO: 29185 - DNA, 1060 bp, Arabidopsis thaliana
  misc_feature (1)..(1060): Ceres Seq. ID no. 13497491
  misc_feature: MA Experiment ID: 108433 Result: Down-regulated in Transcription
  misc_feature: MA Experiment 108433 PARAMETER Experiment Name: At_rhl_Mutant2_cDNA_P Parameter: Age (day) Value: 7
  misc_feature: MA Experiment 108433 PARAMETER Experiment Name: At_rhl_Mutant2_cDNA_P Parameter: Organism Value: A. thaliana
  misc_feature: MA Experiment 108433 PARAMETER Experiment Name: At_rhl_Mutant2_cDNA_P Parameter: Plant Line Value: rhl Mutant vs. wt landsburg
  misc_feature: MA Experiment 108433 PARAMETER Experiment Name: At_rhl_Mutant2_cDNA_P Parameter: Tissue Value: Roots
  misc_feature: MA Experiment ID: 108461 Result: Down-regulated in Transcription
  misc_feature: MA Experiment 108461 PARAMETER Experiment Name: At_Germinating_Seeds_cDNA_P Parameter: Age (day) Value: 1 vs. 0
  misc_feature: MA Experiment 108461 PARAMETER Experiment Name: At_Germinating_Seeds_cDNA_P Parameter: Tissue Value: Germinating Seeds
  misc_feature: MA Experiment ID: 108462 Result: Down-regulated in Transcription
  misc_feature: MA Experiment 108462 PARAMETER Experiment Name: At_Germinating_Seeds_cDNA_P Parameter: Age (day) Value: 2 vs. 0
  misc_feature: MA Experiment 108462 PARAMETER Experiment Name: At_Germinating_Seeds_cDNA_P Parameter: Tissue Value: Germinating Seeds
  misc_feature: MA Experiment ID: 108463 Result: Down-regulated in Transcription
  misc_feature: MA Experiment 108463 PARAMETER Experiment Name: At_Germinating_Seeds_cDNA_P Parameter: Age (day) Value: 3 vs. 0
  misc_feature: MA Experiment 108463 PARAMETER Experiment Name: At_Germinating_Seeds_cDNA_P Parameter: Tissue Value: Germinating Seeds
  misc_feature: MA Experiment ID: 108464 Result: Down-regulated in Transcription
  misc_feature: MA Experiment 108464 PARAMETER Experiment Name: At_Germinating_Seeds_cDNA_P Parameter: Age (day) Value: 4 vs. 0
  misc_feature: MA Experiment 108464 PARAMETER Experiment Name: At_Germinating_Seeds_cDNA_P Parameter: Tissue Value: Germinating Seeds
  misc_feature: MA Experiment ID: 108488 Result: Down-regulated in Transcription
  misc_feature: MA Experiment ID: 108573 Result: Up-regulated in Transcription
  misc_feature: MA Experiment 108573 PARAMETER Experiment Name: At_Drought_cDNA_P Parameter: Timepoint (hr) Value: 6
  misc_feature: MA Experiment 108573 PARAMETER Experiment Name: At_Drought_cDNA_P Parameter: Tissue Value: Aerial
  misc_feature: MA Experiment 108573 PARAMETER Experiment Name: At_Drought_cDNA_P Parameter: Treatment Value: Drought vs. No Drought
  misc_feature: MA Experiment ID: 108574 Result: Up-regulated in Transcription
  misc_feature: MA Experiment 108574 PARAMETER Experiment Name: At_Wounding__cDNA_P Parameter: Timepoint (hr) Value: 1
  misc_feature: MA Experiment 108574 PARAMETER Experiment Name: At_Wounding__cDNA_P Parameter: Tissue Value: Aerial
  misc_feature: MA Experiment 108574 PARAMETER Experiment Name: At_Wounding__cDNA_P Parameter: Treatment Value: Wounding vs. No Wounding
  misc_feature: MA Experiment ID: 108579 Result: Up-regulated in Transcription
  misc_feature: MA Experiment 108579 PARAMETER Experiment Name: At_4deg_Cold_cDNA_P Parameter: Temperature (deg C) Value: 4 vs. 22
  misc_feature: MA Experiment 108579 PARAMETER Experiment Name: At_4deg_Cold_cDNA_P Parameter: Timepoint (hr) Value: 6
  misc_feature: MA Experiment 108579 PARAMETER Experiment Name: At_4deg_Cold_cDNA_P Parameter: Tissue Value: Aerial
  misc_feature: MA Experiment ID: 108585 Result: Up-regulated in Transcription
  misc_feature: MA Experiment 108585 PARAMETER Experiment Name: At_5mM_NaNP_cDNA_P Parameter: Timepoint (hr) Value: 6
  misc_feature: MA Experiment 108585 PARAMETER Experiment Name: At_5mM_NaNP_cDNA_P Parameter: Tissue Value: Aerial
  misc_feature: MA Experiment 108585 PARAMETER Experiment Name: At_5mM_NaNP_cDNA_P Parameter: Treatment Value: null
  misc_feature: MA Experiment ID: 108595 Result: Up-regulated in Transcription
  misc_feature: MA Experiment 108595 PARAMETER Experiment Name: At_Ler-pi_Ovule_cDNA_P Parameter: Plant Line Value: null
  misc_feature: MA Experiment ID: 108668 Result: Up-regulated in Transcription
  misc_feature: MA Experiment 108668 PARAMETER Experiment Name: At_2mM_SA_cDNA_P Parameter: Plant Line Value: WS
  misc_feature: MA Experiment 108668 PARAMETER Experiment Name: At_2mM_SA_cDNA_P Parameter: Timepoint (hr) Value: 6
  misc_feature: MA Experiment 108668 PARAMETER Experiment Name: At_2mM_SA_cDNA_P Parameter: Treatment Value: 2mM SA vs. No Treatment
  misc_feature: MA Experiment ID: 20000111 Result: Up-regulated in Transcription
  misc_feature: MA Experiment 20000111 PARAMETER Experiment Name: At_42deg_Heat_cDNA_P Parameter: Temperature (deg C) Value: 42 vs. 22
  misc_feature: MA Experiment 20000111 PARAMETER Experiment Name: At_42deg_Heat_cDNA_P Parameter: Timepoint (hr) Value: 6
  misc_feature: MA Experiment 20000111 PARAMETER Experiment Name: At_42deg_Heat_cDNA_P Parameter: Tissue Value: Aerial
  misc_feature: MA Experiment ID: 20000112 Result: Up-regulated in Transcription
  misc_feature: MA Experiment 20000112 PARAMETER Experiment Name: At_42deg_Heat_cDNA_P Parameter: Temperature (deg C) Value: 42 vs. 22
  misc_feature: MA Experiment 20000112 PARAMETER Experiment Name: At_42deg_Heat_cDNA_P Parameter: Timepoint (hr) Value: 2
  misc_feature: MA Experiment 20000112 PARAMETER Experiment Name: At_42deg_Heat_cDNA_P Parameter: Tissue Value: Aerial
  misc_feature: MA Experiment ID: 20000113 Result: Up-regulated in Transcription
  misc_feature: MA Experiment 20000113 PARAMETER Experiment Name: At_42deg_Heat_cDNA_P Parameter: Temperature (deg C) Value: 42 vs. 22
  misc_feature: MA Experiment 20000113 PARAMETER Experiment Name: At_42deg_Heat_cDNA_P Parameter: Timepoint (hr) Value: 8
  misc_feature: MA Experiment 20000113 PARAMETER Experiment Name: At_42deg_Heat_cDNA_P Parameter: Tissue Value: Aerial
  misc_feature: MA Experiment ID: 20000173 Result: Up-regulated in Transcription
  misc_feature: MA Experiment 20000173 PARAMETER Experiment Name: At_42deg_Heat_P Parameter: Age (day) Value: 14
  misc_feature: MA Experiment 20000173 PARAMETER Experiment Name: At_42deg_Heat_P Parameter: Organism Value: A. thaliana
  misc_feature: MA Experiment 20000173 PARAMETER Experiment Name: At_42deg_Heat_P Parameter: Plant Line Value: WS
  misc_feature: MA Experiment 20000173 PARAMETER Experiment Name: At_42deg_Heat_P Parameter: Temperature (deg C) Value: 42 vs. 22
  misc_feature: MA Experiment 20000173 PARAMETER Experiment Name: At_42deg_Heat_P Parameter: Timepoint (hr) Value: 6
  misc_feature: MA Experiment 20000173 PARAMETER Experiment Name: At_42deg_Heat_P Parameter: Tissue Value: Aerial
  misc_feature: MA Experiment ID: 20000180 Result: Down-regulated in Transcription
  misc_feature: MA Experiment 20000180 PARAMETER Experiment Name: At_Germinating_Seeds_P Parameter: Age (hr) Value: 24 vs. 0
  misc_feature: MA Experiment 20000180 PARAMETER Experiment Name: At_Germinating_Seeds_P Parameter: Tissue Value: Germinating Seeds
  misc_feature: MA Experiment ID: 20000182 Result: Up-regulated in Transcription
  misc_feature: MA Experiment 20000182 PARAMETER Experiment Name: At_2mM_SA_P Parameter: Age (day) Value: 14
  misc_feature: MA Experiment 20000182 PARAMETER Experiment Name: At_2mM_SA_P Parameter: Organism Value: A. thaliana
  misc_feature: MA Experiment 20000182 PARAMETER Experiment Name: At_2mM_SA_P Parameter: Plant Line Value: WS
  misc_feature: MA Experiment 20000182 PARAMETER Experiment Name: At_2mM_SA_P Parameter: Timepoint (hr) Value: 6
  misc_feature: MA Experiment 20000182 PARAMETER Experiment Name: At_2mM_SA_P Parameter: Tissue Value: Aerial
  misc_feature: MA Experiment 20000182 PARAMETER Experiment Name: At_2mM_SA_P Parameter: Treatment Value: 2mM SA vs. No Treatment
  misc_feature: MA Experiment ID: 20000495 Result: Down-regulated in Transcription
  misc_feature: MA Experiment 20000495 PARAMETER Experiment Name: At_Guard_Cells_P Parameter: Harvest Date Value: 8/2/2002
  misc_feature: MA Experiment 20000495 PARAMETER Experiment Name: At_Guard_Cells_P Parameter: Organism Value: A. thaliana
  misc_feature: MA Experiment 20000495 PARAMETER Experiment Name: At_Guard_Cells_P Parameter: Tissue Value: Guard Cells vs. Leaves
  misc_feature: MA Experiment ID: 20001906 Result: Up-regulated in Transcription
  misc_feature: MA Experiment 20001906 PARAMETER Experiment Name: At_Drought_Reproduction_P Parameter: Age (day) Value: 35
  misc_feature: MA Experiment 20001906 PARAMETER Experiment Name: At_Drought_Reproduction_P Parameter: Organism Value: A. thaliana
  misc_feature: MA Experiment 20001906 PARAMETER Experiment Name: At_Drought_Reproduction_P Parameter: Plant Line Value: WS
  misc_feature: MA Experiment 20001906 PARAMETER Experiment Name: At_Drought_Reproduction_P Parameter: Timepoint (day) Value: 5
  misc_feature: MA Experiment 20001906 PARAMETER Experiment Name: At_Drought_Reproduction_P Parameter: Tissue Value: Siliques
  misc_feature: MA Experiment 20001906 PARAMETER Experiment Name: At_Drought_Reproduction_P Parameter: Treatment Value: Drought vs. No Drought
  misc_feature: MA Experiment ID: 20001908 Result: Up-regulated in Transcription
  misc_feature: MA Experiment 20001908 PARAMETER Experiment Name: At_Drought_Reproduction_P Parameter: Age (day) Value: 40
  misc_feature: MA Experiment 20001908 PARAMETER Experiment Name: At_Drought_Reproduction_P Parameter: Organism Value: A. thaliana
  misc_feature: MA Experiment 20001908 PARAMETER Experiment Name: At_Drought_Reproduction_P Parameter: Plant Line Value: WS
  misc_feature: MA Experiment 20001908 PARAMETER Experiment Name: At_Drought_Reproduction_P Parameter: Timepoint (day) Value: 10
  misc_feature: MA Experiment 20001908 PARAMETER Experiment Name: At_Drought_Reproduction_P Parameter: Tissue Value: Siliques
  misc_feature: MA Experiment 20001908 PARAMETER Experiment Name: At_Drought_Reproduction_P Parameter: Treatment Value: Drought vs. No Drought
  misc_feature: MA Experiment ID: 20001911 Result: Up-regulated in Transcription
  misc_feature: MA Experiment 20001911 PARAMETER Experiment Name: At_Drought_Reproduction_P Parameter: Age (day) Value: 40
  misc_feature: MA Experiment 20001911 PARAMETER Experiment Name: At_Drought_Reproduction_P Parameter: Organism Value: A. thaliana
  misc_feature: MA Experiment 20001911 PARAMETER Experiment Name: At_Drought_Reproduction_P Parameter: Plant Line Value: WS
  misc_feature: MA Experiment 20001911 PARAMETER Experiment Name: At_Drought_Reproduction_P Parameter: Timepoint (day) Value: 10
  misc_feature: MA Experiment 20001911 PARAMETER Experiment Name: At_Drought_Reproduction_P Parameter: Tissue Value: Flowers
  misc_feature: MA Experiment 20001911 PARAMETER Experiment Name: At_Drought_Reproduction_P Parameter: Treatment Value: Drought vs. No Drought
atcaccattgctttgttttgttcgtcaaatataatcaattttaaatttcttctcttctcttcaaacgaatcgcctttttcgataatctctttgcatcgatttcatcatggctactcaaacggatctcgctcagcccaagcttgatatgaccaaggaggagaaagagaggttgaagtatttgcaattcgtgcaagctgctgctgtggaagctctgcttcgctttgctcttatttacgctaaggcaaaggacaagtctggtcctttgaaacctggtgttgaatctgttgaaggagctgtcaagactgtcgttggtcctgtctacgagaaataccacgacgtccctgttgaggtccttaaatacatggaccagaaggttgatatgtctgtgactgagcttgaccgtcgtgtcccaccagtcgtcaagcaagtgtctgcccaagccatctccgctgctcagatagcacccattgtggcacgtgcgttggcctctgaggttcgacgtgctggtgttgttgaaaccgcttctggaatggctaaatccgtctactccaagtacgagcctgctgctaaggagttgtatgcaaactatgagccaaaagcagagcagtgtgccgtttcagcttggaagaagcttaaccagcttcctctattcccaaggctggctcaagttgctgtaccaacagctgctttctgctctgagaagtacaatgatactgtggttaaggctgcagagaaagggtacagagtcacatcgtacatgccattggttccaacagagaggatctcaaaaatcttcgctgaggagaaagctgagaccgagcctttggagttccatccacttgattgatatgggtgttttgttagtgtgattttttgttttgttgggattaaggtgaaccggatcttggttagcgattgatctctggttctcgttcttttttttctttgtcatgaacttttgttgtttcgtttaataatcaaaagttgtataatctaagtttgggattaccaccctattgagtattgagtgataaaaaaaaagttgcgtgaattatcgccc

SEQ ID NO: 29186 - protein, 246 aa, Arabidopsis thaliana
  peptide (1)..(246): Ceres Seq. ID no. 13497492
  misc_feature (13)..(234): Pfam Name: Rubber elongation factor protein (REF) Pfam Description: Rubber elongation factor protein (REF)
  misc_feature (64)..(233): Homolog of NCBI NO: 14423933 NR Description: Small rubber particle protein (SRPP) (22 kDa particle protein) (22 kDa RPP) (Latex allergen Hev b 3) (27 kDa
  misc_feature (37)..(135): Homolog of NCBI NO: 15214302 NR Description: Stress-related protein (PvSRP)
  misc_feature (123)..(231): Homolog of NCBI NO: 15214302 NR Description: Stress-related protein (PvSRP)
  misc_feature (18)..(245): Homolog of NCBI NO: 15214353 NR Description: Hypothetical protein from PAC P0001A07
  misc_feature (8)..(237): Homolog of NCBI NO: 33332330 NR Description: rubber synthesis protein [Parthenium argentatum]
  misc_feature (1)..(239): Homolog of NCBI NO: 29367349 NR Description: stress-related protein-like protein
  misc_feature (1)..(239): Homolog of NCBI NO: 22831130 NR Description: putative stress-related protein
  misc_feature (74)..(240): Homolog of NCBI NO: 37622210 NR Description: small rubber particle protein [Hevea brasiliensis]
  misc_feature (1)..(235): Homolog of NCBI NO: 15214303 NR Description: Stress-related protein
  misc_feature (1)..(246): Homolog of NCBI NO: 15230002 NR Description: stress related protein -related [Arabidopsis
MATQTDLAQPKLDMTKEEKERLKYLQFVQAAAVEALLRFALIYAKAKDKSGPLKPGVESVEGAVKTVVGPVYEKYHDVPVEVLKYMDQKVDMSVTELDRRVPPVVKQVSAQAISAAQIAPIVARALASEVRRAGVVETASGMAKSVYSKYEPAAKELYANYEPKAEQCAVSAWKKLNQLPLFPRLAQVAVPTAAFCSEKYNDTVVKAAEKGYRVTSYMPLVPTERISKIFAEEKAETEPLEFHPLD

SEQ ID NO: 29187 - protein, 233 aa, Arabidopsis thaliana
  peptide (1)..(233): Ceres Seq. ID no. 13497493
  misc_feature (1)..(221): Pfam Name: Rubber elongation factor protein (REF) Pfam Description: Rubber elongation factor protein (REF)
  misc_feature (51)..(220): Homolog of NCBI NO: 14423933 NR Description: Small rubber particle protein (SRPP) (22 kDa particle protein) (22 kDa RPP) (Latex allergen Hev b 3) (27 kDa
  misc_feature (24)..(122): Homolog of NCBI NO: 15214302 NR Description: Stress-related protein (PvSRP)
  misc_feature (110)..(218): Homolog of NCBI NO: 15214302 NR Description: Stress-related protein (PvSRP)
  misc_feature (5)..(232): Homolog of NCBI NO: 15214353 NR Description: Hypothetical protein from PAC P0001A07
  misc_feature (1)..(224): Homolog of NCBI NO: 33332330 NR Description: rubber synthesis protein [Parthenium argentatum]
  misc_feature (1)..(226): Homolog of NCBI NO: 29367349 NR Description: stress-related protein-like protein
  misc_feature (1)..(226): Homolog of NCBI NO: 22831130 NR Description: putative stress-related protein
  misc_feature (61)..(227): Homolog of NCBI NO: 37622210 NR Description: small rubber particle protein [Hevea brasiliensis]
  misc_feature (1)..(222): Homolog of NCBI NO: 15214303 NR Description: Stress-related protein
  misc_feature (1)..(233): Homolog of NCBI NO: 15230002 NR Description: stress related protein -related [Arabidopsis
MTKEEKERLKYLQFVQAAAVEALLRFALIYAKAKDKSGPLKPGVESVEGAVKTVVGPVYEKYHDVPVEVLKYMDQKVDMSVTELDRRVPPVVKQVSAQAISAAQIAPIVARALASEVRRAGVVETASGMAKSVYSKYEPAAKELYANYEPKAEQCAVSAWKKLNQLPLFPRLAQVAVPTAAFCSEKYNDTVVKAAEKGYRVTSYMPLVPTERISKIFAEEKAETEPLEFHPLD

SEQ ID NO: 29188 - protein, 161 aa, Arabidopsis thaliana
  peptide (1)..(161): Ceres Seq. ID no. 13497494
  misc_feature (1)..(149): Pfam Name: Rubber elongation factor protein (REF) Pfam Description: Rubber elongation factor protein (REF)
  misc_feature (1)..(148): Homolog of NCBI NO: 14423933 NR Description: Small rubber particle protein (SRPP) (22 kDa particle protein) (22 kDa RPP) (Latex allergen Hev b 3) (27 kDa
  misc_feature (1)..(50): Homolog of NCBI NO: 15214302 NR Description: Stress-related protein (PvSRP)
  misc_feature (38)..(146): Homolog of NCBI NO: 15214302 NR Description: Stress-related protein (PvSRP)
  misc_feature (1)..(160): Homolog of NCBI NO: 15214353 NR Description: Hypothetical protein from PAC P0001A07
  misc_feature (1)..(152): Homolog of NCBI NO: 33332330 NR Description: rubber synthesis protein [Parthenium argentatum]
  misc_feature (1)..(154): Homolog of NCBI NO: 29367349 NR Description: stress-related protein-like protein
  misc_feature (1)..(154): Homolog of NCBI NO: 22831130 NR Description: putative stress-related protein
  misc_feature (1)..(155): Homolog of NCBI NO: 37622210 NR Description: small rubber particle protein [Hevea brasiliensis]
  misc_feature (1)..(150): Homolog of NCBI NO: 15214303 NR Description: Stress-related protein
  misc_feature (1)..(161): Homolog of NCBI NO: 15230002 NR Description: stress related protein -related [Arabidopsis
MDQKVDMSVTELDRRVPPVVKQVSAQAISAAQIAPIVARALASEVRRAGVVETASGMAKSVYSKYEPAAKELYANYEPKAEQCAVSAWKKLNQLPLFPRLAQVAVPTAAFCSEKYNDTVVKAAEKGYRVTSYMPLVPTERISKIFAEEKAETEPLEFHPLD

SEQ ID NO: 29189 - DNA, 1143 bp, Arabidopsis thaliana
  misc_feature (1)..(1143): Ceres Seq. ID no. 12738570
  misc_feature: MA Experiment ID: 108434 Result: Up-regulated in Transcription
  misc_feature: MA Experiment 108434 PARAMETER Experiment Name: At_Root_Tips_cDNA_P Parameter: Tissue Value: Root Tips
  misc_feature: MA Experiment ID: 108595 Result: Down-regulated in Transcription
  misc_feature: MA Experiment 108595 PARAMETER Experiment Name: At_Ler-pi_Ovule_cDNA_P Parameter: Plant Line Value: null
  misc_feature: MA Experiment ID: 20000185 Result: Up-regulated in Transcription
  misc_feature: MA Experiment 20000185 PARAMETER Experiment Name: At_Roots__P Parameter: Age (day) Value: 7 vs. 21
  misc_feature: MA Experiment 20000185 PARAMETER Experiment Name: At_Roots__P Parameter: Organism Value: A. thaliana
  misc_feature: MA Experiment 20000185 PARAMETER Experiment Name: At_Roots__P Parameter: Tissue Value: Roots vs. Whole Plant
  misc_feature: MA Experiment ID: 20000439 Result: Up-regulated in Transcription
  misc_feature: MA Experiment 20000439 PARAMETER Experiment Name: At_Roots__P Parameter: Age (day) Value: 14 vs. 21
  misc_feature: MA Experiment 20000439 PARAMETER Experiment Name: At_Roots__P Parameter: Organism Value: A. thaliana
  misc_feature: MA Experiment 20000439 PARAMETER Experiment Name: At_Roots__P Parameter: Tissue Value: Roots vs. Whole Plant
  misc_feature: MA Experiment ID: 20000794 Result: Up-regulated in Transcription
  misc_feature: MA Experiment 20000794 PARAMETER Experiment Name: At_Petals_P Parameter: Age (day) Value: 23-25 days
  misc_feature: MA Experiment 20000794 PARAMETER Experiment Name: At_Petals_P Parameter: Plant Line Value: WS
  misc_feature: MA Experiment 20000794 PARAMETER Experiment Name: At_Petals_P Parameter: Tissue Value: Petals vs. Whole plant
tttgggacctgctcagaacgtcaaatcgatcaccagagaggatctacagaactacattaagactcactacactgcttccaggatggtgattgctgctgcaggagctgttaagcatgaggaagttgttgagcaagtgaagaagctatttaccaagttgtcgtctgatccaacaactacttctcaactggttgccaatgaacctgctagttttactggttctgaggtccgaatgattgatgacgacctaccccttgcacaatttgctgttgcctttgagggagcatcttggactgatccagattccgttgctcttatggttatgcaaactatgttgggttcgtggaacaaaaatgttggtggtggaaaacacgtgggttctgacctgacccagagggttgccattaatgaaatagcagaaagcataatggcattcaacactaactacaaggatactggactgttcggcgtttatgcagttgccaaggccgattgcttggatgatttatcatatgccattatgtatgaggtaaccaagctggcctaccgagtttcagacgctgatgtgacacgtgcacgaaatcagctgaaatcatcattgttacttcacatggatggaaccagcccaattgctgaagatattggtcgtcagctgctgacctatgggcgtagaatcccaaccgctgaactctttgctaggatcgatgctgttgatgccagcacggtaaaacgtgttgccaacaaatatatctatgacaaagacattgcaatctcagctattggtccaatccaagatttgccagactacaacaaattcagacgcagaacctactggaaccggtactaaggctctgaaataaaggtcactgaatcgcaaggttcgcccacggggagattccgtaggcggagagagcagaacgaggtgatgatggattcattatttttgagtttttcttactgtatcttcataatttaccatcatcgctggtaaaataagtgtaccatttactctttgtcctctactggaaaaatgctagagatcctctgtgtgtgttttttttgttctcttcataattttcccatacacatactaataagttctttgatgtttggttgaaaacttgaattggatacatttcatttctc

SEQ ID NO: 29190 - protein, 280 aa, Arabidopsis thaliana
  peptide (1)..(280): Ceres Seq. ID no. 12738571
  misc_feature (9)..(195): Pfam Name: Peptidase M16 inactive domain Pfam Description: Peptidase M16 inactive domain
  misc_feature (28)..(276): Homolog of NCBI NO: 14279470 NR Description: C3meo4 [Oryza sativa]
  misc_feature (1)..(276): Homolog of NCBI NO: 34910490 NR Description: putative mitochondrial processing peptidase beta
  misc_feature (1)..(280): Homolog of NCBI NO: 477280 NR Description: ubiquinol-cytochrome-c reductase (EC 1.10.2.2)
  misc_feature (1)..(280): Homolog of NCBI NO: 587566 NR Description: mitochondrial processing peptidase [Solanum
  misc_feature (1)..(280): Homolog of NCBI NO: 587564 NR Description: mitochondrial processing peptidase [Solanum
  misc_feature (1)..(280): Homolog of NCBI NO: 477819 NR Description: ubiquinol-cytochrome-c reductase (EC 1.10.2.2)
  misc_feature (1)..(280): Homolog of NCBI NO: 13959067 NR Description: mitochondrial processing peptidase [Avicennia
  misc_feature (1)..(280): Homolog of NCBI NO: 12802327 NR Description: mitochondrial processing peptidase beta subunit
  misc_feature (1)..(252): Homolog of NCBI NO: 30678485 NR Description: mitochondrial processing peptidase -related
  misc_feature (1)..(280): Homolog of NCBI NO: 15232845 NR Description: putative mitochondrial processing peptidase
LGPAQNVKSITREDLQNYIKTHYTASRMVIAAAGAVKHEEVVEQVKKLFTKLSSDPTTTSQLVANEPASFTGSEVRMIDDDLPLAQFAVAFEGASWTDPDSVALMVMQTMLGSWNKNVGGGKHVGSDLTQRVAINEIAESIMAFNTNYKDTGLFGVYAVAKADCLDDLSYAIMYEVTKLAYRVSDADVTRARNQLKSSLLLHMDGTSPIAEDIGRQLLTYGRRIPTAELFARIDAVDASTVKRVANKYIYDKDIAISAIGPIQDLPDYNKFRRRTYWNRY

SEQ ID NO: 29191 - protein, 253 aa, Arabidopsis thaliana
  peptide (1)..(253): Ceres Seq. ID no. 12738572
  misc_feature (1)..(168): Pfam Name: Peptidase M16 inactive domain Pfam Description: Peptidase M16 inactive domain
  misc_feature (1)..(249): Homolog of NCBI NO: 14279470 NR Description: C3meo4 [Oryza sativa]
  misc_feature (1)..(249): Homolog of NCBI NO: 34910490 NR Description: putative mitochondrial processing peptidase beta
  misc_feature (1)..(253): Homolog of NCBI NO: 477280 NR Description: ubiquinol-cytochrome-c reductase (EC 1.10.2.2)
  misc_feature (1)..(253): Homolog of NCBI NO: 587566 NR Description: mitochondrial processing peptidase [Solanum
  misc_feature (1)..(253): Homolog of NCBI NO: 587564 NR Description: mitochondrial processing peptidase [Solanum
  misc_feature (1)..(253): Homolog of NCBI NO: 477819 NR Description: ubiquinol-cytochrome-c reductase (EC 1.10.2.2)
  misc_feature (1)..(253): Homolog of NCBI NO: 13959067 NR Description: mitochondrial processing peptidase [Avicennia
  misc_feature (1)..(253): Homolog of NCBI NO: 12802327 NR Description: mitochondrial processing peptidase beta subunit
  misc_feature (1)..(225): Homolog of NCBI NO: 30678485 NR Description: mitochondrial processing peptidase -related
  misc_feature (1)..(253): Homolog of NCBI NO: 15232845 NR Description: putative mitochondrial processing peptidase
MVIAAAGAVKHEEVVEQVKKLFTKLSSDPTTTSQLVANEPASFTGSEVRMIDDDLPLAQFAVAFEGASWTDPDSVALMVMQTMLGSWNKNVGGGKHVGSDLTQRVAINEIAESIMAFNTNYKDTGLFGVYAVAKADCLDDLSYAIMYEVTKLAYRVSDADVTRARNQLKSSLLLHMDGTSPIAEDIGRQLLTYGRRIPTAELFARIDAVDASTVKRVANKYIYDKDIAISAIGPIQDLPDYNKFRRRTYWNRY

SEQ ID NO: 29192 - protein, 204 aa, Arabidopsis thaliana
  peptide (1)..(204): Ceres Seq. ID no. 12738573
  misc_feature (1)..(119): Pfam Name: Peptidase M16 inactive domain Pfam Description: Peptidase M16 inactive domain
  misc_feature (1)..(200): Homolog of NCBI NO: 14279470 NR Description: C3meo4 [Oryza sativa]
  misc_feature (1)..(200): Homolog of NCBI NO: 34910490 NR Description: putative mitochondrial processing peptidase beta
  misc_feature (1)..(204): Homolog of NCBI NO: 477280 NR Description: ubiquinol-cytochrome-c reductase (EC 1.10.2.2)
  misc_feature (1)..(204): Homolog of NCBI NO: 587566 NR Description: mitochondrial processing peptidase [Solanum
  misc_feature (1)..(204): Homolog of NCBI NO: 587564 NR Description: mitochondrial processing peptidase [Solanum
  misc_feature (1)..(204): Homolog of NCBI NO: 477819 NR Description: ubiquinol-cytochrome-c reductase (EC 1.10.2.2)
  misc_feature (1)..(204): Homolog of NCBI NO: 13959067 NR Description: mitochondrial processing peptidase [Avicennia
  misc_feature (1)..(204): Homolog of NCBI NO: 12802327 NR Description: mitochondrial processing peptidase beta subunit
  misc_feature (1)..(176): Homolog of NCBI NO: 30678485 NR Description: mitochondrial processing peptidase -related
  misc_feature (1)..(204): Homolog of NCBI NO: 15232845 NR Description: putative mitochondrial processing peptidase
MIDDDLPLAQFAVAFEGASWTDPDSVALMVMQTMLGSWNKNVGGGKHVGSDLTQRVAINEIAESIMAFNTNYKDTGLFGVYAVAKADCLDDLSYAIMYEVTKLAYRVSDADVTRARNQLKSSLLLHMDGTSPIAEDIGRQLLTYGRRIPTAELFARIDAVDASTVKRVANKYIYDKDIAISAIGPIQDLPDYNKFRRRTYWNRY

SEQ ID NO: 29193 - DNA, 1636 bp, Arabidopsis thaliana
  misc_feature (1)..(1636): Ceres Seq. ID no. 12357517
  misc_feature: MA Experiment ID: 108433 Result: Up-regulated in Transcription
  misc_feature: MA Experiment 108433 PARAMETER Experiment Name: At_rhl_Mutant2_cDNA_P Parameter: Age (day) Value: 7
  misc_feature: MA Experiment 108433 PARAMETER Experiment Name: At_rhl_Mutant2_cDNA_P Parameter: Organism Value: A. thaliana
  misc_feature: MA Experiment 108433 PARAMETER Experiment Name: At_rhl_Mutant2_cDNA_P Parameter: Plant Line Value: rhl Mutant vs. wt landsburg
  misc_feature: MA Experiment 108433 PARAMETER Experiment Name: At_rhl_Mutant2_cDNA_P Parameter: Tissue Value: Roots
  misc_feature: MA Experiment ID: 108488 Result: Down-regulated in Transcription
  misc_feature: MA Experiment ID: 108569 Result: Up-regulated in Transcription
  misc_feature: MA Experiment 108569 PARAMETER Experiment Name: At_0.001%_MeJA__cDNA_P Parameter: Timepoint (hr) Value: 6
  misc_feature: MA Experiment 108569 PARAMETER Experiment Name: At_0.001%_MeJA__cDNA_P Parameter: Tissue Value: Aerial
  misc_feature: MA Experiment 108569 PARAMETER Experiment Name: At_0.001%_MeJA__cDNA_P Parameter: Treatment Value: 0.001% MeJA vs. No Treatment
  misc_feature: MA Experiment ID: 108573 Result: Up-regulated in Transcription
  misc_feature: MA Experiment 108573 PARAMETER Experiment Name: At_Drought_cDNA_P Parameter: Timepoint (hr) Value: 6
  misc_feature: MA Experiment 108573 PARAMETER Experiment Name: At_Drought_cDNA_P Parameter: Tissue Value: Aerial
  misc_feature: MA Experiment 108573 PARAMETER Experiment Name: At_Drought_cDNA_P Parameter: Treatment Value: Drought vs. No Drought
  misc_feature: MA Experiment ID: 20000214 Result: Down-regulated in Transcription
  misc_feature: MA Experiment 20000214 PARAMETER Experiment Name: At_4deg_Cold_P Parameter: Timepoint (hr) Value: 6
  misc_feature: MA Experiment ID: 20001906 Result: Up-regulated in Transcription
  misc_feature: MA Experiment 20001906 PARAMETER Experiment Name: At_Drought_Reproduction_P Parameter: Age (day) Value: 35
  misc_feature: MA Experiment 20001906 PARAMETER Experiment Name: At_Drought_Reproduction_P Parameter: Organism Value: A. thaliana
  misc_feature: MA Experiment 20001906 PARAMETER Experiment Name: At_Drought_Reproduction_P Parameter: Plant Line Value: WS
  misc_feature: MA Experiment 20001906 PARAMETER Experiment Name: At_Drought_Reproduction_P Parameter: Timepoint (day) Value: 5
  misc_feature: MA Experiment 20001906 PARAMETER Experiment Name: At_Drought_Reproduction_P Parameter: Tissue Value: Siliques
  misc_feature: MA Experiment 20001906 PARAMETER Experiment Name: At_Drought_Reproduction_P Parameter: Treatment Value: Drought vs. No Drought
aaactgggaaactactttgttcgaatctcagagctttttcgtttcccatcggaagaagaaactcatatataccttccaaaaaatccatacgtcaagtatttgttctctatcctctctttgttgtcttataaattcttcaagcaggtttcgagatttcctcgaatctgttttgttcttgttcctcaaaaatgctgggtttttgaacgaacgaggatgacgatgctcagagtccgaagcagagatggattggagagagtgagtgtagatggacctcatatcacagtctcccaactcaaaaccctaatccaagatcagcttcagatccctatccacaaccaaaccttatccaccaatagaaaccttctcctcgctaagagcccttctgatttcctagcgttcaccgacatggccgatcctaacctccgaatctcgtctctcaatctagctcacggctctatggtctaccttgcttacgaaggtgagcgtacgattcgtggtggtcctgctgtaacgcctgctggttccttcgggaggaagatgaccgtcgaagatctaatcgctcgacagatgcgcgtcggtcgccaggagaaggctcactgcgattccgtctcgttcgatcgcgattgcgccaatgcgtttcagcatttcgtcaacgagtcgcttgccttcgctgtcaaacgcggtggattcatgtacgggaacgtctctgaggatggtcaggttgaggtgaatttcatctacgagccaccgcagcaagggatggaggataatctgattctgatgagagactctgaggaagagaaacgtgttgatgctattgctttagggttagggatgaggagagttgggtttatattcaaccagactgtgactcaggacaagaaggagtacactttgtctaacgttgaggtgttgcttgcggctcagcttcacgctgagagcgaattgaaggagtgggtcactgctgttgtgaagcttgagatcaatgaggatggtggtgctgatgttcactttgagccgtttcagatgagtgatatgtgcgttaggttgtttaaggaaggatggttcgagactgagattggacctgaggatgatcccaagctctccaagttgaagaaagaggttgttgttggagtcaaggatgttaaagaagtcgataatgatttcttccttgttctcgtcaagatcttggatcatcagggaccgttgtcgtgtaccttcccgatagagaacaggaacactcaaacaacaatgcgggctttgaaaacgcatatggagcgagcaaggagcctcccattcgtgaagaggatctctgattttcatctgcttctctttgtggctcagtttctagacgtatcatccgacgtccctgcgttggctgaatgcgtccgtctacagtctcatgtccctgagggatatgagttgctcatcgactccatggccaatacttcttaagttttacaagtctgtgtgttcatattctctcctttagatttgtgtacagctgttacttcttcctttaaattatctttgcatatggaagaataaaaagaagaaatatttcagagaagttaaggtcttaaatgatagtttttattggattatcctgttcaagttcaatgaaacatttactagt

SEQ ID NO: 29194 - protein, 484 aa, Arabidopsis thaliana
  peptide (1)..(484): Ceres Seq. ID no. 12357518
  misc_feature (227)..(481): Pfam Name: NPL4 family Pfam Description: NPL4 family
  misc_feature (346)..(400): Homolog of NCBI NO: 34905848 NR Description: P0483G10.28 [Oryza sativa (japonica
  misc_feature (74)..(481): Homolog of NCBI NO: 34914854 NR Description: P0416G11.10 [Oryza sativa (japonica
  misc_feature (72)..(483): Homolog of NCBI NO: 18407495 NR Description: expressed protein
  misc_feature (72)..(484): Homolog of NCBI NO: 15229360 NR Description: putative protein
KLGNYFVRISELFRFPSEEETHIYLPKNPYVKYLFSILSLLSYKFFKQVSRFPRICFVLVPQKCWVFERTRMTMLRVRSRDGLERVSVDGPHITVSQLKTLIQDQLQIPIHNQTLSTNRNLLLAKSPSDFLAFTDMADPNLRISSLNLAHGSMVYLAYEGERTIRGGPAVTPAGSFGRKMTVEDLIARQMRVGRQEKAHCDSVSFDRDCANAFQHFVNESLAFAVKRGGFMYGNVSEDGQVEVNFIYEPPQQGMEDNLILMRDSEEEKRVDAIALGLGMRRVGFIFNQTVTQDKKEYTLSNVEVLLAAQLHAESELKEWVTAVVKLEINEDGGADVHFEPFQMSDMCVRLFKEGWFETEIGPEDDPKLSKLKKEVVVGVKDVKEVDNDFFLVLVKILDHQGPLSCTFPIENRNTQTTMRALKTHMERARSLPFVKRISDFHLLLFVAQFLDVSSDVPALAECVRLQSHVPEGYELLIDSMANTS

SEQ ID NO: 29195 - protein, 413 aa, Arabidopsis thaliana
  peptide (1)..(413): Ceres Seq. ID no. 12357519
  misc_feature (156)..(410): Pfam Name: NPL4 family Pfam Description: NPL4 family
  misc_feature (275)..(329): Homolog of NCBI NO: 34905848 NR Description: P0483G10.28 [Oryza sativa (japonica
  misc_feature (3)..(410): Homolog of NCBI NO: 34914854 NR Description: P0416G11.10 [Oryza sativa (japonica
  misc_feature (1)..(412): Homolog of NCBI NO: 18407495 NR Description: expressed protein
  misc_feature (1)..(413): Homolog of NCBI NO: 15229360 NR Description: putative protein
MTMLRVRSRDGLERVSVDGPHITVSQLKTLIQDQLQIPIHNQTLSTNRNLLLAKSPSDFLAFTDMADPNLRISSLNLAHGSMVYLAYEGERTIRGGPAVTPAGSFGRKMTVEDLIARQMRVGRQEKAHCDSVSFDRDCANAFQHFVNESLAFAVKRGGFMYGNVSEDGQVEVNFIYEPPQQGMEDNLILMRDSEEEKRVDAIALGLGMRRVGFIFNQTVTQDKKEYTLSNVEVLLAAQLHAESELKEWVTAVVKLEINEDGGADVHFEPFQMSDMCVRLFKEGWFETEIGPEDDPKLSKLKKEVVVGVKDVKEVDNDFFLVLVKILDHQGPLSCTFPIENRNTQTTMRALKTHMERARSLPFVKRISDFHLLLFVAQFLDVSSDVPALAECVRLQSHVPEGYELLIDSMANTS

SEQ ID NO: 29196 - protein, 411 aa, Arabidopsis thaliana
  peptide (1)..(411): Ceres Seq. ID no. 12357520
  misc_feature (154)..(408): Pfam Name: NPL4 family Pfam Description: NPL4 family
  misc_feature (273)..(327): Homolog of NCBI NO: 34905848 NR Description: P0483G10.28 [Oryza sativa (japonica
  misc_feature (1)..(408): Homolog of NCBI NO: 34914854 NR Description: P0416G11.10 [Oryza sativa (japonica
  misc_feature (1)..(410): Homolog of NCBI NO: 18407495 NR Description: expressed protein
  misc_feature (1)..(411): Homolog of NCBI NO: 15229360 NR Description: putative protein
MLRVRSRDGLERVSVDGPHITVSQLKTLIQDQLQIPIHNQTLSTNRNLLLAKSPSDFLAFTDMADPNLRISSLNLAHGSMVYLAYEGERTIRGGPAVTPAGSFGRKMTVEDLIARQMRVGRQEKAHCDSVSFDRDCANAFQHFVNESLAFAVKRGGFMYGNVSEDGQVEVNFIYEPPQQGMEDNLILMRDSEEEKRVDAIALGLGMRRVGFIFNQTVTQDKKEYTLSNVEVLLAAQLHAESELKEWVTAVVKLEINEDGGADVHFEPFQMSDMCVRLFKEGWFETEIGPEDDPKLSKLKKEVVVGVKDVKEVDNDFFLVLVKILDHQGPLSCTFPIENRNTQTTMRALKTHMERARSLPFVKRISDFHLLLFVAQFLDVSSDVPALAECVRLQSHVPEGYELLIDSMANTS

SEQ ID NO: 29197 - DNA, 1317 bp, Arabidopsis thaliana
  misc_feature (1)..(1317): Ceres Seq. ID no. 13490406
  misc_feature: MA Experiment ID: 20000234 Result: Up-regulated in Transcription
  misc_feature: MA Experiment 20000234 PARAMETER Experiment Name: At_Siliques_P Parameter: Age (day) Value: 21
  misc_feature: MA Experiment 20000234 PARAMETER Experiment Name: At_Siliques_P Parameter: Organism Value: A. thaliana
  misc_feature: MA Experiment 20000234 PARAMETER Experiment Name: At_Siliques_P Parameter: Plant Line Value: WS
  misc_feature: MA Experiment 20000234 PARAMETER Experiment Name: At_Siliques_P Parameter: Tissue Value: Less Than 5mm Siliques vs. Whole Plant
  misc_feature: MA Experiment ID: 20000264 Result: Up-regulated in Transcription
  misc_feature: MA Experiment 20000264 PARAMETER Experiment Name: At_Open_Flower_P Parameter: Age (day) Value: 21
  misc_feature: MA Experiment 20000264 PARAMETER Experiment Name: At_Open_Flower_P Parameter: Plant Line Value: WS
  misc_feature: MA Experiment 20000264 PARAMETER Experiment Name: At_Open_Flower_P Parameter: Tissue Value: Open Flower vs. Whole Plant
  misc_feature: MA Experiment ID: 20000265 Result: Up-regulated in Transcription
  misc_feature: MA Experiment 20000265 PARAMETER Experiment Name: At_Open_Flower_P Parameter: Age (day) Value: 21
  misc_feature: MA Experiment 20000265 PARAMETER Experiment Name: At_Open_Flower_P Parameter: Plant Line Value: WS
  misc_feature: MA Experiment 20000265 PARAMETER Experiment Name: At_Open_Flower_P Parameter: Tissue Value: Closed Flower vs. Whole Plant
  misc_feature: MA Experiment ID: 20000286 Result: Up-regulated in Transcription
  misc_feature: MA Experiment 20000286 PARAMETER Experiment Name: At_Open_Flower_P Parameter: Age (day) Value: 21
  misc_feature: MA Experiment 20000286 PARAMETER Experiment Name: At_Open_Flower_P Parameter: Plant Line Value: WS
  misc_feature: MA Experiment 20000286 PARAMETER Experiment Name: At_Open_Flower_P Parameter: Tissue Value: Half Open vs. Whole Plant
  misc_feature: MA Experiment ID: 20000794 Result: Up-regulated in Transcription
  misc_feature: MA Experiment 20000794 PARAMETER Experiment Name: At_Petals_P Parameter: Age (day) Value: 23-25 days
  misc_feature: MA Experiment 20000794 PARAMETER Experiment Name: At_Petals_P Parameter: Plant Line Value: WS
  misc_feature: MA Experiment 20000794 PARAMETER Experiment Name: At_Petals_P Parameter: Tissue Value: Petals vs. Whole plant
  misc_feature: MA Experiment ID: 20001757 Result: Down-regulated in Transcription
  misc_feature: MA Experiment 20001757 PARAMETER Experiment Name: At_50mM_NH4NO3_L-to-H_P Parameter: Timepoint (hr) Value: 6
  misc_feature: MA Experiment 20001757 PARAMETER Experiment Name: At_50mM_NH4NO3_L-to-H_P Parameter: Tissue Value: Leaf
  misc_feature: MA Experiment 20001757 PARAMETER Experiment Name: At_50mM_NH4NO3_L-to-H_P Parameter: Treatment Value: 50mM NH4NO3 vs 100mM Mannitol
  misc_feature: MA Experiment ID: 20001910 Result: Up-regulated in Transcription
  misc_feature: MA Experiment 20001910 PARAMETER Experiment Name: At_Drought_Reproduction_P Parameter: Age (day) Value: 37
  misc_feature: MA Experiment 20001910 PARAMETER Experiment Name: At_Drought_Reproduction_P Parameter: Organism Value: A. thaliana
  misc_feature: MA Experiment 20001910 PARAMETER Experiment Name: At_Drought_Reproduction_P Parameter: Plant Line Value: WS
  misc_feature: MA Experiment 20001910 PARAMETER Experiment Name: At_Drought_Reproduction_P Parameter: Timepoint (day) Value: 7
  misc_feature: MA Experiment 20001910 PARAMETER Experiment Name: At_Drought_Reproduction_P Parameter: Tissue Value: Flowers
  misc_feature: MA Experiment 20001910 PARAMETER Experiment Name: At_Drought_Reproduction_P Parameter: Treatment Value: Drought vs. No Drought
gtattccaattttagaacttacgcgtcttcataatcttcctctttttttctttgtctttgatattcgaagtttttgtttattttttctttgcttaacccggagagacaccctctccataaatttagttttgatccctctgggttccttgaagaaaaaaacaccaattccattcatattcttcttcatacgttcaataattcttacgaggacgagatcttcctaacgtctttgatcttcttcattaggagataagtctaaactggtcgaagatgttgggagatttcatcatcagactccttgtattgatattagggtacacatacccagcattcgaatgctttaaaacggtggagaagaacaaagttgatatcgaggaactcagattttggtgccaatactggatacttttggcgctaatttcatcattcgagagggttggcgatttttttatctcatggttaccgttatacggagagatgaaagtagtcttcttcgtatatctctggtaccctaaaacaaagggaacgagacatgtgtatgaaacattgttgaagccatacatggctcgacacgagacagagattgacagaaagatcatggagttgcgagctcgagcttgggactttttcatcttttacttcaacaacttcgcccaggccggtcaatccaccttgatccagggttttcagtacgtactcgcccaatcggtccggttctctgccgctgcagctaaccaaccgccaacggagaggaacgtgaacatgaacgcgcagtcaccggtggagatggacaatgatcctccatcaccgcgcgctccaagaccgctgaacaaatcactatctgcgttgcgatcgctagagaagcaaacaagcagagggaggaagtggccgccaccaacaccaccaccaacaccaggccgagactccgccggaacatttaacggtgatgatggagtcaacattcctgatacaattccgggatcacccctcactgatgctcgagctaagctgcgacgttctaactccagaactcagccagcggcatagtaacgcaaacgtacatatacgtgactcgacaaagaaacccttttcgtttgtttaaagatatatagggaaagaaaagtgaatgaaagttttgaattgaaacaaaacagatttttttttttttttcatgttttctgtaaattgaagcagtaagtattaatacagcgagaatatttgtgtttgttttcgtttaaacttcccgctttaatccggatattgatttgagtttggatttcttcatatagctgattataaagatgcatttgagtggac

SEQ ID NO: 29198 - protein, 258 aa, Arabidopsis thaliana
  peptide (1)..(258): Ceres Seq. ID no. 13490407
  misc_feature (2)..(98): Pfam Name: TB2/DP1, HVA22 family Pfam Description: TB2/DP1, HVA22 family
  misc_feature (1)..(215): Homolog of NCBI NO: 18394805 NR Description: expressed protein [Arabidopsis thaliana]
  misc_feature (1)..(151): Homolog of NCBI NO: 21671921 NR Description: Putative protein with HVA22 domain
  misc_feature (1)..(202): Homolog of NCBI NO: 20502988 NR Description: Putative InsB from Escherichia coli
  misc_feature (9)..(222): Homolog of NCBI NO: 9759014 NR Description: gene_id:K16E1.3~unknown protein [Arabidopsis
  misc_feature (1)..(222): Homolog of NCBI NO: 18422223 NR Description: expressed protein [Arabidopsis thaliana]
  misc_feature (1)..(222): Homolog of NCBI NO: 21553813 NR Description: unknown [Arabidopsis thaliana]
  misc_feature (98)..(258): Homolog of NCBI NO: 25408438 NR Description: hypothetical protein At2g36020 [imported] -
  misc_feature (1)..(258): Homolog of NCBI NO: 21537355 NR Description: unknown [Arabidopsis thaliana]
  misc_feature (1)..(258): Homolog of NCBI NO: 18404020 NR Description: expressed protein [Arabidopsis thaliana]
  misc_feature (1)..(258): Homolog of NCBI NO: 26451594 NR Description: unknown protein [Arabidopsis thaliana]
MLGDFIIRLLVLILGYTYPAFECFKTVEKNKVDIEELRFWCQYWILLALISSFERVGDFFISWLPLYGEMKVVFFVYLWYPKTKGTRHVYETLLKPYMARHETEIDRKIMELRARAWDFFIFYFNNFAQAGQSTLIQGFQYVLAQSVRFSAAAANQPPTERNVNMNAQSPVEMDNDPPSPRAPRPLNKSLSALRSLEKQTSRGRKWPPPTPPPTPGRDSAGTFNGDDGVNIPDTIPGSPLTDARAKLRRSNSRTQPAA

SEQ ID NO: 29199 - protein, 189 aa, Arabidopsis thaliana
  peptide (1)..(189): Ceres Seq. ID no. 13490408
  misc_feature (1)..(146): Homolog of NCBI NO: 18394805 NR Description: expressed protein [Arabidopsis thaliana]
  misc_feature (1)..(82): Homolog of NCBI NO: 21671921 NR Description: Putative protein with HVA22 domain
  misc_feature (1)..(133): Homolog of NCBI NO: 20502988 NR Description: Putative InsB from Escherichia coli
  misc_feature (1)..(153): Homolog of NCBI NO: 9759014 NR Description: gene_id:K16E1.3~unknown protein [Arabidopsis
  misc_feature (1)..(153): Homolog of NCBI NO: 18422223 NR Description: expressed protein [Arabidopsis thaliana]
  misc_feature (1)..(153): Homolog of NCBI NO: 21553813 NR Description: unknown [Arabidopsis thaliana]
  misc_feature (29)..(189): Homolog of NCBI NO: 25408438 NR Description: hypothetical protein At2g36020 [imported] -
  misc_feature (1)..(189): Homolog of NCBI NO: 21537355 NR Description: unknown [Arabidopsis thaliana]
  misc_feature (1)..(189): Homolog of NCBI NO: 18404020 NR Description: expressed protein [Arabidopsis thaliana]
  misc_feature (1)..(189): Homolog of NCBI NO: 26451594 NR Description: unknown protein [Arabidopsis thaliana]
MKVVFFVYLWYPKTKGTRHVYETLLKPYMARHETEIDRKIMELRARAWDFFIFYFNNFAQAGQSTLIQGFQYVLAQSVRFSAAAANQPPTERNVNMNAQSPVEMDNDPPSPRAPRPLNKSLSALRSLEKQTSRGRKWPPPTPPPTPGRDSAGTFNGDDGVNIPDTIPGSPLTDARAKLRRSNSRTQPAA

SEQ ID NO: 29200 - protein, 161 aa, Arabidopsis thaliana
  peptide (1)..(161): Ceres Seq. ID no. 13490409
  misc_feature (1)..(118): Homolog of NCBI NO: 18394805 NR Description: expressed protein [Arabidopsis thaliana]
  misc_feature (1)..(54): Homolog of NCBI NO: 21671921 NR Description: Putative protein with HVA22 domain
  misc_feature (1)..(105): Homolog of NCBI NO: 20502988 NR Description: Putative InsB from Escherichia coli
  misc_feature (1)..(125): Homolog of NCBI NO: 9759014 NR Description: gene_id:K16E1.3~unknown protein [Arabidopsis
  misc_feature (1)..(125): Homolog of NCBI NO: 18422223 NR Description: expressed protein [Arabidopsis thaliana]
  misc_feature (1)..(125): Homolog of NCBI NO: 21553813 NR Description: unknown [Arabidopsis thaliana]
  misc_feature (1)..(161): Homolog of NCBI NO: 25408438 NR Description: hypothetical protein At2g36020 [imported] -
  misc_feature (1)..(161): Homolog of NCBI NO: 21537355 NR Description: unknown [Arabidopsis thaliana]
  misc_feature (1)..(161): Homolog of NCBI NO: 18404020 NR Description: expressed protein [Arabidopsis thaliana]
  misc_feature (1)..(161): Homolog of NCBI NO: 26451594 NR Description: unknown protein [Arabidopsis thaliana]
MARHETEIDRKIMELRARAWDFFIFYFNNFAQAGQSTLIQGFQYVLAQSVRFSAAAANQPPTERNVNMNAQSPVEMDNDPPSPRAPRPLNKSLSALRSLEKQTSRGRKWPPPTPPPTPGRDSAGTFNGDDGVNIPDTIPGSPLTDARAKLRRSNSRTQPAA

SEQ ID NO: 29201 - DNA, 1224 bp, Arabidopsis thaliana
  misc_feature (1)..(1224): Ceres Seq. ID no. 13490655
  misc_feature: MA Experiment ID: 108433 Result: Up-regulated in Transcription
  misc_feature: MA Experiment 108433 PARAMETER Experiment Name: At_rhl_Mutant2_cDNA_P Parameter: Age (day) Value: 7
  misc_feature: MA Experiment 108433 PARAMETER Experiment Name: At_rhl_Mutant2_cDNA_P Parameter: Organism Value: A. thaliana
  misc_feature: MA Experiment 108433 PARAMETER Experiment Name: At_rhl_Mutant2_cDNA_P Parameter: Plant Line Value: rhl Mutant vs. wt landsburg
  misc_feature: MA Experiment 108433 PARAMETER Experiment Name: At_rhl_Mutant2_cDNA_P Parameter: Tissue Value: Roots
  misc_feature: MA Experiment ID: 108434 Result: Down-regulated in Transcription
  misc_feature: MA Experiment 108434 PARAMETER Experiment Name: At_Root_Tips_cDNA_P Parameter: Tissue Value: Root Tips
  misc_feature: MA Experiment ID: 108462 Result: Up-regulated in Transcription
  misc_feature: MA Experiment 108462 PARAMETER Experiment Name: At_Germinating_Seeds_cDNA_P Parameter: Age (day) Value: 2 vs. 0
  misc_feature: MA Experiment 108462 PARAMETER Experiment Name: At_Germinating_Seeds_cDNA_P Parameter: Tissue Value: Germinating Seeds
  misc_feature: MA Experiment ID: 108463 Result: Up-regulated in Transcription
  misc_feature: MA Experiment 108463 PARAMETER Experiment Name: At_Germinating_Seeds_cDNA_P Parameter: Age (day) Value: 3 vs. 0
  misc_feature: MA Experiment 108463 PARAMETER Experiment Name: At_Germinating_Seeds_cDNA_P Parameter: Tissue Value: Germinating Seeds
  misc_feature: MA Experiment ID: 108464 Result: Up-regulated in Transcription
  misc_feature: MA Experiment 108464 PARAMETER Experiment Name: At_Germinating_Seeds_cDNA_P Parameter: Age (day) Value: 4 vs. 0
  misc_feature: MA Experiment 108464 PARAMETER Experiment Name: At_Germinating_Seeds_cDNA_P Parameter: Tissue Value: Germinating Seeds
  misc_feature: MA Experiment ID: 108594 Result: Down-regulated in Transcription
  misc_feature: MA Experiment 108594 PARAMETER Experiment Name: At_Ler-rhl_Root_cDNA_P Parameter: Plant Line Value: null
  misc_feature: MA Experiment ID: 20000113 Result: Down-regulated in Transcription
  misc_feature: MA Experiment 20000113 PARAMETER Experiment Name: At_42deg_Heat_cDNA_P Parameter: Temperature (deg C) Value: 42 vs. 22
  misc_feature: MA Experiment 20000113 PARAMETER Experiment Name: At_42deg_Heat_cDNA_P Parameter: Timepoint (hr) Value: 8
  misc_feature: MA Experiment 20000113 PARAMETER Experiment Name: At_42deg_Heat_cDNA_P Parameter: Tissue Value: Aerial
  misc_feature: MA Experiment ID: 20000306 Result: Down-regulated in Transcription
  misc_feature: MA Experiment 20000306 PARAMETER Experiment Name: At_Germinating_Seeds_Sub_P Parameter: Age (hr) Value: 6 vs. 0
  misc_feature: MA Experiment 20000306 PARAMETER Experiment Name: At_Germinating_Seeds_Sub_P Parameter: Organism Value: A. thaliana
  misc_feature: MA Experiment 20000306 PARAMETER Experiment Name: At_Germinating_Seeds_Sub_P Parameter: Plant Line Value: WS
  misc_feature: MA Experiment 20000306 PARAMETER Experiment Name: At_Germinating_Seeds_Sub_P Parameter: Tissue Value: Germinating Seeds
  misc_feature: MA Experiment ID: 20000307 Result: Down-regulated in Transcription
  misc_feature: MA Experiment 20000307 PARAMETER Experiment Name: At_Germinating_Seeds_Sub_P Parameter: Age (hr) Value: 24 vs. 0
  misc_feature: MA Experiment 20000307 PARAMETER Experiment Name: At_Germinating_Seeds_Sub_P Parameter: Organism Value: A. thaliana
  misc_feature: MA Experiment 20000307 PARAMETER Experiment Name: At_Germinating_Seeds_Sub_P Parameter: Plant Line Value: WS
  misc_feature: MA Experiment 20000307 PARAMETER Experiment Name: At_Germinating_Seeds_Sub_P Parameter: Tissue Value: Germinating Seeds
  misc_feature: MA Experiment ID: 20000314 Result: Down-regulated in Transcription
  misc_feature: MA Experiment 20000314 PARAMETER Experiment Name: At_14day_Shoots-Roots_Sub_P Parameter: Age (day) Value: 14
  misc_feature: MA Experiment 20000314 PARAMETER Experiment Name: At_14day_Shoots-Roots_Sub_P Parameter: Organism Value: A. thaliana
  misc_feature: MA Experiment 20000314 PARAMETER Experiment Name: At_14day_Shoots-Roots_Sub_P Parameter: Plant Line Value: WS
  misc_feature: MA Experiment 20000314 PARAMETER Experiment Name: At_14day_Shoots-Roots_Sub_P Parameter: Tissue Value: Roots vs. Whole Plant
  misc_feature: MA Experiment ID: 20000315 Result: Down-regulated in Transcription
  misc_feature: MA Experiment 20000315 PARAMETER Experiment Name: At_14day_Shoots-Roots_Sub_P Parameter: Age (day) Value: 14
  misc_feature: MA Experiment 20000315 PARAMETER Experiment Name: At_14day_Shoots-Roots_Sub_P Parameter: Organism Value: A. thaliana
  misc_feature: MA Experiment 20000315 PARAMETER Experiment Name: At_14day_Shoots-Roots_Sub_P Parameter: Plant Line Value: WS
  misc_feature: MA Experiment 20000315 PARAMETER Experiment Name: At_14day_Shoots-Roots_Sub_P Parameter: Tissue Value: Shoots vs. Whole Plant
  misc_feature: MA Experiment ID: 20000346 Result: Up-regulated in Transcription
  misc_feature: MA Experiment 20000346 PARAMETER Experiment Name: At_2mM_SA_Sub_P Parameter: Age (day) Value: 14
  misc_feature: MA Experiment 20000346 PARAMETER Experiment Name: At_2mM_SA_Sub_P Parameter: Organism Value: A. thaliana
  misc_feature: MA Experiment 20000346 PARAMETER Experiment Name: At_2mM_SA_Sub_P Parameter: Plant Line Value: WS
  misc_feature: MA Experiment 20000346 PARAMETER Experiment Name: At_2mM_SA_Sub_P Parameter: Timepoint (hr) Value: 1
  misc_feature: MA Experiment 20000346 PARAMETER Experiment Name: At_2mM_SA_Sub_P Parameter: Tissue Value: Aerial
  misc_feature: MA Experiment 20000346 PARAMETER Experiment Name: At_2mM_SA_Sub_P Parameter: Treatment Value: 2mM SA vs. No Treatment
  misc_feature: MA Experiment ID: 20000347 Result: Up-regulated in Transcription
  misc_feature: MA Experiment 20000347 PARAMETER Experiment Name: At_2mM_SA_Sub_P Parameter: Age (day) Value: 14
  misc_feature: MA Experiment 20000347 PARAMETER Experiment Name: At_2mM_SA_Sub_P Parameter: Organism Value: A. thaliana
  misc_feature: MA Experiment 20000347 PARAMETER Experiment Name: At_2mM_SA_Sub_P Parameter: Plant Line Value: WS
  misc_feature: MA Experiment 20000347 PARAMETER Experiment Name: At_2mM_SA_Sub_P Parameter: Timepoint (hr) Value: 6
  misc_feature: MA Experiment 20000347 PARAMETER Experiment Name: At_2mM_SA_Sub_P Parameter: Tissue Value: Aerial
  misc_feature: MA Experiment 20000347 PARAMETER Experiment Name: At_2mM_SA_Sub_P Parameter: Treatment Value: 2mM SA vs. No Treatment
attgaatcggaaaaaaatggcgaacatctgcatagcgacgacggcaactaacaatcaggtgattctccgtgactacgtgagtggattccctaaacaatccgacctctacattgccacaaccaccattgacttacgtgtacctcccggatccatggcggttctagtcaagaatctctacttatcttgcgatcctcatagccgcactcgcatggggaagcctgatccctcatcccaggcttccatggctcatgctttcactatcggcaagccaatctctgggtttggagtggctaaagcaatagattcagggcacccaaattacaaaacaggagatttactttggggaagagttggttgggaagagtatagtgttattactccaactccttcttcacatttcaagattcatcacaccgatgttccattatctttctacactggacttcttggtattccgggtctcactgcgtatgttgggttttacgagatatgttctccgaagaaaggagagactgtatttgtatcagctgcatctggcgcagtaggtcaacttgtgggacagtttgcgaagatggcgggatgctatgtcgttggaagcgctagcagtaaagagaaggttgatcttctcaagactaagtttgggtatgatgacgctttcaattataaggaagaaaaggatcttagtgctgccctaaagaggtgtttcccagaaggaatagacatatactttgagaacgtgggaggcaaaatgttagacgcagtgctccaaaacatgaggacacatggccgaatcgcagcgtgtggaatgatttcacaatacaatctaaaggaaccagaaggtttacataacacagccaccattgtccacaaacgcatccgtgttcaagattttgcagctgtcgaattttttgatagatactccaagtttttggacttcatacttccacacgtaagagaagggaagataacatatgttgaggatatagcccaaggacttgagaatggaccttctgctttgatcggactcttccacggtaagaacgtcgggaaacaacttgtcgaagttgctcgcgagtgagattaaaattaacaaatgttttattaccgtttggttttagttgttgctggaaataagatcggtttgtacaagctgtgacaatgttttgtttgttggtcagaaataaatggactttgtttgtctatataagcattgtttctgacatg

SEQ ID NO: 29202 - protein, 358 aa, Arabidopsis thaliana
  peptide (1)..(358): Ceres Seq. ID no. 13490656
  misc_feature (139)..(355): Pfam Name: Zinc-binding dehydrogenase Pfam Description: Zinc-binding dehydrogenase
  misc_feature (12)..(358): Homolog of NCBI NO: 21593645 NR Description: allyl alcohol dehydrogenase, putative
  misc_feature (14)..(358): Homolog of NCBI NO: 21539447 NR Description: quinone oxidoreductase-like protein [Arabidopsis
  misc_feature (14)..(358): Homolog of NCBI NO: 17529140 NR Description: putative quinone oxidoreductase [Arabidopsis
  misc_feature (14)..(358): Homolog of NCBI NO: 22326861 NR Description: NADP-dependent oxidoreductase, putative
  misc_feature (14)..(358): Homolog of NCBI NO: 15237888 NR Description: NADP-dependent oxidoreductase (P1), putative
  misc_feature (6)..(358): Homolog of NCBI NO: 21536967 NR Description: quinone oxidoreductase-like protein [Arabidopsis
  misc_feature (6)..(358): Homolog of NCBI NO: 15240810 NR Description: NADP-dependent oxidoreductase, putative
  misc_feature (6)..(358): Homolog of NCBI NO: 21537356 NR Description: quinone oxidoreductase-like protein [Arabidopsis
  misc_feature (6)..(357): Homolog of NCBI NO: 15240812 NR Description: NADP-dependent oxidoreductase, putative
  misc_feature (6)..(358): Homolog of NCBI NO: 15240806 NR Description: NADP-dependent oxidoreductase, putative
LNRKKMANICIATTATNNQVILRDYVSGFPKQSDLYIATTTIDLRVPPGSMAVLVKNLYLSCDPHSRTRMGKPDPSSQASMAHAFTIGKPISGFGVAKAIDSGHPNYKTGDLLWGRVGWEEYSVITPTPSSHFKIHHTDVPLSFYTGLLGIPGLTAYVGFYEICSPKKGETVFVSAASGAVGQLVGQFAKMAGCYVVGSASSKEKVDLLKTKFGYDDAFNYKEEKDLSAALKRCFPEGIDIYFENVGGKMLDAVLQNMRTHGRIAACGMISQYNLKEPEGLHNTATIVHKRIRVQDFAAVEFFDRYSKFLDFILPHVREGKITYVEDIAQGLENGPSALIGLFHGKNVGKQLVEVARE

SEQ ID NO: 29203 - protein, 353 aa, Arabidopsis thaliana
  peptide (1)..(353): Ceres Seq. ID no. 13490657
  misc_feature (134)..(350): Pfam Name: Zinc-binding dehydrogenase Pfam Description: Zinc-binding dehydrogenase
  misc_feature (7)..(353): Homolog of NCBI NO: 21593645 NR Description: allyl alcohol dehydrogenase, putative
  misc_feature (9)..(353): Homolog of NCBI NO: 21539447 NR Description: quinone oxidoreductase-like protein [Arabidopsis
  misc_feature (9)..(353): Homolog of NCBI NO: 17529140 NR Description: putative quinone oxidoreductase [Arabidopsis
  misc_feature (9)..(353): Homolog of NCBI NO: 22326861 NR Description: NADP-dependent oxidoreductase, putative
  misc_feature (9)..(353): Homolog of NCBI NO: 15237888 NR Description: NADP-dependent oxidoreductase (P1), putative
  misc_feature (1)..(353): Homolog of NCBI NO: 21536967 NR Description: quinone oxidoreductase-like protein [Arabidopsis
  misc_feature (1)..(353): Homolog of NCBI NO: 15240810 NR Description: NADP-dependent oxidoreductase, putative
  misc_feature (1)..(353): Homolog of NCBI NO: 21537356 NR Description: quinone oxidoreductase-like protein [Arabidopsis
  misc_feature (1)..(352): Homolog of NCBI NO: 15240812 NR Description: NADP-dependent oxidoreductase, putative
  misc_feature (1)..(353): Homolog of NCBI NO: 15240806 NR Description: NADP-dependent oxidoreductase, putative
MANICIATTATNNQVILRDYVSGFPKQSDLYIATTTIDLRVPPGSMAVLVKNLYLSCDPHSRTRMGKPDPSSQASMAHAFTIGKPISGFGVAKAIDSGHPNYKTGDLLWGRVGWEEYSVITPTPSSHFKIHHTDVPLSFYTGLLGIPGLTAYVGFYEICSPKKGETVFVSAASGAVGQLVGQFAKMAGCYVVGSASSKEKVDLLKTKFGYDDAFNYKEEKDLSAALKRCFPEGIDIYFENVGGKMLDAVLQNMRTHGRIAACGMISQYNLKEPEGLHNTATIVHKRIRVQDFAAVEFFDRYSKFLDFILPHVREGKITYVEDIAQGLENGPSALIGLFHGKNVGKQLVEVARE

SEQ ID NO: 29204 - protein, 308 aa, Arabidopsis thaliana
  peptide (1)..(308): Ceres Seq. ID no. 13490658
  misc_feature (89)..(305): Pfam Name: Zinc-binding dehydrogenase Pfam Description: Zinc-binding dehydrogenase
  misc_feature (1)..(308): Homolog of NCBI NO: 21593645 NR Description: allyl alcohol dehydrogenase, putative
  misc_feature (1)..(308): Homolog of NCBI NO: 21539447 NR Description: quinone oxidoreductase-like protein [Arabidopsis
  misc_feature (1)..(308): Homolog of NCBI NO: 17529140 NR Description: putative quinone oxidoreductase [Arabidopsis
  misc_feature (1)..(308): Homolog of NCBI NO: 22326861 NR Description: NADP-dependent oxidoreductase, putative
  misc_feature (1)..(308): Homolog of NCBI NO: 15237888 NR Description: NADP-dependent oxidoreductase (P1), putative
  misc_feature (1)..(308): Homolog of NCBI NO: 21536967 NR Description: quinone oxidoreductase-like protein [Arabidopsis
  misc_feature (1)..(308): Homolog of NCBI NO: 15240810 NR Description: NADP-dependent oxidoreductase, putative
  misc_feature (1)..(308): Homolog of NCBI NO: 21537356 NR Description: quinone oxidoreductase-like protein [Arabidopsis
  misc_feature (1)..(307): Homolog of NCBI NO: 15240812 NR Description: NADP-dependent oxidoreductase, putative
  misc_feature (1)..(308): Homolog of NCBI NO: 15240806 NR Description: NADP-dependent oxidoreductase, putative
MAVLVKNLYLSCDPHSRTRMGKPDPSSQASMAHAFTIGKPISGFGVAKAIDSGHPNYKTGDLLWGRVGWEEYSVITPTPSSHFKIHHTDVPLSFYTGLLGIPGLTAYVGFYEICSPKKGETVFVSAASGAVGQLVGQFAKMAGCYVVGSASSKEKVDLLKTKFGYDDAFNYKEEKDLSAALKRCFPEGIDIYFENVGGKMLDAVLQNMRTHGRIAACGMISQYNLKEPEGLHNTATIVHKRIRVQDFAAVEFFDRYSKFLDFILPHVREGKITYVEDIAQGLENGPSALIGLFHGKNVGKQLVEVARE

SEQ ID NO: 29205 - DNA, 1273 bp, Arabidopsis thaliana
  misc_feature (1)..(1273): Ceres Seq. ID no. 13490651
  misc_feature: MA Experiment ID: 108461 Result: Up-regulated in Transcription
  misc_feature: MA Experiment 108461 PARAMETER Experiment Name: At_Germinating_Seeds_cDNA_P Parameter: Age (day) Value: 1 vs. 0
  misc_feature: MA Experiment 108461 PARAMETER Experiment Name: At_Germinating_Seeds_cDNA_P Parameter: Tissue Value: Germinating Seeds
  misc_feature: MA Experiment ID: 108464 Result: Up-regulated in Transcription
  misc_feature: MA Experiment 108464 PARAMETER Experiment Name: At_Germinating_Seeds_cDNA_P Parameter: Age (day) Value: 4 vs. 0
  misc_feature: MA Experiment 108464 PARAMETER Experiment Name: At_Germinating_Seeds_cDNA_P Parameter: Tissue Value: Germinating Seeds
  misc_feature: MA Experiment ID: 108607 Result: Down-regulated in Transcription
  misc_feature: MA Experiment 108607 PARAMETER Experiment Name: At_100uM_ABA_cDNA_P Parameter: Timepoint (hr) Value: 4
  misc_feature: MA Experiment 108607 PARAMETER Experiment Name: At_100uM_ABA_cDNA_P Parameter: Tissue Value: Aerial
  misc_feature: MA Experiment 108607 PARAMETER Experiment Name: At_100uM_ABA_cDNA_P Parameter: Treatment Value: 100uM ABA vs. No Treatment
  misc_feature: MA Experiment ID: 20000069 Result: Down-regulated in Transcription
  misc_feature: MA Experiment 20000069 PARAMETER Experiment Name: At_100uM_ABA_Mutants_cDNA_P Parameter: Plant Line Value: CS23
  misc_feature: MA Experiment 20000069 PARAMETER Experiment Name: At_100uM_ABA_Mutants_cDNA_P Parameter: Timepoint (hr) Value: 6
  misc_feature: MA Experiment 20000069 PARAMETER Experiment Name: At_100uM_ABA_Mutants_cDNA_P Parameter: Tissue Value: Aerial
  misc_feature: MA Experiment 20000069 PARAMETER Experiment Name: At_100uM_ABA_Mutants_cDNA_P Parameter: Treatment Value: 100uM ABA vs. No Treatment
  misc_feature: MA Experiment ID: 20000070 Result: Down-regulated in Transcription
  misc_feature: MA Experiment 20000070 PARAMETER Experiment Name: At_100uM_ABA_Mutants_cDNA_P Parameter: Plant Line Value: CS24
  misc_feature: MA Experiment 20000070 PARAMETER Experiment Name: At_100uM_ABA_Mutants_cDNA_P Parameter: Timepoint (hr) Value: 6
  misc_feature: MA Experiment 20000070 PARAMETER Experiment Name: At_100uM_ABA_Mutants_cDNA_P Parameter: Tissue Value: Aerial
  misc_feature: MA Experiment 20000070 PARAMETER Experiment Name: At_100uM_ABA_Mutants_cDNA_P Parameter: Treatment Value: 100uM ABA vs. No Treatment
  misc_feature: MA Experiment ID: 20000071 Result: Down-regulated in Transcription
  misc_feature: MA Experiment 20000071 PARAMETER Experiment Name: At_100uM_ABA_Mutants_cDNA_P Parameter: Plant Line Value: CS8104
  misc_feature: MA Experiment 20000071 PARAMETER Experiment Name: At_100uM_ABA_Mutants_cDNA_P Parameter: Timepoint (hr) Value: 6
  misc_feature: MA Experiment 20000071 PARAMETER Experiment Name: At_100uM_ABA_Mutants_cDNA_P Parameter: Tissue Value: Aerial
  misc_feature: MA Experiment 20000071 PARAMETER Experiment Name: At_100uM_ABA_Mutants_cDNA_P Parameter: Treatment Value: 100uM ABA vs. No Treatment
  misc_feature: MA Experiment ID: 20000087 Result: Down-regulated in Transcription
  misc_feature: MA Experiment 20000087 PARAMETER Experiment Name: At_100uM_ABA_Mutants_cDNA_P Parameter: Plant Line Value: WS
  misc_feature: MA Experiment 20000087 PARAMETER Experiment Name: At_100uM_ABA_Mutants_cDNA_P Parameter: Timepoint (hr) Value: 6
  misc_feature: MA Experiment 20000087 PARAMETER Experiment Name: At_100uM_ABA_Mutants_cDNA_P Parameter: Tissue Value: Aerial
  misc_feature: MA Experiment 20000087 PARAMETER Experiment Name: At_100uM_ABA_Mutants_cDNA_P Parameter: Treatment Value: 100uM ABA vs. No Treatment
  misc_feature: MA Experiment ID: 20000088 Result: Down-regulated in Transcription
  misc_feature: MA Experiment 20000088 PARAMETER Experiment Name: At_100uM_ABA_Mutants_cDNA_P Parameter: Plant Line Value: Landsberg
  misc_feature: MA Experiment 20000088 PARAMETER Experiment Name: At_100uM_ABA_Mutants_cDNA_P Parameter: Timepoint (hr) Value: 6
  misc_feature: MA Experiment 20000088 PARAMETER Experiment Name: At_100uM_ABA_Mutants_cDNA_P Parameter: Tissue Value: Aerial
  misc_feature: MA Experiment 20000088 PARAMETER Experiment Name: At_100uM_ABA_Mutants_cDNA_P Parameter: Treatment Value: 100uM ABA vs. No Treatment
  misc_feature: MA Experiment ID: 20000113 Result: Down-regulated in Transcription
  misc_feature: MA Experiment 20000113 PARAMETER Experiment Name: At_42deg_Heat_cDNA_P Parameter: Temperature (deg C) Value: 42 vs. 22
  misc_feature: MA Experiment 20000113 PARAMETER Experiment Name: At_42deg_Heat_cDNA_P Parameter: Timepoint (hr) Value: 8
  misc_feature: MA Experiment 20000113 PARAMETER Experiment Name: At_42deg_Heat_cDNA_P Parameter: Tissue Value: Aerial
  misc_feature: MA Experiment ID: 20000117 Result: Down-regulated in Transcription
  misc_feature: MA Experiment 20000117 PARAMETER Experiment Name: At_100uM_ABA_Mutants_cDNA_P Parameter: Plant Line Value: Columbia
  misc_feature: MA Experiment 20000117 PARAMETER Experiment Name: At_100uM_ABA_Mutants_cDNA_P Parameter: Timepoint (hr) Value: 6
  misc_feature: MA Experiment 20000117 PARAMETER Experiment Name: At_100uM_ABA_Mutants_cDNA_P Parameter: Tissue Value: Aerial
  misc_feature: MA Experiment 20000117 PARAMETER Experiment Name: At_100uM_ABA_Mutants_cDNA_P Parameter: Treatment Value: 100uM ABA vs. No Treatment
  misc_feature: MA Experiment ID: 20000179 Result: Up-regulated in Transcription
  misc_feature: MA Experiment 20000179 PARAMETER Experiment Name: At_Germinating_Seeds_P Parameter: Age (hr) Value: 6 vs. 0
  misc_feature: MA Experiment 20000179 PARAMETER Experiment Name: At_Germinating_Seeds_P Parameter: Tissue Value: Germinating Seeds
  misc_feature: MA Experiment ID: 20000180 Result: Up-regulated in Transcription
  misc_feature: MA Experiment 20000180 PARAMETER Experiment Name: At_Germinating_Seeds_P Parameter: Age (hr) Value: 24 vs. 0
  misc_feature: MA Experiment 20000180 PARAMETER Experiment Name: At_Germinating_Seeds_P Parameter: Tissue Value: Germinating Seeds
  misc_feature: MA Experiment ID: 20000234 Result: Up-regulated in Transcription
  misc_feature: MA Experiment 20000234 PARAMETER Experiment Name: At_Siliques_P Parameter: Age (day) Value: 21
  misc_feature: MA Experiment 20000234 PARAMETER Experiment Name: At_Siliques_P Parameter: Organism Value: A. thaliana
  misc_feature: MA Experiment 20000234 PARAMETER Experiment Name: At_Siliques_P Parameter: Plant Line Value: WS
  misc_feature: MA Experiment 20000234 PARAMETER Experiment Name: At_Siliques_P Parameter: Tissue Value: Less Than 5mm Siliques vs. Whole Plant
  misc_feature: MA Experiment ID: 20000265 Result: Up-regulated in Transcription
  misc_feature: MA Experiment 20000265 PARAMETER Experiment Name: At_Open_Flower_P Parameter: Age (day) Value: 21
  misc_feature: MA Experiment 20000265 PARAMETER Experiment Name: At_Open_Flower_P Parameter: Plant Line Value: WS
  misc_feature: MA Experiment 20000265 PARAMETER Experiment Name: At_Open_Flower_P Parameter: Tissue Value: Closed Flower vs. Whole Plant
  misc_feature: MA Experiment ID: 20001911 Result: Down-regulated in Transcription
  misc_feature: MA Experiment 20001911 PARAMETER Experiment Name: At_Drought_Reproduction_P Parameter: Age (day) Value: 40
  misc_feature: MA Experiment 20001911 PARAMETER Experiment Name: At_Drought_Reproduction_P Parameter: Organism Value: A. thaliana
  misc_feature: MA Experiment 20001911 PARAMETER Experiment Name: At_Drought_Reproduction_P Parameter: Plant Line Value: WS
  misc_feature: MA Experiment 20001911 PARAMETER Experiment Name: At_Drought_Reproduction_P Parameter: Timepoint (day) Value: 10
  misc_feature: MA Experiment 20001911 PARAMETER Experiment Name: At_Drought_Reproduction_P Parameter: Tissue Value: Flowers
  misc_feature: MA Experiment 20001911 PARAMETER Experiment Name: At_Drought_Reproduction_P Parameter: Treatment Value: Drought vs. No Drought
ctttggatttggaatcgcttctacttcactctcaccttcctcctattctctctctctttctatgtcaagttagcttagccgtctcaccagaaagctaaccttacctcacaaacattgattgtgttacactaatctcttaaatagagagccgtaatttctacacactctgatcgctagatggaaacggagatatcaggaatggataatccagctatgaccttggacgaggtttccatggaacgcaacaagagcttcgttaaggcattgcaggagctcaagaacttgaggcctcaactttattcagctgctgattactgtgaaaagtcttatcttcatagcgagcaaaagcaaatggtattggacaatttgaaagactacactgtgaaggctctagttaatgctgttgatcaccttggaactgtagcttccaagcttactgatctttttgatcaccaaaattcagacatatcaactatggaaatgagagcttcttgtgttagccagcaactgcttacatgccggacatatatcgacaaagaaggtcttagacagcaacagctattagcagttatcccattgcatcacaagcattacattcttcccaattctgttaacaagcgggtacactttagtcctctcagacgaactgacacaagacagaatcattaccaagctatatcccgtcttcaaccttcagatgcccctgcatcgaaatcactctcctggcatttaggctcagagaccaagtctaccctcaaaggaacatccacagttgcaccaagctccaaagattcaaaagctttctcaaagacatctggagtgttccatctcttaggtgatgatgaaaacatagcaaacaagaagcctttggctggttctcaggtctcaggtgttcctgctgcatccactgcccataaggatttggaggttccgaaacttctaactgcacacaggtcacttgataacaacccgcgacgagagatcattcaagctcctgtccggacaaagagtgttctttctgcgttctttgttaaacagaaaactccaaagctcaaagctggctatgtctcgtgaaaacaccaactctttgtactgagaaggaaatttcaatctcataccacgtttcttttaccttatataataacatgttgattttcatgtaattatcttaatcaccacatcaacgtacgaagtccagtaagacatgattttggtctatcattaacaaaactgtgtaatagattaagaatgtgtttttagaatgtaaaagctt

SEQ ID NO: 29206 - protein, 298 aa, Arabidopsis thaliana
  peptide (1)..(298): Ceres Seq. ID no. 13490652
  misc_feature (16)..(142): Homolog of NCBI NO: 15238265 NR Description: expressed protein [Arabidopsis thaliana]
  misc_feature (5)..(167): Homolog of NCBI NO: 34913914 NR Description: OSJNBa0066C06.8 [Oryza sativa (japonica
  misc_feature (8)..(148): Homolog of NCBI NO: 30689382 NR Description: expressed protein [Arabidopsis thaliana]
  misc_feature (8)..(148): Homolog of NCBI NO: 10177091 NR Description: emb|CAB66408.1~gene_id:MOP9.13~strong similarity
  misc_feature (12)..(291): Homolog of NCBI NO: 15229112 NR Description: expressed protein [Arabidopsis thaliana]
  misc_feature (4)..(293): Homolog of NCBI NO: 34912804 NR Description: P0501G01.11 [Oryza sativa (japonica
  misc_feature (174)..(298): Homolog of NCBI NO: 25408977 NR Description: hypothetical protein At2g46220 [imported] -
  misc_feature (24)..(196): Homolog of NCBI NO: 25408977 NR Description: hypothetical protein At2g46220 [imported] -
  misc_feature (1)..(298): Homolog of NCBI NO: 26452761 NR Description: unknown protein [Arabidopsis thaliana]
  misc_feature (1)..(298): Homolog of NCBI NO: 18407012 NR Description: expressed protein [Arabidopsis thaliana]
METEISGMDNPAMTLDEVSMERNKSFVKALQELKNLRPQLYSAADYCEKSYLHSEQKQMVLDNLKDYTVKALVNAVDHLGTVASKLTDLFDHQNSDISTMEMRASCVSQQLLTCRTYIDKEGLRQQQLLAVIPLHHKHYILPNSVNKRVHFSPLRRTDTRQNHYQAISRLQPSDAPASKSLSWHLGSETKSTLKGTSTVAPSSKDSKAFSKTSGVFHLLGDDENIANKKPLAGSQVSGVPAASTAHKDLEVPKLLTAHRSLDNNPRREIIQAPVRTKSVLSAFFVKQKTPKLKAGYVS

SEQ ID NO: 29207 - protein, 291 aa, Arabidopsis thaliana
  peptide (1)..(291): Ceres Seq. ID no. 13490653
  misc_feature (9)..(135): Homolog of NCBI NO: 15238265 NR Description: expressed protein [Arabidopsis thaliana]
  misc_feature (1)..(160): Homolog of NCBI NO: 34913914 NR Description: OSJNBa0066C06.8 [Oryza sativa (japonica
  misc_feature (1)..(141): Homolog of NCBI NO: 30689382 NR Description: expressed protein [Arabidopsis thaliana]
  misc_feature (1)..(141): Homolog of NCBI NO: 10177091 NR Description: emb|CAB66408.1~gene_id:MOP9.13~strong similarity
  misc_feature (5)..(284): Homolog of NCBI NO: 15229112 NR Description: expressed protein [Arabidopsis thaliana]
  misc_feature (1)..(286): Homolog of NCBI NO: 34912804 NR Description: P0501G01.11 [Oryza sativa (japonica
  misc_feature (167)..(291): Homolog of NCBI NO: 25408977 NR Description: hypothetical protein At2g46220 [imported] -
  misc_feature (17)..(189): Homolog of NCBI NO: 25408977 NR Description: hypothetical protein At2g46220 [imported] -
  misc_feature (1)..(291): Homolog of NCBI NO: 26452761 NR Description: unknown protein [Arabidopsis thaliana]
  misc_feature (1)..(291): Homolog of NCBI NO: 18407012 NR Description: expressed protein [Arabidopsis thaliana]
MDNPAMTLDEVSMERNKSFVKALQELKNLRPQLYSAADYCEKSYLHSEQKQMVLDNLKDYTVKALVNAVDHLGTVASKLTDLFDHQNSDISTMEMRASCVSQQLLTCRTYIDKEGLRQQQLLAVIPLHHKHYILPNSVNKRVHFSPLRRTDTRQNHYQAISRLQPSDAPASKSLSWHLGSETKSTLKGTSTVAPSSKDSKAFSKTSGVFHLLGDDENIANKKPLAGSQVSGVPAASTAHKDLEVPKLLTAHRSLDNNPRREIIQAPVRTKSVLSAFFVKQKTPKLKAGYVS

SEQ ID NO: 29208 - protein, 286 aa, Arabidopsis thaliana
  peptide (1)..(286): Ceres Seq. ID no. 13490654
  misc_feature (4)..(130): Homolog of NCBI NO: 15238265 NR Description: expressed protein [Arabidopsis thaliana]
  misc_feature (1)..(155): Homolog of NCBI NO: 34913914 NR Description: OSJNBa0066C06.8 [Oryza sativa (japonica
  misc_feature (1)..(136): Homolog of NCBI NO: 30689382 NR Description: expressed protein [Arabidopsis thaliana]
  misc_feature (1)..(136): Homolog of NCBI NO: 10177091 NR Description: emb|CAB66408.1~gene_id:MOP9.13~strong similarity
  misc_feature (1)..(279): Homolog of NCBI NO: 15229112 NR Description: expressed protein [Arabidopsis thaliana]
  misc_feature (1)..(281): Homolog of NCBI NO: 34912804 NR Description: P0501G01.11 [Oryza sativa (japonica
  misc_feature (162)..(286): Homolog of NCBI NO: 25408977 NR Description: hypothetical protein At2g46220 [imported] -
  misc_feature (12)..(184): Homolog of NCBI NO: 25408977 NR Description: hypothetical protein At2g46220 [imported] -
  misc_feature (1)..(286): Homolog of NCBI NO: 26452761 NR Description: unknown protein [Arabidopsis thaliana]
  misc_feature (1)..(286): Homolog of NCBI NO: 18407012 NR Description: expressed protein [Arabidopsis thaliana]
MTLDEVSMERNKSFVKALQELKNLRPQLYSAADYCEKSYLHSEQKQMVLDNLKDYTVKALVNAVDHLGTVASKLTDLFDHQNSDISTMEMRASCVSQQLLTCRTYIDKEGLRQQQLLAVIPLHHKHYILPNSVNKRVHFSPLRRTDTRQNHYQAISRLQPSDAPASKSLSWHLGSETKSTLKGTSTVAPSSKDSKAFSKTSGVFHLLGDDENIANKKPLAGSQVSGVPAASTAHKDLEVPKLLTAHRSLDNNPRREIIQAPVRTKSVLSAFFVKQKTPKLKAGYVS

SEQ ID NO: 29209 - DNA, 1665 bp, Arabidopsis thaliana
  misc_feature (1)..(1665): Ceres Seq. ID no. 13575417
  misc_feature: MA Experiment ID: 108433 Result: Down-regulated in Transcription
  misc_feature: MA Experiment 108433 PARAMETER Experiment Name: At_rhl_Mutant2_cDNA_P Parameter: Age (day) Value: 7
  misc_feature: MA Experiment 108433 PARAMETER Experiment Name: At_rhl_Mutant2_cDNA_P Parameter: Organism Value: A. thaliana
  misc_feature: MA Experiment 108433 PARAMETER Experiment Name: At_rhl_Mutant2_cDNA_P Parameter: Plant Line Value: rhl Mutant vs. wt landsburg
  misc_feature: MA Experiment 108433 PARAMETER Experiment Name: At_rhl_Mutant2_cDNA_P Parameter: Tissue Value: Roots
  misc_feature: MA Experiment ID: 108461 Result: Up-regulated in Transcription
  misc_feature: MA Experiment 108461 PARAMETER Experiment Name: At_Germinating_Seeds_cDNA_P Parameter: Age (day) Value: 1 vs. 0
  misc_feature: MA Experiment 108461 PARAMETER Experiment Name: At_Germinating_Seeds_cDNA_P Parameter: Tissue Value: Germinating Seeds
  misc_feature: MA Experiment ID: 108462 Result: Up-regulated in Transcription
  misc_feature: MA Experiment 108462 PARAMETER Experiment Name: At_Germinating_Seeds_cDNA_P Parameter: Age (day) Value: 2 vs. 0
  misc_feature: MA Experiment 108462 PARAMETER Experiment Name: At_Germinating_Seeds_cDNA_P Parameter: Tissue Value: Germinating Seeds
  misc_feature: MA Experiment ID: 108463 Result: Up-regulated in Transcription
  misc_feature: MA Experiment 108463 PARAMETER Experiment Name: At_Germinating_Seeds_cDNA_P Parameter: Age (day) Value: 3 vs. 0
  misc_feature: MA Experiment 108463 PARAMETER Experiment Name: At_Germinating_Seeds_cDNA_P Parameter: Tissue Value: Germinating Seeds
  misc_feature: MA Experiment ID: 108464 Result: Up-regulated in Transcription
  misc_feature: MA Experiment 108464 PARAMETER Experiment Name: At_Germinating_Seeds_cDNA_P Parameter: Age (day) Value: 4 vs. 0
  misc_feature: MA Experiment 108464 PARAMETER Experiment Name: At_Germinating_Seeds_cDNA_P Parameter: Tissue Value: Germinating Seeds
  misc_feature: MA Experiment ID: 108569 Result: Up-regulated in Transcription
  misc_feature: MA Experiment 108569 PARAMETER Experiment Name: At_0.001%_MeJA__cDNA_P Parameter: Timepoint (hr) Value: 6
  misc_feature: MA Experiment 108569 PARAMETER Experiment Name: At_0.001%_MeJA__cDNA_P Parameter: Tissue Value: Aerial
  misc_feature: MA Experiment 108569 PARAMETER Experiment Name: At_0.001%_MeJA__cDNA_P Parameter: Treatment Value: 0.001% MeJA vs. No Treatment
  misc_feature: MA Experiment ID: 108576 Result: Down-regulated in Transcription
  misc_feature: MA Experiment 108576 PARAMETER Experiment Name: At_42deg_Heat_cDNA_P Parameter: Temperature (deg C) Value: 42 vs. 22
  misc_feature: MA Experiment 108576 PARAMETER Experiment Name: At_42deg_Heat_cDNA_P Parameter: Timepoint (hr) Value: 1
  misc_feature: MA Experiment 108576 PARAMETER Experiment Name: At_42deg_Heat_cDNA_P Parameter: Tissue Value: Aerial
  misc_feature: MA Experiment ID: 108579 Result: Up-regulated in Transcription
  misc_feature: MA Experiment 108579 PARAMETER Experiment Name: At_4deg_Cold_cDNA_P Parameter: Temperature (deg C) Value: 4 vs. 22
  misc_feature: MA Experiment 108579 PARAMETER Experiment Name: At_4deg_Cold_cDNA_P Parameter: Timepoint (hr) Value: 6
  misc_feature: MA Experiment 108579 PARAMETER Experiment Name: At_4deg_Cold_cDNA_P Parameter: Tissue Value: Aerial
  misc_feature: MA Experiment ID: 108595 Result: Down-regulated in Transcription
  misc_feature: MA Experiment 108595 PARAMETER Experiment Name: At_Ler-pi_Ovule_cDNA_P Parameter: Plant Line Value: null
  misc_feature: MA Experiment ID: 20000069 Result: Down-regulated in Transcription
  misc_feature: MA Experiment 20000069 PARAMETER Experiment Name: At_100uM_ABA_Mutants_cDNA_P Parameter: Plant Line Value: CS23
  misc_feature: MA Experiment 20000069 PARAMETER Experiment Name: At_100uM_ABA_Mutants_cDNA_P Parameter: Timepoint (hr) Value: 6
  misc_feature: MA Experiment 20000069 PARAMETER Experiment Name: At_100uM_ABA_Mutants_cDNA_P Parameter: Tissue Value: Aerial
  misc_feature: MA Experiment 20000069 PARAMETER Experiment Name: At_100uM_ABA_Mutants_cDNA_P Parameter: Treatment Value: 100uM ABA vs. No Treatment
  misc_feature: MA Experiment ID: 20000072 Result: Down-regulated in Transcription
  misc_feature: MA Experiment 20000072 PARAMETER Experiment Name: At_100uM_ABA_Mutants_cDNA_P Parameter: Plant Line Value: CS8105
  misc_feature: MA Experiment 20000072 PARAMETER Experiment Name: At_100uM_ABA_Mutants_cDNA_P Parameter: Timepoint (hr) Value: 6
  misc_feature: MA Experiment 20000072 PARAMETER Experiment Name: At_100uM_ABA_Mutants_cDNA_P Parameter: Tissue Value: Aerial
  misc_feature: MA Experiment 20000072 PARAMETER Experiment Name: At_100uM_ABA_Mutants_cDNA_P Parameter: Treatment Value: 100uM ABA vs. No Treatment
  misc_feature: MA Experiment ID: 20000086 Result: Down-regulated in Transcription
  misc_feature: MA Experiment 20000086 PARAMETER Experiment Name: At_100uM_ABA_Mutants_cDNA_P Parameter: Plant Line Value: CS22
  misc_feature: MA Experiment 20000086 PARAMETER Experiment Name: At_100uM_ABA_Mutants_cDNA_P Parameter: Timepoint (hr) Value: 6
  misc_feature: MA Experiment 20000086 PARAMETER Experiment Name: At_100uM_ABA_Mutants_cDNA_P Parameter: Tissue Value: Aerial
  misc_feature: MA Experiment 20000086 PARAMETER Experiment Name: At_100uM_ABA_Mutants_cDNA_P Parameter: Treatment Value: 100uM ABA vs. No Treatment
  misc_feature: MA Experiment ID: 20000087 Result: Down-regulated in Transcription
  misc_feature: MA Experiment 20000087 PARAMETER Experiment Name: At_100uM_ABA_Mutants_cDNA_P Parameter: Plant Line Value: WS
  misc_feature: MA Experiment 20000087 PARAMETER Experiment Name: At_100uM_ABA_Mutants_cDNA_P Parameter: Timepoint (hr) Value: 6
  misc_feature: MA Experiment 20000087 PARAMETER Experiment Name: At_100uM_ABA_Mutants_cDNA_P Parameter: Tissue Value: Aerial
  misc_feature: MA Experiment 20000087 PARAMETER Experiment Name: At_100uM_ABA_Mutants_cDNA_P Parameter: Treatment Value: 100uM ABA vs. No Treatment
  misc_feature: MA Experiment ID: 20000111 Result: Down-regulated in Transcription
  misc_feature: MA Experiment 20000111 PARAMETER Experiment Name: At_42deg_Heat_cDNA_P Parameter: Temperature (deg C) Value: 42 vs. 22
  misc_feature: MA Experiment 20000111 PARAMETER Experiment Name: At_42deg_Heat_cDNA_P Parameter: Timepoint (hr) Value: 6
  misc_feature: MA Experiment 20000111 PARAMETER Experiment Name: At_42deg_Heat_cDNA_P Parameter: Tissue Value: Aerial
  misc_feature: MA Experiment ID: 20000112 Result: Down-regulated in Transcription
  misc_feature: MA Experiment 20000112 PARAMETER Experiment Name: At_42deg_Heat_cDNA_P Parameter: Temperature (deg C) Value: 42 vs. 22
  misc_feature: MA Experiment 20000112 PARAMETER Experiment Name: At_42deg_Heat_cDNA_P Parameter: Timepoint (hr) Value: 2
  misc_feature: MA Experiment 20000112 PARAMETER Experiment Name: At_42deg_Heat_cDNA_P Parameter: Tissue Value: Aerial
  misc_feature: MA Experiment ID: 20000113 Result: Down-regulated in Transcription
  misc_feature: MA Experiment 20000113 PARAMETER Experiment Name: At_42deg_Heat_cDNA_P Parameter: Temperature (deg C) Value: 42 vs. 22
  misc_feature: MA Experiment 20000113 PARAMETER Experiment Name: At_42deg_Heat_cDNA_P Parameter: Timepoint (hr) Value: 8
  misc_feature: MA Experiment 20000113 PARAMETER Experiment Name: At_42deg_Heat_cDNA_P Parameter: Tissue Value: Aerial
  misc_feature: MA Experiment ID: 20000117 Result: Down-regulated in Transcription
  misc_feature: MA Experiment 20000117 PARAMETER Experiment Name: At_100uM_ABA_Mutants_cDNA_P Parameter: Plant Line Value: Columbia
  misc_feature: MA Experiment 20000117 PARAMETER Experiment Name: At_100uM_ABA_Mutants_cDNA_P Parameter: Timepoint (hr) Value: 6
  misc_feature: MA Experiment 20000117 PARAMETER Experiment Name: At_100uM_ABA_Mutants_cDNA_P Parameter: Tissue Value: Aerial
  misc_feature: MA Experiment 20000117 PARAMETER Experiment Name: At_100uM_ABA_Mutants_cDNA_P Parameter: Treatment Value: 100uM ABA vs. No Treatment
  misc_feature: MA Experiment ID: 20000144 Result: Down-regulated in Transcription
  misc_feature: MA Experiment 20000144 PARAMETER Experiment Name: At_42deg_Heat_cDNA_P Parameter: Temperature (deg C) Value: 42 vs. 22
  misc_feature: MA Experiment 20000144 PARAMETER Experiment Name: At_42deg_Heat_cDNA_P Parameter: Timepoint (hr) Value: 1
  misc_feature: MA Experiment 20000144 PARAMETER Experiment Name: At_42deg_Heat_cDNA_P Parameter: Tissue Value: Aerial
  misc_feature: MA Experiment ID: 20000171 Result: Down-regulated in Transcription
  misc_feature: MA Experiment 20000171 PARAMETER Experiment Name: At_42deg_Heat_P Parameter: Age (day) Value: 14
  misc_feature: MA Experiment 20000171 PARAMETER Experiment Name: At_42deg_Heat_P Parameter: Organism Value: A. thaliana
  misc_feature: MA Experiment 20000171 PARAMETER Experiment Name: At_42deg_Heat_P Parameter: Plant Line Value: WS
  misc_feature: MA Experiment 20000171 PARAMETER Experiment Name: At_42deg_Heat_P Parameter: Temperature (deg C) Value: 42 vs. 22
  misc_feature: MA Experiment 20000171 PARAMETER Experiment Name: At_42deg_Heat_P Parameter: Timepoint (hr) Value: 1
  misc_feature: MA Experiment 20000171 PARAMETER Experiment Name: At_42deg_Heat_P Parameter: Tissue Value: Aerial
  misc_feature: MA Experiment ID: 20000179 Result: Up-regulated in Transcription
  misc_feature: MA Experiment 20000179 PARAMETER Experiment Name: At_Germinating_Seeds_P Parameter: Age (hr) Value: 6 vs. 0
  misc_feature: MA Experiment 20000179 PARAMETER Experiment Name: At_Germinating_Seeds_P Parameter: Tissue Value: Germinating Seeds
  misc_feature: MA Experiment ID: 20000180 Result: Up-regulated in Transcription
  misc_feature: MA Experiment 20000180 PARAMETER Experiment Name: At_Germinating_Seeds_P Parameter: Age (hr) Value: 24 vs. 0
  misc_feature: MA Experiment 20000180 PARAMETER Experiment Name: At_Germinating_Seeds_P Parameter: Tissue Value: Germinating Seeds
  misc_feature: MA Experiment ID: 20000185 Result: Up-regulated in Transcription
  misc_feature: MA Experiment 20000185 PARAMETER Experiment Name: At_Roots__P Parameter: Age (day) Value: 7 vs. 21
  misc_feature: MA Experiment 20000185 PARAMETER Experiment Name: At_Roots__P Parameter: Organism Value: A. thaliana
  misc_feature: MA Experiment 20000185 PARAMETER Experiment Name: At_Roots__P Parameter: Tissue Value: Roots vs. Whole Plant
  misc_feature: MA Experiment ID: 20000213 Result: Up-regulated in Transcription
  misc_feature: MA Experiment 20000213 PARAMETER Experiment Name: At_4deg_Cold_P Parameter: Timepoint (hr) Value: 2
  misc_feature: MA Experiment ID: 20000234 Result: Up-regulated in Transcription
  misc_feature: MA Experiment 20000234 PARAMETER Experiment Name: At_Siliques_P Parameter: Age (day) Value: 21
  misc_feature: MA Experiment 20000234 PARAMETER Experiment Name: At_Siliques_P Parameter: Organism Value: A. thaliana
  misc_feature: MA Experiment 20000234 PARAMETER Experiment Name: At_Siliques_P Parameter: Plant Line Value: WS
  misc_feature: MA Experiment 20000234 PARAMETER Experiment Name: At_Siliques_P Parameter: Tissue Value: Less Than 5mm Siliques vs. Whole Plant
  misc_feature: MA Experiment ID: 20000235 Result: Up-regulated in Transcription
  misc_feature: MA Experiment 20000235 PARAMETER Experiment Name: At_Siliques_P Parameter: Age (day) Value: 21
  misc_feature: MA Experiment 20000235 PARAMETER Experiment Name: At_Siliques_P Parameter: Organism Value: A. thaliana
  misc_feature: MA Experiment 20000235 PARAMETER Experiment Name: At_Siliques_P Parameter: Plant Line Value: WS
  misc_feature: MA Experiment 20000235 PARAMETER Experiment Name: At_Siliques_P Parameter: Tissue Value: 5-10mm Siliques vs. Whole Plant
  misc_feature: MA Experiment ID: 20000437 Result: Down-regulated in Transcription
  misc_feature: MA Experiment 20000437 PARAMETER Experiment Name: At_Drought_P Parameter: Age (day) Value: 8
  misc_feature: MA Experiment 20000437 PARAMETER Experiment Name: At_Drought_P Parameter: Organism Value: A. thaliana
  misc_feature: MA Experiment 20000437 PARAMETER Experiment Name: At_Drought_P Parameter: Plant Line Value: WS
  misc_feature: MA Experiment 20000437 PARAMETER Experiment Name: At_Drought_P Parameter: Timepoint (hr) Value: 24
  misc_feature: MA Experiment 20000437 PARAMETER Experiment Name: At_Drought_P Parameter: Tissue Value: Whole Plant
  misc_feature: MA Experiment 20000437 PARAMETER Experiment Name: At_Drought_P Parameter: Treatment Value: Drought vs. No Drought
  misc_feature: MA Experiment ID: 20000439 Result: Up-regulated in Transcription
  misc_feature: MA Experiment 20000439 PARAMETER Experiment Name: At_Roots__P Parameter: Age (day) Value: 14 vs. 21
  misc_feature: MA Experiment 20000439 PARAMETER Experiment Name: At_Roots__P Parameter: Organism Value: A. thaliana
  misc_feature: MA Experiment 20000439 PARAMETER Experiment Name: At_Roots__P Parameter: Tissue Value: Roots vs. Whole Plant
  misc_feature: MA Experiment ID: 20001248 Result: Down-regulated in Transcription
  misc_feature: MA Experiment 20001248 PARAMETER Experiment Name: At_Far-red-induction_P Parameter: Age (day) Value: 7
  misc_feature: MA Experiment 20001248 PARAMETER Experiment Name: At_Far-red-induction_P Parameter: Light Value: Far-red vs. White
  misc_feature: MA Experiment 20001248 PARAMETER Experiment Name: At_Far-red-induction_P Parameter: Organism Value: A. thaliana
  misc_feature: MA Experiment 20001248 PARAMETER Experiment Name: At_Far-red-induction_P Parameter: Plant Line Value: Columbia
  misc_feature: MA Experiment 20001248 PARAMETER Experiment Name: At_Far-red-induction_P Parameter: Timepoint (hr) Value: 4
  misc_feature: MA Experiment 20001248 PARAMETER Experiment Name: At_Far-red-induction_P Parameter: Tissue Value: Whole Plant
  misc_feature: MA Experiment ID: 20001450 Result: Down-regulated in Transcription
  misc_feature: MA Experiment 20001450 PARAMETER Experiment Name: At_Far-red-induction_P Parameter: Age (day) Value: 7
  misc_feature: MA Experiment 20001450 PARAMETER Experiment Name: At_Far-red-induction_P Parameter: Light Value: Far-red vs. White
  misc_feature: MA Experiment 20001450 PARAMETER Experiment Name: At_Far-red-induction_P Parameter: Organism Value: A. thaliana
  misc_feature: MA Experiment 20001450 PARAMETER Experiment Name: At_Far-red-induction_P Parameter: Plant Line Value: Columbia
  misc_feature: MA Experiment 20001450 PARAMETER Experiment Name: At_Far-red-induction_P Parameter: Timepoint (hr) Value: 8
  misc_feature: MA Experiment 20001450 PARAMETER Experiment Name: At_Far-red-induction_P Parameter: Tissue Value: Whole Plant
  misc_feature: MA Experiment ID: 20001559 Result: Down-regulated in Transcription
  misc_feature: MA Experiment 20001559 PARAMETER Experiment Name: At_Drought_Soil_Dry_P Parameter: Age (day) Value: 28
  misc_feature: MA Experiment 20001559 PARAMETER Experiment Name: At_Drought_Soil_Dry_P Parameter: Organism Value: A. thaliana
  misc_feature: MA Experiment 20001559 PARAMETER Experiment Name: At_Drought_Soil_Dry_P Parameter: Plant Line Value: WS
  misc_feature: MA Experiment 20001559 PARAMETER Experiment Name: At_Drought_Soil_Dry_P Parameter: Post Timepoint (hr) Value: 29
  misc_feature: MA Experiment 20001559 PARAMETER Experiment Name: At_Drought_Soil_Dry_P Parameter: Post-Treatment Value: Re-Water vs. No Drought
  misc_feature: MA Experiment 20001559 PARAMETER Experiment Name: At_Drought_Soil_Dry_P Parameter: Timepoint (day) Value: 14
  misc_feature: MA Experiment 20001559 PARAMETER Experiment Name: At_Drought_Soil_Dry_P Parameter: Treatment Value: Drought vs. No Drought
  misc_feature: MA Experiment ID: 20001911 Result: Down-regulated in Transcription
  misc_feature: MA Experiment 20001911 PARAMETER Experiment Name: At_Drought_Reproduction_P Parameter: Age (day) Value: 40
  misc_feature: MA Experiment 20001911 PARAMETER Experiment Name: At_Drought_Reproduction_P Parameter: Organism Value: A. thaliana
  misc_feature: MA Experiment 20001911 PARAMETER Experiment Name: At_Drought_Reproduction_P Parameter: Plant Line Value: WS
  misc_feature: MA Experiment 20001911 PARAMETER Experiment Name: At_Drought_Reproduction_P Parameter: Timepoint (day) Value: 10
  misc_feature: MA Experiment 20001911 PARAMETER Experiment Name: At_Drought_Reproduction_P Parameter: Tissue Value: Flowers
  misc_feature: MA Experiment 20001911 PARAMETER Experiment Name: At_Drought_Reproduction_P Parameter: Treatment Value: Drought vs. No Drought
aagagcgggcaaaacaaacagagagcgagtcacgcgccgagttttcctcacttgttctcaataaatctctctctctttcttctctatcgctttcatttttctcctccagatctcgattccaatctctctccctctctacttccttcaacagaaatggaaacgttcctatttacctctgaatccgtcaatgaaggacacccagacaagctttgtgaccagatttctgatgcgatccttgatgcttgcttagagcaagatcctgaaagcaaagtggcgtgtgagacatgcaccaagaccaacatggtgatggtgtttggtgagatcactaccgctgcgaaagttgactatgagaagattgttagatccacttgcagggagattggttttatctctgctgatgttggtcttgacgctgacaaatgcaatgttttggttaacattgagcaacagagccctgacattgctcagggtgttcatggtcatttgaccaagaagcctgaagatattggtgctggtgatcagggacatatgtttgggtatgctactgatgagactcctgagctcatgccgttgactcatgtcctagccaccaagcttggtgctaagcttactgaagtgaggaagaacaagacttgcccatggttgaggcctgatggtaagacacaagtcacagtggagtacaagaacgatggtggagctatgattccgattagagtccacactgttcttatctcaactcaacatgacgaaactgtcaccaatgatgagattgctgctgacttgaaggagcatgtgatcaagcctgttatccctgctaagtaccttgacgataacaccatctttcacttgaacccatctggtcgttttgtcatcggagggcctcatggtgatgctggacttacagggaggaagatcatcattgacacttatggtggttggggtgctcatggtggaggtgccttctcaggaaaggacccaaccaaggttgacagaagcggtgcctatatcgtgaggcaggctgcaaagagcgtggtagcagcaggactcgcacgccgttgtatcgtgcaggtatcatacgccattggtgtccctgagccgctctcagtgtttgttgacacctacaagaccgggaccatcccagacaaggatatccttgtgttgatcaaggaagcatttgacttcaggccgggaatgatggccattaaccttgaccttaagaggggaggtaacttcaggttccagaaaaccgctgcgtatggccatttcgggcgtgatgaccctgacttcacttgggaggttgtcaagccgctcaagccaaaggcctagacagaaacaaagctggcaattgcaagaactgagttgagtcactccccaactactgggaacttatcattataccattattattgcaaatgactgaataaagaaagcttctgcattgtcaccattcacatttgttttcgcgaacacaggccagcggttcatatatctggtaatcgaagattgcaaatgaaagatttgagttttatgttttgaatttttgcctcttttttatttttctttttcttttccctcttaatctcttgtattgtaattttgattgtgtaaccaagaaatccatcctcgtgatgttttttttttataagaaaatatcatgcaagttag

SEQ ID NO: 29210 - protein, 441 aa, Arabidopsis thaliana
  peptide (1)..(441): Ceres Seq. ID no. 13575418
  misc_feature (167)..(289): Pfam Name: S-adenosylmethionine synthetase, central domain Pfam Description: S-adenosylmethionine synthetase, central domain
  misc_feature (52)..(438): Homolog of NCBI NO: 3024127 NR Description: S-adenosylmethionine synthetase 2 (Methionine
  misc_feature (52)..(441): Homolog of NCBI NO: 1708995 NR Description: S-adenosylmethionine synthetase 1 (Methionine
  misc_feature (52)..(441): Homolog of NCBI NO: 3024148 NR Description: S-adenosylmethionine synthetase 3 (Methionine
  misc_feature (52)..(441): Homolog of NCBI NO: 1709004 NR Description: S-adenosylmethionine synthetase 2 (Methionine
  misc_feature (52)..(441): Homolog of NCBI NO: 5923879 NR Description: S-adenosyl-L-methionine synthetase [Petunia x
  misc_feature (52)..(441): Homolog of NCBI NO: 1346523 NR Description: S-adenosylmethionine synthetase (Methionine
  misc_feature (52)..(441): Homolog of NCBI NO: 7230379 NR Description: S-adenosyl-L-methionine synthetase [Nicotiana
  misc_feature (52)..(441): Homolog of NCBI NO: 1170939 NR Description: S-adenosylmethionine synthetase 3 (Methionine
  misc_feature (52)..(441): Homolog of NCBI NO: 14600070 NR Description: S-adenosylmethionine synthetase [Brassica juncea]
  misc_feature (52)..(441): Homolog of NCBI NO: 15228048 NR Description: s-adenosylmethionine synthetase -related
KSGQNKQRASHAPSFPHLFSINLSLFLLYRFHFSPPDLDSNLSPSLLPSTEMETFLFTSESVNEGHPDKLCDQISDAILDACLEQDPESKVACETCTKTNMVMVFGEITTAAKVDYEKIVRSTCREIGFISADVGLDADKCNVLVNIEQQSPDIAQGVHGHLTKKPEDIGAGDQGHMFGYATDETPELMPLTHVLATKLGAKLTEVRKNKTCPWLRPDGKTQVTVEYKNDGGAMIPIRVHTVLISTQHDETVTNDEIAADLKEHVIKPVIPAKYLDDNTIFHLNPSGRFVIGGPHGDAGLTGRKIIIDTYGGWGAHGGGAFSGKDPTKVDRSGAYIVRQAAKSVVAAGLARRCIVQVSYAIGVPEPLSVFVDTYKTGTIPDKDILVLIKEAFDFRPGMMAINLDLKRGGNFRFQKTAAYGHFGRDDPDFTWEVVKPLKPKA

SEQ ID NO: 29211 - protein, 390 aa, Arabidopsis thaliana
  peptide (1)..(390): Ceres Seq. ID no. 13575419
  misc_feature (116)..(238): Pfam Name: S-adenosylmethionine synthetase, central domain Pfam Description: S-adenosylmethionine synthetase, central domain
  misc_feature (1)..(387): Homolog of NCBI NO: 3024127 NR Description: S-adenosylmethionine synthetase 2 (Methionine
  misc_feature (1)..(390): Homolog of NCBI NO: 1708995 NR Description: S-adenosylmethionine synthetase 1 (Methionine
  misc_feature (1)..(390): Homolog of NCBI NO: 3024148 NR Description: S-adenosylmethionine synthetase 3 (Methionine
  misc_feature (1)..(390): Homolog of NCBI NO: 1709004 NR Description: S-adenosylmethionine synthetase 2 (Methionine
  misc_feature (1)..(390): Homolog of NCBI NO: 5923879 NR Description: S-adenosyl-L-methionine synthetase [Petunia x
  misc_feature (1)..(390): Homolog of NCBI NO: 1346523 NR Description: S-adenosylmethionine synthetase (Methionine
  misc_feature (1)..(390): Homolog of NCBI NO: 7230379 NR Description: S-adenosyl-L-methionine synthetase [Nicotiana
  misc_feature (1)..(390): Homolog of NCBI NO: 1170939 NR Description: S-adenosylmethionine synthetase 3 (Methionine
  misc_feature (1)..(390): Homolog of NCBI NO: 14600070 NR Description: S-adenosylmethionine synthetase [Brassica juncea]
  misc_feature (1)..(390): Homolog of NCBI NO: 15228048 NR Description: s-adenosylmethionine synthetase -related
METFLFTSESVNEGHPDKLCDQISDAILDACLEQDPESKVACETCTKTNMVMVFGEITTAAKVDYEKIVRSTCREIGFISADVGLDADKCNVLVNIEQQSPDIAQGVHGHLTKKPEDIGAGDQGHMFGYATDETPELMPLTHVLATKLGAKLTEVRKNKTCPWLRPDGKTQVTVEYKNDGGAMIPIRVHTVLISTQHDETVTNDEIAADLKEHVIKPVIPAKYLDDNTIFHLNPSGRFVIGGPHGDAGLTGRKIIIDTYGGWGAHGGGAFSGKDPTKVDRSGAYIVRQAAKSVVAAGLARRCIVQVSYAIGVPEPLSVFVDTYKTGTIPDKDILVLIKEAFDFRPGMMAINLDLKRGGNFRFQKTAAYGHFGRDDPDFTWEVVKPLKPKA

SEQ ID NO: 29212 - protein, 341 aa, Arabidopsis thaliana
  peptide (1)..(341): Ceres Seq. ID no. 13575420
  misc_feature (67)..(189): Pfam Name: S-adenosylmethionine synthetase, central domain Pfam Description: S-adenosylmethionine synthetase, central domain
  misc_feature (1)..(338): Homolog of NCBI NO: 3024127 NR Description: S-adenosylmethionine synthetase 2 (Methionine
  misc_feature (1)..(341): Homolog of NCBI NO: 1708995 NR Description: S-adenosylmethionine synthetase 1 (Methionine
  misc_feature (1)..(341): Homolog of NCBI NO: 3024148 NR Description: S-adenosylmethionine synthetase 3 (Methionine
  misc_feature (1)..(341): Homolog of NCBI NO: 1709004 NR Description: S-adenosylmethionine synthetase 2 (Methionine
  misc_feature (1)..(341): Homolog of NCBI NO: 5923879 NR Description: S-adenosyl-L-methionine synthetase [Petunia x
  misc_feature (1)..(341): Homolog of NCBI NO: 1346523 NR Description: S-adenosylmethionine synthetase (Methionine
  misc_feature (1)..(341): Homolog of NCBI NO: 7230379 NR Description: S-adenosyl-L-methionine synthetase [Nicotiana
  misc_feature (1)..(341): Homolog of NCBI NO: 1170939 NR Description: S-adenosylmethionine synthetase 3 (Methionine
  misc_feature (1)..(341): Homolog of NCBI NO: 14600070 NR Description: S-adenosylmethionine synthetase [Brassica juncea]
  misc_feature (1)..(341): Homolog of NCBI NO: 15228048 NR Description: s-adenosylmethionine synthetase -related
MVMVFGEITTAAKVDYEKIVRSTCREIGFISADVGLDADKCNVLVNIEQQSPDIAQGVHGHLTKKPEDIGAGDQGHMFGYATDETPELMPLTHVLATKLGAKLTEVRKNKTCPWLRPDGKTQVTVEYKNDGGAMIPIRVHTVLISTQHDETVTNDEIAADLKEHVIKPVIPAKYLDDNTIFHLNPSGRFVIGGPHGDAGLTGRKIIIDTYGGWGAHGGGAFSGKDPTKVDRSGAYIVRQAAKSVVAAGLARRCIVQVSYAIGVPEPLSVFVDTYKTGTIPDKDILVLIKEAFDFRPGMMAINLDLKRGGNFRFQKTAAYGHFGRDDPDFTWEVVKPLKPKA

SEQ ID NO: 29213 - DNA, 1192 bp, Arabidopsis thaliana
  misc_feature (1)..(1192): Ceres Seq. ID no. 12324345
  misc_feature: MA Experiment ID: 108461 Result: Up-regulated in Transcription
  misc_feature: MA Experiment 108461 PARAMETER Experiment Name: At_Germinating_Seeds_cDNA_P Parameter: Age (day) Value: 1 vs. 0
  misc_feature: MA Experiment 108461 PARAMETER Experiment Name: At_Germinating_Seeds_cDNA_P Parameter: Tissue Value: Germinating Seeds
  misc_feature: MA Experiment ID: 108462 Result: Up-regulated in Transcription
  misc_feature: MA Experiment 108462 PARAMETER Experiment Name: At_Germinating_Seeds_cDNA_P Parameter: Age (day) Value: 2 vs. 0
  misc_feature: MA Experiment 108462 PARAMETER Experiment Name: At_Germinating_Seeds_cDNA_P Parameter: Tissue Value: Germinating Seeds
  misc_feature: MA Experiment ID: 108463 Result: Up-regulated in Transcription
  misc_feature: MA Experiment 108463 PARAMETER Experiment Name: At_Germinating_Seeds_cDNA_P Parameter: Age (day) Value: 3 vs. 0
  misc_feature: MA Experiment 108463 PARAMETER Experiment Name: At_Germinating_Seeds_cDNA_P Parameter: Tissue Value: Germinating Seeds
  misc_feature: MA Experiment ID: 108464 Result: Up-regulated in Transcription
  misc_feature: MA Experiment 108464 PARAMETER Experiment Name: At_Germinating_Seeds_cDNA_P Parameter: Age (day) Value: 4 vs. 0
  misc_feature: MA Experiment 108464 PARAMETER Experiment Name: At_Germinating_Seeds_cDNA_P Parameter: Tissue Value: Germinating Seeds
  misc_feature: MA Experiment ID: 108569 Result: Up-regulated in Transcription
  misc_feature: MA Experiment 108569 PARAMETER Experiment Name: At_0.001%_MeJA__cDNA_P Parameter: Timepoint (hr) Value: 6
  misc_feature: MA Experiment 108569 PARAMETER Experiment Name: At_0.001%_MeJA__cDNA_P Parameter: Tissue Value: Aerial
  misc_feature: MA Experiment 108569 PARAMETER Experiment Name: At_0.001%_MeJA__cDNA_P Parameter: Treatment Value: 0.001% MeJA vs. No Treatment
  misc_feature: MA Experiment ID: 108594 Result: Down-regulated in Transcription
  misc_feature: MA Experiment 108594 PARAMETER Experiment Name: At_Ler-rhl_Root_cDNA_P Parameter: Plant Line Value: null
  misc_feature: MA Experiment ID: 108595 Result: Down-regulated in Transcription
  misc_feature: MA Experiment 108595 PARAMETER Experiment Name: At_Ler-pi_Ovule_cDNA_P Parameter: Plant Line Value: null
  misc_feature: MA Experiment ID: 108668 Result: Up-regulated in Transcription
  misc_feature: MA Experiment 108668 PARAMETER Experiment Name: At_2mM_SA_cDNA_P Parameter: Plant Line Value: WS
  misc_feature: MA Experiment 108668 PARAMETER Experiment Name: At_2mM_SA_cDNA_P Parameter: Timepoint (hr) Value: 6
  misc_feature: MA Experiment 108668 PARAMETER Experiment Name: At_2mM_SA_cDNA_P Parameter: Treatment Value: 2mM SA vs. No Treatment
  misc_feature: MA Experiment ID: 20000069 Result: Down-regulated in Transcription
  misc_feature: MA Experiment 20000069 PARAMETER Experiment Name: At_100uM_ABA_Mutants_cDNA_P Parameter: Plant Line Value: CS23
  misc_feature: MA Experiment 20000069 PARAMETER Experiment Name: At_100uM_ABA_Mutants_cDNA_P Parameter: Timepoint (hr) Value: 6
  misc_feature: MA Experiment 20000069 PARAMETER Experiment Name: At_100uM_ABA_Mutants_cDNA_P Parameter: Tissue Value: Aerial
  misc_feature: MA Experiment 20000069 PARAMETER Experiment Name: At_100uM_ABA_Mutants_cDNA_P Parameter: Treatment Value: 100uM ABA vs. No Treatment
  misc_feature: MA Experiment ID: 20000087 Result: Down-regulated in Transcription
  misc_feature: MA Experiment 20000087 PARAMETER Experiment Name: At_100uM_ABA_Mutants_cDNA_P Parameter: Plant Line Value: WS
  misc_feature: MA Experiment 20000087 PARAMETER Experiment Name: At_100uM_ABA_Mutants_cDNA_P Parameter: Timepoint (hr) Value: 6
  misc_feature: MA Experiment 20000087 PARAMETER Experiment Name: At_100uM_ABA_Mutants_cDNA_P Parameter: Tissue Value: Aerial
  misc_feature: MA Experiment 20000087 PARAMETER Experiment Name: At_100uM_ABA_Mutants_cDNA_P Parameter: Treatment Value: 100uM ABA vs. No Treatment
  misc_feature: MA Experiment ID: 20000180 Result: Up-regulated in Transcription
  misc_feature: MA Experiment 20000180 PARAMETER Experiment Name: At_Germinating_Seeds_P Parameter: Age (hr) Value: 24 vs. 0
  misc_feature: MA Experiment 20000180 PARAMETER Experiment Name: At_Germinating_Seeds_P Parameter: Tissue Value: Germinating Seeds
  misc_feature: MA Experiment ID: 20000182 Result: Up-regulated in Transcription
  misc_feature: MA Experiment 20000182 PARAMETER Experiment Name: At_2mM_SA_P Parameter: Age (day) Value: 14
  misc_feature: MA Experiment 20000182 PARAMETER Experiment Name: At_2mM_SA_P Parameter: Organism Value: A. thaliana
  misc_feature: MA Experiment 20000182 PARAMETER Experiment Name: At_2mM_SA_P Parameter: Plant Line Value: WS
  misc_feature: MA Experiment 20000182 PARAMETER Experiment Name: At_2mM_SA_P Parameter: Timepoint (hr) Value: 6
  misc_feature: MA Experiment 20000182 PARAMETER Experiment Name: At_2mM_SA_P Parameter: Tissue Value: Aerial
  misc_feature: MA Experiment 20000182 PARAMETER Experiment Name: At_2mM_SA_P Parameter: Treatment Value: 2mM SA vs. No Treatment
  misc_feature: MA Experiment ID: 20001248 Result: Down-regulated in Transcription
  misc_feature: MA Experiment 20001248 PARAMETER Experiment Name: At_Far-red-induction_P Parameter: Age (day) Value: 7
  misc_feature: MA Experiment 20001248 PARAMETER Experiment Name: At_Far-red-induction_P Parameter: Light Value: Far-red vs. White
  misc_feature: MA Experiment 20001248 PARAMETER Experiment Name: At_Far-red-induction_P Parameter: Organism Value: A. thaliana
  misc_feature: MA Experiment 20001248 PARAMETER Experiment Name: At_Far-red-induction_P Parameter: Plant Line Value: Columbia
  misc_feature: MA Experiment 20001248 PARAMETER Experiment Name: At_Far-red-induction_P Parameter: Timepoint (hr) Value: 4
  misc_feature: MA Experiment 20001248 PARAMETER Experiment Name: At_Far-red-induction_P Parameter: Tissue Value: Whole Plant
  misc_feature: MA Experiment ID: 20001905 Result: Up-regulated in Transcription
  misc_feature: MA Experiment 20001905 PARAMETER Experiment Name: At_Drought_Reproduction_P Parameter: Age (day) Value: 40
  misc_feature: MA Experiment 20001905 PARAMETER Experiment Name: At_Drought_Reproduction_P Parameter: Organism Value: A. thaliana
  misc_feature: MA Experiment 20001905 PARAMETER Experiment Name: At_Drought_Reproduction_P Parameter: Plant Line Value: WS
  misc_feature: MA Experiment 20001905 PARAMETER Experiment Name: At_Drought_Reproduction_P Parameter: Timepoint (day) Value: 10
  misc_feature: MA Experiment 20001905 PARAMETER Experiment Name: At_Drought_Reproduction_P Parameter: Tissue Value: Rosettes
  misc_feature: MA Experiment 20001905 PARAMETER Experiment Name: At_Drought_Reproduction_P Parameter: Treatment Value: Drought vs. No Drought
agaaaggataacgaatcgtttctcttcgatcgaaagaatatatatttggaagttttctctgcttttttgttttcgtttgatagaatgggaacagttctcgattcgcattttctggctctcactgctattgtcactgtggtttaccagttcatattcttcgtaatcacggctcttttcaaatttgatcaagtcactgactttgctggtagcacaaacttcgttatacttgctgtgttaacacttgttctcaaagcctcttggcattttcgacagatagtattgactttgctagttgtggtatggggtcttcgcttggggattttccttctaatgaggatcttgcaatggggggaagatcgtcgctttgatgaacagcgtggaaatatagtgagactaatcattttctggactcttcaggctgtgtgggtttggacggttagcttacctttaacacttgttaatgcaagtgatggtgggtggatctcttaaacccgcagatgttatcggttggactatgtgggttttcggtttcttgattgaagctgcagctgatcaacagaagctatcattcaaaaactctcctgaaaacagaggaaaatggtgtgatgttggagtctggaagtattcaagacatccaaactacttcggtgagatgttactgtggtggagaatctttgtggctgcatcgcctgtgcttgaaggtgcagagtatcttgtcatattcggaccactctttctcactttgctacttctattcgtcagcggcataccattactcgaggcatcggctgacaaaaaacatggaaactcaggagcttacagatcctacaagaagacaacaagtcctctgattctgttcccaagaggagtgtatgggaacttaccaggatggttcaagacggtctttctcttcgagtttccattttacagccgaaatctccctcaagaggtggctgtttagtaactgcttattctgtttcagtttcatcttttatatcttactttagtgtttgatgagtttggcttctctttgttgtatgtgtgcaagaaagttagggtagactccaaaacagcaaagagaaagaagtaaaagatgactgatttgtgatactcatatttgagttattgttcttcacaacactctttgataaaatttgtgtaaaaaattgcccgtaagaaactgaatttgttt

SEQ ID NO: 29214 - protein, 166 aa, Arabidopsis thaliana
  peptide (1)..(166): Ceres Seq. ID no. 12324346
  misc_feature (6)..(107): Homolog of NCBI NO: 25406281 NR Description: unknown protein F25P22.7 [imported] - Arabidopsis
  misc_feature (8)..(162): Homolog of NCBI NO: 13937298 NR Description: unknown protein [Oryza sativa]
  misc_feature (128)..(163): Homolog of NCBI NO: 9719732 NR Description: T10F20.18 [Arabidopsis thaliana]
  misc_feature (6)..(127): Homolog of NCBI NO: 9719732 NR Description: T10F20.18 [Arabidopsis thaliana]
  misc_feature (128)..(163): Homolog of NCBI NO: 25402844 NR Description: protein T10O22.15 [imported] - Arabidopsis
  misc_feature (6)..(127): Homolog of NCBI NO: 25402844 NR Description: protein T10O22.15 [imported] - Arabidopsis
  misc_feature (6)..(163): Homolog of NCBI NO: 15221003 NR Description: hypothetical protein; protein id: At1g18180.1
  misc_feature (6)..(164): Homolog of NCBI NO: 30698953 NR Description: expressed protein [Arabidopsis thaliana]
  misc_feature (6)..(166): Homolog of NCBI NO: 18410409 NR Description: expressed protein
  misc_feature (6)..(166): Homolog of NCBI NO: 21537359 NR Description: unknown [Arabidopsis thaliana]
MQVMVGGSLKPADVIGWTMWVFGFLIEAAADQQKLSFKNSPENRGKWCDVGVWKYSRHPNYFGEMLLWWRIFVAASPVLEGAEYLVIFGPLFLTLLLLFVSGIPLLEASADKKHGNSGAYRSYKKTTSPLILFPRGVYGNLPGWFKTVFLFEFPFYSRNLPQEVAV

SEQ ID NO: 29215 - protein, 163 aa, Arabidopsis thaliana
  peptide (1)..(163): Ceres Seq. ID no. 12324347
  misc_feature (3)..(104): Homolog of NCBI NO: 25406281 NR Description: unknown protein F25P22.7 [imported] - Arabidopsis
  misc_feature (5)..(159): Homolog of NCBI NO: 13937298 NR Description: unknown protein [Oryza sativa]
  misc_feature (125)..(160): Homolog of NCBI NO: 9719732 NR Description: T10F20.18 [Arabidopsis thaliana]
  misc_feature (3)..(124): Homolog of NCBI NO: 9719732 NR Description: T10F20.18 [Arabidopsis thaliana]
  misc_feature (125)..(160): Homolog of NCBI NO: 25402844 NR Description: protein T10O22.15 [imported] - Arabidopsis
  misc_feature (3)..(124): Homolog of NCBI NO: 25402844 NR Description: protein T10O22.15 [imported] - Arabidopsis
  misc_feature (3)..(160): Homolog of NCBI NO: 15221003 NR Description: hypothetical protein; protein id: At1g18180.1
  misc_feature (3)..(161): Homolog of NCBI NO: 30698953 NR Description: expressed protein [Arabidopsis thaliana]
  misc_feature (3)..(163): Homolog of NCBI NO: 18410409 NR Description: expressed protein
  misc_feature (3)..(163): Homolog of NCBI NO: 21537359 NR Description: unknown [Arabidopsis thaliana]
MVGGSLKPADVIGWTMWVFGFLIEAAADQQKLSFKNSPENRGKWCDVGVWKYSRHPNYFGEMLLWWRIFVAASPVLEGAEYLVIFGPLFLTLLLLFVSGIPLLEASADKKHGNSGAYRSYKKTTSPLILFPRGVYGNLPGWFKTVFLFEFPFYSRNLPQEVAV

SEQ ID NO: 29216 - protein, 162 aa, Arabidopsis thaliana
  peptide (1)..(162): Ceres Seq. ID no. 12324348
  misc_feature (32)..(155): Homolog of NCBI NO: 21355723 NR Description: CG6282-PA [Drosophila melanogaster]
  misc_feature (40)..(159): Homolog of NCBI NO: 25406281 NR Description: unknown protein F25P22.7 [imported] - Arabidopsis
  misc_feature (29)..(157): Homolog of NCBI NO: 13937298 NR Description: unknown protein [Oryza sativa]
  misc_feature (110)..(159): Homolog of NCBI NO: 9719732 NR Description: T10F20.18 [Arabidopsis thaliana]
  misc_feature (29)..(92): Homolog of NCBI NO: 9719732 NR Description: T10F20.18 [Arabidopsis thaliana]
  misc_feature (29)..(159): Homolog of NCBI NO: 25402844 NR Description: protein T10O22.15 [imported] - Arabidopsis
  misc_feature (29)..(159): Homolog of NCBI NO: 15221003 NR Description: hypothetical protein; protein id: At1g18180.1
  misc_feature (29)..(159): Homolog of NCBI NO: 30698953 NR Description: expressed protein [Arabidopsis thaliana]
  misc_feature (29)..(159): Homolog of NCBI NO: 18410409 NR Description: expressed protein
  misc_feature (29)..(159): Homolog of NCBI NO: 21537359 NR Description: unknown [Arabidopsis thaliana]
RKDNESFLFDRKNIYLEVFSAFLFSFDRMGTVLDSHFLALTAIVTVVYQFIFFVITALFKFDQVTDFAGSTNFVILAVLTLVLKASWHFRQIVLTLLVVVWGLRLGIFLLMRILQWGEDRRFDEQRGNIVRLIIFWTLQAVWVWTVSLPLTLVNASDGGWIS

SEQ ID NO: 29217 - DNA, 1360 bp, Arabidopsis thaliana
  misc_feature (1)..(1360): Ceres Seq. ID no. 12339401
  misc_feature: MA Experiment ID: 108434 Result: Down-regulated in Transcription
  misc_feature: MA Experiment 108434 PARAMETER Experiment Name: At_Root_Tips_cDNA_P Parameter: Tissue Value: Root Tips
  misc_feature: MA Experiment ID: 108462 Result: Up-regulated in Transcription
  misc_feature: MA Experiment 108462 PARAMETER Experiment Name: At_Germinating_Seeds_cDNA_P Parameter: Age (day) Value: 2 vs. 0
  misc_feature: MA Experiment 108462 PARAMETER Experiment Name: At_Germinating_Seeds_cDNA_P Parameter: Tissue Value: Germinating Seeds
  misc_feature: MA Experiment ID: 108463 Result: Up-regulated in Transcription
  misc_feature: MA Experiment 108463 PARAMETER Experiment Name: At_Germinating_Seeds_cDNA_P Parameter: Age (day) Value: 3 vs. 0
  misc_feature: MA Experiment 108463 PARAMETER Experiment Name: At_Germinating_Seeds_cDNA_P Parameter: Tissue Value: Germinating Seeds
  misc_feature: MA Experiment ID: 108464 Result: Up-regulated in Transcription
  misc_feature: MA Experiment 108464 PARAMETER Experiment Name: At_Germinating_Seeds_cDNA_P Parameter: Age (day) Value: 4 vs. 0
  misc_feature: MA Experiment 108464 PARAMETER Experiment Name: At_Germinating_Seeds_cDNA_P Parameter: Tissue Value: Germinating Seeds
  misc_feature: MA Experiment ID: 108488 Result: Down-regulated in Transcription
  misc_feature: MA Experiment ID: 108573 Result: Up-regulated in Transcription
  misc_feature: MA Experiment 108573 PARAMETER Experiment Name: At_Drought_cDNA_P Parameter: Timepoint (hr) Value: 6
  misc_feature: MA Experiment 108573 PARAMETER Experiment Name: At_Drought_cDNA_P Parameter: Tissue Value: Aerial
  misc_feature: MA Experiment 108573 PARAMETER Experiment Name: At_Drought_cDNA_P Parameter: Treatment Value: Drought vs. No Drought
  misc_feature: MA Experiment ID: 108574 Result: Down-regulated in Transcription
  misc_feature: MA Experiment 108574 PARAMETER Experiment Name: At_Wounding__cDNA_P Parameter: Timepoint (hr) Value: 1
  misc_feature: MA Experiment 108574 PARAMETER Experiment Name: At_Wounding__cDNA_P Parameter: Tissue Value: Aerial
  misc_feature: MA Experiment 108574 PARAMETER Experiment Name: At_Wounding__cDNA_P Parameter: Treatment Value: Wounding vs. No Wounding
  misc_feature: MA Experiment ID: 108577 Result: Down-regulated in Transcription
  misc_feature: MA Experiment 108577 PARAMETER Experiment Name: At_42deg_Heat_cDNA_P Parameter: Temperature (deg C) Value: 42 vs. 22
  misc_feature: MA Experiment 108577 PARAMETER Experiment Name: At_42deg_Heat_cDNA_P Parameter: Timepoint (hr) Value: 6
  misc_feature: MA Experiment 108577 PARAMETER Experiment Name: At_42deg_Heat_cDNA_P Parameter: Tissue Value: Aerial
  misc_feature: MA Experiment ID: 108579 Result: Down-regulated in Transcription
  misc_feature: MA Experiment 108579 PARAMETER Experiment Name: At_4deg_Cold_cDNA_P Parameter: Temperature (deg C) Value: 4 vs. 22
  misc_feature: MA Experiment 108579 PARAMETER Experiment Name: At_4deg_Cold_cDNA_P Parameter: Timepoint (hr) Value: 6
  misc_feature: MA Experiment 108579 PARAMETER Experiment Name: At_4deg_Cold_cDNA_P Parameter: Tissue Value: Aerial
  misc_feature: MA Experiment ID: 108595 Result: Down-regulated in Transcription
  misc_feature: MA Experiment 108595 PARAMETER Experiment Name: At_Ler-pi_Ovule_cDNA_P Parameter: Plant Line Value: null
  misc_feature: MA Experiment ID: 20000030 Result: Up-regulated in Transcription
  misc_feature: MA Experiment 20000030 PARAMETER Experiment Name: At_CS6630_Roots_cDNA_P Parameter: Plant Line Value: CS6630 vs. WS
  misc_feature: MA Experiment 20000030 PARAMETER Experiment Name: At_CS6630_Roots_cDNA_P Parameter: Tissue Value: Roots
  misc_feature: MA Experiment ID: 20000068 Result: Up-regulated in Transcription
  misc_feature: MA Experiment ID: 20000069 Result: Up-regulated in Transcription
  misc_feature: MA Experiment 20000069 PARAMETER Experiment Name: At_100uM_ABA_Mutants_cDNA_P Parameter: Plant Line Value: CS23
  misc_feature: MA Experiment 20000069 PARAMETER Experiment Name: At_100uM_ABA_Mutants_cDNA_P Parameter: Timepoint (hr) Value: 6
  misc_feature: MA Experiment 20000069 PARAMETER Experiment Name: At_100uM_ABA_Mutants_cDNA_P Parameter: Tissue Value: Aerial
  misc_feature: MA Experiment 20000069 PARAMETER Experiment Name: At_100uM_ABA_Mutants_cDNA_P Parameter: Treatment Value: 100uM ABA vs. No Treatment
  misc_feature: MA Experiment ID: 20000070 Result: Up-regulated in Transcription
  misc_feature: MA Experiment 20000070 PARAMETER Experiment Name: At_100uM_ABA_Mutants_cDNA_P Parameter: Plant Line Value: CS24
  misc_feature: MA Experiment 20000070 PARAMETER Experiment Name: At_100uM_ABA_Mutants_cDNA_P Parameter: Timepoint (hr) Value: 6
  misc_feature: MA Experiment 20000070 PARAMETER Experiment Name: At_100uM_ABA_Mutants_cDNA_P Parameter: Tissue Value: Aerial
  misc_feature: MA Experiment 20000070 PARAMETER Experiment Name: At_100uM_ABA_Mutants_cDNA_P Parameter: Treatment Value: 100uM ABA vs. No Treatment
  misc_feature: MA Experiment ID: 20000071 Result: Up-regulated in Transcription
  misc_feature: MA Experiment 20000071 PARAMETER Experiment Name: At_100uM_ABA_Mutants_cDNA_P Parameter: Plant Line Value: CS8104
  misc_feature: MA Experiment 20000071 PARAMETER Experiment Name: At_100uM_ABA_Mutants_cDNA_P Parameter: Timepoint (hr) Value: 6
  misc_feature: MA Experiment 20000071 PARAMETER Experiment Name: At_100uM_ABA_Mutants_cDNA_P Parameter: Tissue Value: Aerial
  misc_feature: MA Experiment 20000071 PARAMETER Experiment Name: At_100uM_ABA_Mutants_cDNA_P Parameter: Treatment Value: 100uM ABA vs. No Treatment
  misc_feature: MA Experiment ID: 20000072 Result: Up-regulated in Transcription
  misc_feature: MA Experiment 20000072 PARAMETER Experiment Name: At_100uM_ABA_Mutants_cDNA_P Parameter: Plant Line Value: CS8105
  misc_feature: MA Experiment 20000072 PARAMETER Experiment Name: At_100uM_ABA_Mutants_cDNA_P Parameter: Timepoint (hr) Value: 6
  misc_feature: MA Experiment 20000072 PARAMETER Experiment Name: At_100uM_ABA_Mutants_cDNA_P Parameter: Tissue Value: Aerial
  misc_feature: MA Experiment 20000072 PARAMETER Experiment Name: At_100uM_ABA_Mutants_cDNA_P Parameter: Treatment Value: 100uM ABA vs. No Treatment
  misc_feature: MA Experiment ID: 20000086 Result: Up-regulated in Transcription
  misc_feature: MA Experiment 20000086 PARAMETER Experiment Name: At_100uM_ABA_Mutants_cDNA_P Parameter: Plant Line Value: CS22
  misc_feature: MA Experiment 20000086 PARAMETER Experiment Name: At_100uM_ABA_Mutants_cDNA_P Parameter: Timepoint (hr) Value: 6
  misc_feature: MA Experiment 20000086 PARAMETER Experiment Name: At_100uM_ABA_Mutants_cDNA_P Parameter: Tissue Value: Aerial
  misc_feature: MA Experiment 20000086 PARAMETER Experiment Name: At_100uM_ABA_Mutants_cDNA_P Parameter: Treatment Value: 100uM ABA vs. No Treatment
  misc_feature: MA Experiment ID: 20000088 Result: Up-regulated in Transcription
  misc_feature: MA Experiment 20000088 PARAMETER Experiment Name: At_100uM_ABA_Mutants_cDNA_P Parameter: Plant Line Value: Landsberg
  misc_feature: MA Experiment 20000088 PARAMETER Experiment Name: At_100uM_ABA_Mutants_cDNA_P Parameter: Timepoint (hr) Value: 6
  misc_feature: MA Experiment 20000088 PARAMETER Experiment Name: At_100uM_ABA_Mutants_cDNA_P Parameter: Tissue Value: Aerial
  misc_feature: MA Experiment 20000088 PARAMETER Experiment Name: At_100uM_ABA_Mutants_cDNA_P Parameter: Treatment Value: 100uM ABA vs. No Treatment
  misc_feature: MA Experiment ID: 20000089 Result: Up-regulated in Transcription
  misc_feature: MA Experiment ID: 20000090 Result: Up-regulated in Transcription
  misc_feature: MA Experiment ID: 20000111 Result: Down-regulated in Transcription
  misc_feature: MA Experiment 20000111 PARAMETER Experiment Name: At_42deg_Heat_cDNA_P Parameter: Temperature (deg C) Value: 42 vs. 22
  misc_feature: MA Experiment 20000111 PARAMETER Experiment Name: At_42deg_Heat_cDNA_P Parameter: Timepoint (hr) Value: 6
  misc_feature: MA Experiment 20000111 PARAMETER Experiment Name: At_42deg_Heat_cDNA_P Parameter: Tissue Value: Aerial
  misc_feature: MA Experiment ID: 20000113 Result: Down-regulated in Transcription
  misc_feature: MA Experiment 20000113 PARAMETER Experiment Name: At_42deg_Heat_cDNA_P Parameter: Temperature (deg C) Value: 42 vs. 22
  misc_feature: MA Experiment 20000113 PARAMETER Experiment Name: At_42deg_Heat_cDNA_P Parameter: Timepoint (hr) Value: 8
  misc_feature: MA Experiment 20000113 PARAMETER Experiment Name: At_42deg_Heat_cDNA_P Parameter: Tissue Value: Aerial
  misc_feature: MA Experiment ID: 20000117 Result: Up-regulated in Transcription
  misc_feature: MA Experiment 20000117 PARAMETER Experiment Name: At_100uM_ABA_Mutants_cDNA_P Parameter: Plant Line Value: Columbia
  misc_feature: MA Experiment 20000117 PARAMETER Experiment Name: At_100uM_ABA_Mutants_cDNA_P Parameter: Timepoint (hr) Value: 6
  misc_feature: MA Experiment 20000117 PARAMETER Experiment Name: At_100uM_ABA_Mutants_cDNA_P Parameter: Tissue Value: Aerial
  misc_feature: MA Experiment 20000117 PARAMETER Experiment Name: At_100uM_ABA_Mutants_cDNA_P Parameter: Treatment Value: 100uM ABA vs. No Treatment
  misc_feature: MA Experiment ID: 20000184 Result: Down-regulated in Transcription
  misc_feature: MA Experiment 20000184 PARAMETER Experiment Name: At_Shoots__P Parameter: Age (day) Value: 7
  misc_feature: MA Experiment 20000184 PARAMETER Experiment Name: At_Shoots__P Parameter: Tissue Value: Shoots vs. Whole Plant
  misc_feature: MA Experiment ID: 20000185 Result: Down-regulated in Transcription
  misc_feature: MA Experiment 20000185 PARAMETER Experiment Name: At_Roots__P Parameter: Age (day) Value: 7 vs. 21
  misc_feature: MA Experiment 20000185 PARAMETER Experiment Name: At_Roots__P Parameter: Organism Value: A. thaliana
  misc_feature: MA Experiment 20000185 PARAMETER Experiment Name: At_Roots__P Parameter: Tissue Value: Roots vs. Whole Plant
  misc_feature: MA Experiment ID: 20000235 Result: Down-regulated in Transcription
  misc_feature: MA Experiment 20000235 PARAMETER Experiment Name: At_Siliques_P Parameter: Age (day) Value: 21
  misc_feature: MA Experiment 20000235 PARAMETER Experiment Name: At_Siliques_P Parameter: Organism Value: A. thaliana
  misc_feature: MA Experiment 20000235 PARAMETER Experiment Name: At_Siliques_P Parameter: Plant Line Value: WS
  misc_feature: MA Experiment 20000235 PARAMETER Experiment Name: At_Siliques_P Parameter: Tissue Value: 5-10mm Siliques vs. Whole Plant
  misc_feature: MA Experiment ID: 20000264 Result: Down-regulated in Transcription
  misc_feature: MA Experiment 20000264 PARAMETER Experiment Name: At_Open_Flower_P Parameter: Age (day) Value: 21
  misc_feature: MA Experiment 20000264 PARAMETER Experiment Name: At_Open_Flower_P Parameter: Plant Line Value: WS
  misc_feature: MA Experiment 20000264 PARAMETER Experiment Name: At_Open_Flower_P Parameter: Tissue Value: Open Flower vs. Whole Plant
  misc_feature: MA Experiment ID: 20000265 Result: Down-regulated in Transcription
  misc_feature: MA Experiment 20000265 PARAMETER Experiment Name: At_Open_Flower_P Parameter: Age (day) Value: 21
  misc_feature: MA Experiment 20000265 PARAMETER Experiment Name: At_Open_Flower_P Parameter: Plant Line Value: WS
  misc_feature: MA Experiment 20000265 PARAMETER Experiment Name: At_Open_Flower_P Parameter: Tissue Value: Closed Flower vs. Whole Plant
  misc_feature: MA Experiment ID: 20000286 Result: Down-regulated in Transcription
  misc_feature: MA Experiment 20000286 PARAMETER Experiment Name: At_Open_Flower_P Parameter: Age (day) Value: 21
  misc_feature: MA Experiment 20000286 PARAMETER Experiment Name: At_Open_Flower_P Parameter: Plant Line Value: WS
  misc_feature: MA Experiment 20000286 PARAMETER Experiment Name: At_Open_Flower_P Parameter: Tissue Value: Half Open vs. Whole Plant
  misc_feature: MA Experiment ID: 20000439 Result: Down-regulated in Transcription
  misc_feature: MA Experiment 20000439 PARAMETER Experiment Name: At_Roots__P Parameter: Age (day) Value: 14 vs. 21
  misc_feature: MA Experiment 20000439 PARAMETER Experiment Name: At_Roots__P Parameter: Organism Value: A. thaliana
  misc_feature: MA Experiment 20000439 PARAMETER Experiment Name: At_Roots__P Parameter: Tissue Value: Roots vs. Whole Plant
  misc_feature: MA Experiment ID: 20000573 Result: Down-regulated in Transcription
  misc_feature: MA Experiment 20000573 PARAMETER Experiment Name: At_100uM_ABA_Mutants__P Parameter: Organism Value: A. thaliana
  misc_feature: MA Experiment 20000573 PARAMETER Experiment Name: At_100uM_ABA_Mutants__P Parameter: Plant Line Value: CS22 vs. Ler wt
  misc_feature: MA Experiment 20000573 PARAMETER Experiment Name: At_100uM_ABA_Mutants__P Parameter: Timepoint (hr) Value: N/A
  misc_feature: MA Experiment 20000573 PARAMETER Experiment Name: At_100uM_ABA_Mutants__P Parameter: Tissue Value: Whole Plant
  misc_feature: MA Experiment 20000573 PARAMETER Experiment Name: At_100uM_ABA_Mutants__P Parameter: Treatment Value: None
  misc_feature: MA Experiment ID: 20000574 Result: Down-regulated in Transcription
  misc_feature: MA Experiment 20000574 PARAMETER Experiment Name: At_100uM_ABA_Mutants__P Parameter: Organism Value: A. thaliana
  misc_feature: MA Experiment 20000574 PARAMETER Experiment Name: At_100uM_ABA_Mutants__P Parameter: Plant Line Value: CS23 vs. Ler wt
  misc_feature: MA Experiment 20000574 PARAMETER Experiment Name: At_100uM_ABA_Mutants__P Parameter: Timepoint (hr) Value: N/A
  misc_feature: MA Experiment 20000574 PARAMETER Experiment Name: At_100uM_ABA_Mutants__P Parameter: Tissue Value: Whole Plant
  misc_feature: MA Experiment 20000574 PARAMETER Experiment Name: At_100uM_ABA_Mutants__P Parameter: Treatment Value: None
  misc_feature: MA Experiment ID: 20001247 Result: Down-regulated in Transcription
  misc_feature: MA Experiment 20001247 PARAMETER Experiment Name: At_Far-red-induction_P Parameter: Age (day) Value: 7
  misc_feature: MA Experiment 20001247 PARAMETER Experiment Name: At_Far-red-induction_P Parameter: Light Value: Far-red vs. White
  misc_feature: MA Experiment 20001247 PARAMETER Experiment Name: At_Far-red-induction_P Parameter: Organism Value: A. thaliana
  misc_feature: MA Experiment 20001247 PARAMETER Experiment Name: At_Far-red-induction_P Parameter: Plant Line Value: Columbia
  misc_feature: MA Experiment 20001247 PARAMETER Experiment Name: At_Far-red-induction_P Parameter: Timepoint (hr) Value: 1
  misc_feature: MA Experiment 20001247 PARAMETER Experiment Name: At_Far-red-induction_P Parameter: Tissue Value: Whole Plant
  misc_feature: MA Experiment ID: 20001557 Result: Down-regulated in Transcription
  misc_feature: MA Experiment 20001557 PARAMETER Experiment Name: At_Drought_Soil_Dry_P Parameter: Age (day) Value: 27
  misc_feature: MA Experiment 20001557 PARAMETER Experiment Name: At_Drought_Soil_Dry_P Parameter: Organism Value: A. thaliana
  misc_feature: MA Experiment 20001557 PARAMETER Experiment Name: At_Drought_Soil_Dry_P Parameter: Plant Line Value: WS
  misc_feature: MA Experiment 20001557 PARAMETER Experiment Name: At_Drought_Soil_Dry_P Parameter: Post Timepoint (hr) Value: 3
  misc_feature: MA Experiment 20001557 PARAMETER Experiment Name: At_Drought_Soil_Dry_P Parameter: Post-Treatment Value: Re-Water vs. No Drought
  misc_feature: MA Experiment 20001557 PARAMETER Experiment Name: At_Drought_Soil_Dry_P Parameter: Timepoint (day) Value: 13
  misc_feature: MA Experiment 20001557 PARAMETER Experiment Name: At_Drought_Soil_Dry_P Parameter: Treatment Value: Drought vs. No Drought
  misc_feature: MA Experiment ID: 20001558 Result: Down-regulated in Transcription
  misc_feature: MA Experiment 20001558 PARAMETER Experiment Name: At_Drought_Soil_Dry_P Parameter: Age (day) Value: 27
  misc_feature: MA Experiment 20001558 PARAMETER Experiment Name: At_Drought_Soil_Dry_P Parameter: Organism Value: A. thaliana
  misc_feature: MA Experiment 20001558 PARAMETER Experiment Name: At_Drought_Soil_Dry_P Parameter: Plant Line Value: WS
  misc_feature: MA Experiment 20001558 PARAMETER Experiment Name: At_Drought_Soil_Dry_P Parameter: Post Timepoint (hr) Value: 6
  misc_feature: MA Experiment 20001558 PARAMETER Experiment Name: At_Drought_Soil_Dry_P Parameter: Post-Treatment Value: Re-Water vs. No Drought
  misc_feature: MA Experiment 20001558 PARAMETER Experiment Name: At_Drought_Soil_Dry_P Parameter: Timepoint (day) Value: 13
  misc_feature: MA Experiment 20001558 PARAMETER Experiment Name: At_Drought_Soil_Dry_P Parameter: Treatment Value: Drought vs. No Drought
  misc_feature: MA Experiment ID: 20001560 Result: Down-regulated in Transcription
  misc_feature: MA Experiment 20001560 PARAMETER Experiment Name: At_Drought_Soil_Dry_P Parameter: Age (day) Value: 28
  misc_feature: MA Experiment 20001560 PARAMETER Experiment Name: At_Drought_Soil_Dry_P Parameter: Organism Value: A. thaliana
  misc_feature: MA Experiment 20001560 PARAMETER Experiment Name: At_Drought_Soil_Dry_P Parameter: Plant Line Value: WS
  misc_feature: MA Experiment 20001560 PARAMETER Experiment Name: At_Drought_Soil_Dry_P Parameter: Post Timepoint (hr) Value: None
  misc_feature: MA Experiment 20001560 PARAMETER Experiment Name: At_Drought_Soil_Dry_P Parameter: Post-Treatment Value: None
  misc_feature: MA Experiment 20001560 PARAMETER Experiment Name: At_Drought_Soil_Dry_P Parameter: Timepoint (day) Value: 14
  misc_feature: MA Experiment 20001560 PARAMETER Experiment Name: At_Drought_Soil_Dry_P Parameter: Treatment Value: Drought vs. No Drought
acgcttctgtctttacttcctctctcaacgtacgtagacagaaaaaagcaaaacatcatgacagaaaaatctgcagaactcgttcgtttgaacgaactcaaggcttttgtatcgacaaaagcaggtgtgaaaggactggtagataccaaaataaccgaagttcctcgaatcttccatatcccttcttcttcaactttatctaacaacaaaccttctgatatctctggcttaaacctcactgtcccaatcattgacctcggagatggtaacacatctgctgcaagaaacgtcctcgtttccaagattaaagaagcagctgagaattggggatttttccaagtaatcaatcatggtattcctttaactgttcttgaagatatcaaacaaggtgttcgaagatttcatgaggaagatccagaggtcaagaaacagtattttgctacagatttcaatacaagatttgcttacaacaccaacttcgatattcattattcttctcctatgaattggaaagactctttcacttgctacacttgtcctcaagatcctctaaagccagaggaaatcccactagcttgcagggatgttgtgattgaatactcgaagcatgtaatggaattaggaggtttactcttccaacttctctcagaagctttaggtttagactctgagattcttaagaacatggattgtctcaagggtttgcttatgctctgccattattatccaccttgtccacaacctgacctaactttgggcataagtaaacacaccgacaattccttcataacaattcttcttcaagatcaaatcggtggtcttcaagttcttcatcaagattcttgggtagatgtaactcctgttcctggagctcttgtcatcagtatcggtgatttcatgcaggcaagctcgattgatgcttccttttaactcaaaacagagtctttctttatcaatacacttgagtcattttgttttgcagctgatcgcaaacgataagttcttaagtatggagcatagggtacgggcaaacagagatggaccgcggatttcagttgcttgcttcgttagctcgggagtgtttccaaattccactgtttatggaccgataaaagagcttctttctgatgaaaaccctgcaaagtacagagacatcactataccagaatacactgtaggatacctagcaagcatcttcgatggaaaatcgcatttgtctaagttccggatatgaagaaatgacttgtatggcttagttaaaaacagatatgtgtgttttgctgctctcttctcgctcgagaggacatcaactattttgttaataagaaagatttttttacagtgaagacattgaattacc

SEQ ID NO: 29218 - protein, 309 aa, Arabidopsis thaliana
  peptide (1)..(309): Ceres Seq. ID no. 12339402
  misc_feature (234)..(306): Pfam Name: 2OG-Fe(II) oxygenase superfamily Pfam Description: 2OG-Fe(II) oxygenase superfamily
  misc_feature (29)..(306): Homolog of NCBI NO: 13878119 NR Description: putative oxidoreductase [Arabidopsis thaliana]
  misc_feature (29)..(306): Homolog of NCBI NO: 15221545 NR Description: oxidoreductase, putative
  misc_feature (25)..(306): Homolog of NCBI NO: 30679748 NR Description: 2-oxoglutarate-dependent dioxygenase, putative
  misc_feature (27)..(306): Homolog of NCBI NO: 15219718 NR Description: putative 1-aminocyclopropane-1-carboxylate oxidase
  misc_feature (23)..(306): Homolog of NCBI NO: 15219715 NR Description: putative 1-aminocyclopropane-1-carboxylate oxidase
  misc_feature (19)..(306): Homolog of NCBI NO: 15238459 NR Description: 1-aminocyclopropane-1-carboxylate oxidase - like
  misc_feature (20)..(306): Homolog of NCBI NO: 15238458 NR Description: 1-aminocyclopropane-1-carboxylate oxidase - like
  misc_feature (20)..(306): Homolog of NCBI NO: 14596165 NR Description: 1-aminocyclopropane-1-carboxylate oxidase
  misc_feature (20)..(306): Homolog of NCBI NO: 15239870 NR Description: 1-aminocyclopropane-1-carboxylate oxidase
  misc_feature (20)..(306): Homolog of NCBI NO: 15239868 NR Description: 1-aminocyclopropane-1-carboxylate oxidase
TLLSLLPLSTYVDRKKQNIMTEKSAELVRLNELKAFVSTKAGVKGLVDTKITEVPRIFHIPSSSTLSNNKPSDISGLNLTVPIIDLGDGNTSAARNVLVSKIKEAAENWGFFQVINHGIPLTVLEDIKQGVRRFHEEDPEVKKQYFATDFNTRFAYNTNFDIHYSSPMNWKDSFTCYTCPQDPLKPEEIPLACRDVVIEYSKHVMELGGLLFQLLSEALGLDSEILKNMDCLKGLLMLCHYYPPCPQPDLTLGISKHTDNSFITILLQDQIGGLQVLHQDSWVDVTPVPGALVISIGDFMQASSIDASF

SEQ ID NO: 29219 - protein, 290 aa, Arabidopsis thaliana
  peptide (1)..(290): Ceres Seq. ID no. 12339403
  misc_feature (215)..(287): Pfam Name: 2OG-Fe(II) oxygenase superfamily Pfam Description: 2OG-Fe(II) oxygenase superfamily
  misc_feature (10)..(287): Homolog of NCBI NO: 13878119 NR Description: putative oxidoreductase [Arabidopsis thaliana]
  misc_feature (10)..(287): Homolog of NCBI NO: 15221545 NR Description: oxidoreductase, putative
  misc_feature (6)..(287): Homolog of NCBI NO: 30679748 NR Description: 2-oxoglutarate-dependent dioxygenase, putative
  misc_feature (8)..(287): Homolog of NCBI NO: 15219718 NR Description: putative 1-aminocyclopropane-1-carboxylate oxidase
  misc_feature (4)..(287): Homolog of NCBI NO: 15219715 NR Description: putative 1-aminocyclopropane-1-carboxylate oxidase
  misc_feature (1)..(287): Homolog of NCBI NO: 15238459 NR Description: 1-aminocyclopropane-1-carboxylate oxidase - like
  misc_feature (1)..(287): Homolog of NCBI NO: 15238458 NR Description: 1-aminocyclopropane-1-carboxylate oxidase - like
  misc_feature (1)..(287): Homolog of NCBI NO: 14596165 NR Description: 1-aminocyclopropane-1-carboxylate oxidase
  misc_feature (1)..(287): Homolog of NCBI NO: 15239870 NR Description: 1-aminocyclopropane-1-carboxylate oxidase
  misc_feature (1)..(287): Homolog of NCBI NO: 15239868 NR Description: 1-aminocyclopropane-1-carboxylate oxidase
MTEKSAELVRLNELKAFVSTKAGVKGLVDTKITEVPRIFHIPSSSTLSNNKPSDISGLNLTVPIIDLGDGNTSAARNVLVSKIKEAAENWGFFQVINHGIPLTVLEDIKQGVRRFHEEDPEVKKQYFATDFNTRFAYNTNFDIHYSSPMNWKDSFTCYTCPQDPLKPEEIPLACRDVVIEYSKHVMELGGLLFQLLSEALGLDSEILKNMDCLKGLLMLCHYYPPCPQPDLTLGISKHTDNSFITILLQDQIGGLQVLHQDSWVDVTPVPGALVISIGDFMQASSIDASF

SEQ ID NO: 29220 - DNA, 1422 bp, Arabidopsis thaliana
  misc_feature (1)..(1422): Ceres Seq. ID no. 12324257
  misc_feature: MA Experiment ID: 108435 Result: Down-regulated in Transcription
  misc_feature: MA Experiment 108435 PARAMETER Experiment Name: At_stm_Mutants_cDNA_P Parameter: Plant Line Value: wt Landsburg vs stm
  misc_feature: MA Experiment 108435 PARAMETER Experiment Name: At_stm_Mutants_cDNA_P Parameter: Tissue Value: Shoot Apical Meristem Region
  misc_feature: MA Experiment ID: 108595 Result: Down-regulated in Transcription
  misc_feature: MA Experiment 108595 PARAMETER Experiment Name: At_Ler-pi_Ovule_cDNA_P Parameter: Plant Line Value: null
  misc_feature: MA Experiment ID: 20000185 Result: Down-regulated in Transcription
  misc_feature: MA Experiment 20000185 PARAMETER Experiment Name: At_Roots__P Parameter: Age (day) Value: 7 vs. 21
  misc_feature: MA Experiment 20000185 PARAMETER Experiment Name: At_Roots__P Parameter: Organism Value: A. thaliana
  misc_feature: MA Experiment 20000185 PARAMETER Experiment Name: At_Roots__P Parameter: Tissue Value: Roots vs. Whole Plant
  misc_feature: MA Experiment ID: 20000286 Result: Down-regulated in Transcription
  misc_feature: MA Experiment 20000286 PARAMETER Experiment Name: At_Open_Flower_P Parameter: Age (day) Value: 21
  misc_feature: MA Experiment 20000286 PARAMETER Experiment Name: At_Open_Flower_P Parameter: Plant Line Value: WS
  misc_feature: MA Experiment 20000286 PARAMETER Experiment Name: At_Open_Flower_P Parameter: Tissue Value: Half Open vs. Whole Plant
  misc_feature: MA Experiment ID: 20000439 Result: Down-regulated in Transcription
  misc_feature: MA Experiment 20000439 PARAMETER Experiment Name: At_Roots__P Parameter: Age (day) Value: 14 vs. 21
  misc_feature: MA Experiment 20000439 PARAMETER Experiment Name: At_Roots__P Parameter: Organism Value: A. thaliana
  misc_feature: MA Experiment 20000439 PARAMETER Experiment Name: At_Roots__P Parameter: Tissue Value: Roots vs. Whole Plant
aaatctccgacggaggaaaagtagccaccgcttgacgaatcattcatcaacacacgcagagagctctgaatctcgaggaagaagatggtgaggatcattcctatggctgcttcctccattcgaccttccctcgcctgcttctctgattctcctcgcttccccatctccctcctctccagaaatctctctcgcactctccatgttcctcaatcacagctttttggtttaacttctcataagcttttgagaagaagtgtaaactgtttaggagttgctgaatctggtaaagcagctcaagctactacacaagatgatcttctcacctgggttaagaatgataagagaagaatgcttcatgttgtttatcgtgttggcgatatggaccggacgataaagttttatactgaatgtcttgggatgaagcttctacgtaagcgtgatataccagaagagaagtatactaatgctttccttggttatggaccggaagattcacactttgtgattgagcttacttataattatggagttgacaagtatgacattggggctggttttggtcactttggtattgcggtcgatgatgtggcgaaaactgtagagcttgtgaaagccaaagggggaaaagtaagccgggagcctggtcctgtcaaaggtggcaaaactgtaatagcattcattgaagatcctgatggttacaaatttgaactcttggaaagaggtcctacaccagaacctctttgccaagttatgctccgtgttggtgatctcgatagggccataaagttctatgagaaggcttttggaatggaacttctgcgaacaagagacaacccagagtacaagtacacaatagccatgatgggatatggtccagaagataaatttcctgtcctagagctgacatataactatggtgtcactgaatatgataaaggaaatgcttatgctcagatagcaatagggacggatgatgtgtacaaaactgcagaagctataaaactctttgggggaaaaatcacgagggagcctggtcccttaccaggtattagcacgaagatcaccgcgtgtctggatcctgatggttggaaatcggtatttgtggacaacattgactttctcaaagaactggagtgagaggagaaagcagaagagaggcaacaaatgcacgaaaatggcttatgagggagacaggaggagaggccttgttgtgaattacatcagtttggggtttgatataatctctctcagtgctgaatatttttatcaaagtgaatgatttgtttttcagaatatagtgtagttgtttaatttacagtataaaagcctatgttgcgtctttgtatattagttccacttaacattaattgccaataaataagatgataagtgaatgatattcaagaaaaaatcttatgcctg

SEQ ID NO: 29221 - protein, 350 aa, Arabidopsis thaliana
  peptide (1)..(350): Ceres Seq. ID no. 12324258
  misc_feature (77)..(350): Homolog of NCBI NO: 15221116 NR Description: glyoxalase I, putative (lactoylglutathione lyase)
  misc_feature (72)..(350): Homolog of NCBI NO: 1808684 NR Description: hypothetical protein [Sporobolus stapfianus]
  misc_feature (66)..(350): Homolog of NCBI NO: 16580747 NR Description: glyoxalase I [Oryza sativa (japonica
  misc_feature (66)..(350): Homolog of NCBI NO: 4126809 NR Description: glyoxalase I [Oryza sativa (japonica
  misc_feature (68)..(350): Homolog of NCBI NO: 2213425 NR Description: hypothetical protein [Citrus x paradisi]
  misc_feature (68)..(350): Homolog of NCBI NO: 11281993 NR Description: lactoylglutathione lyase (EC 4.4.1.5)
  misc_feature (68)..(350): Homolog of NCBI NO: 7619802 NR Description: putative glyoxalase I [Triticum aestivum]
  misc_feature (1)..(350): Homolog of NCBI NO: 25350143 NR Description: protein F1N21.10 [imported] - Arabidopsis
  misc_feature (1)..(350): Homolog of NCBI NO: 21537360 NR Description: glyoxalase I, putative [Arabidopsis thaliana]
  misc_feature (1)..(350): Homolog of NCBI NO: 15220397 NR Description: glyoxalase I, putative (lactoylglutathione lyase)
MVRIIPMAASSIRPSLACFSDSPRFPISLLSRNLSRTLHVPQSQLFGLTSHKLLRRSVNCLGVAESGKAAQATTQDDLLTWVKNDKRRMLHVVYRVGDMDRTIKFYTECLGMKLLRKRDIPEEKYTNAFLGYGPEDSHFVIELTYNYGVDKYDIGAGFGHFGIAVDDVAKTVELVKAKGGKVSREPGPVKGGKTVIAFIEDPDGYKFELLERGPTPEPLCQVMLRVGDLDRAIKFYEKAFGMELLRTRDNPEYKYTIAMMGYGPEDKFPVLELTYNYGVTEYDKGNAYAQIAIGTDDVYKTAEAIKLFGGKITREPGPLPGISTKITACLDPDGWKSVFVDNIDFLKELE

SEQ ID NO: 29222 - protein, 344 aa, Arabidopsis thaliana
  peptide (1)..(344): Ceres Seq. ID no. 12324259
  misc_feature (71)..(344): Homolog of NCBI NO: 15221116 NR Description: glyoxalase I, putative (lactoylglutathione lyase)
  misc_feature (66)..(344): Homolog of NCBI NO: 1808684 NR Description: hypothetical protein [Sporobolus stapfianus]
  misc_feature (60)..(344): Homolog of NCBI NO: 16580747 NR Description: glyoxalase I [Oryza sativa (japonica
  misc_feature (60)..(344): Homolog of NCBI NO: 4126809 NR Description: glyoxalase I [Oryza sativa (japonica
  misc_feature (62)..(344): Homolog of NCBI NO: 2213425 NR Description: hypothetical protein [Citrus x paradisi]
  misc_feature (62)..(344): Homolog of NCBI NO: 11281993 NR Description: lactoylglutathione lyase (EC 4.4.1.5)
  misc_feature (62)..(344): Homolog of NCBI NO: 7619802 NR Description: putative glyoxalase I [Triticum aestivum]
  misc_feature (1)..(344): Homolog of NCBI NO: 25350143 NR Description: protein F1N21.10 [imported] - Arabidopsis
  misc_feature (1)..(344): Homolog of NCBI NO: 21537360 NR Description: glyoxalase I, putative [Arabidopsis thaliana]
  misc_feature (1)..(344): Homolog of NCBI NO: 15220397 NR Description: glyoxalase I, putative (lactoylglutathione lyase)
MAASSIRPSLACFSDSPRFPISLLSRNLSRTLHVPQSQLFGLTSHKLLRRSVNCLGVAESGKAAQATTQDDLLTWVKNDKRRMLHVVYRVGDMDRTIKFYTECLGMKLLRKRDIPEEKYTNAFLGYGPEDSHFVIELTYNYGVDKYDIGAGFGHFGIAVDDVAKTVELVKAKGGKVSREPGPVKGGKTVIAFIEDPDGYKFELLERGPTPEPLCQVMLRVGDLDRAIKFYEKAFGMELLRTRDNPEYKYTIAMMGYGPEDKFPVLELTYNYGVTEYDKGNAYAQIAIGTDDVYKTAEAIKLFGGKITREPGPLPGISTKITACLDPDGWKSVFVDNIDFLKELE

SEQ ID NO: 29223 - protein, 262 aa, Arabidopsis thaliana
  peptide (1)..(262): Ceres Seq. ID no. 12324260
  misc_feature (1)..(262): Homolog of NCBI NO: 15221116 NR Description: glyoxalase I, putative (lactoylglutathione lyase)
  misc_feature (1)..(262): Homolog of NCBI NO: 1808684 NR Description: hypothetical protein [Sporobolus stapfianus]
  misc_feature (1)..(262): Homolog of NCBI NO: 16580747 NR Description: glyoxalase I [Oryza sativa (japonica
  misc_feature (1)..(262): Homolog of NCBI NO: 4126809 NR Description: glyoxalase I [Oryza sativa (japonica
  misc_feature (1)..(262): Homolog of NCBI NO: 2213425 NR Description: hypothetical protein [Citrus x paradisi]
  misc_feature (1)..(262): Homolog of NCBI NO: 11281993 NR Description: lactoylglutathione lyase (EC 4.4.1.5)
  misc_feature (1)..(262): Homolog of NCBI NO: 7619802 NR Description: putative glyoxalase I [Triticum aestivum]
  misc_feature (1)..(262): Homolog of NCBI NO: 25350143 NR Description: protein F1N21.10 [imported] - Arabidopsis
  misc_feature (1)..(262): Homolog of NCBI NO: 21537360 NR Description: glyoxalase I, putative [Arabidopsis thaliana]
  misc_feature (1)..(262): Homolog of NCBI NO: 15220397 NR Description: glyoxalase I, putative (lactoylglutathione lyase)
MLHVVYRVGDMDRTIKFYTECLGMKLLRKRDIPEEKYTNAFLGYGPEDSHFVIELTYNYGVDKYDIGAGFGHFGIAVDDVAKTVELVKAKGGKVSREPGPVKGGKTVIAFIEDPDGYKFELLERGPTPEPLCQVMLRVGDLDRAIKFYEKAFGMELLRTRDNPEYKYTIAMMGYGPEDKFPVLELTYNYGVTEYDKGNAYAQIAIGTDDVYKTAEAIKLFGGKITREPGPLPGISTKITACLDPDGWKSVFVDNIDFLKELE

SEQ ID NO: 29224 - DNA, 2118 bp, Arabidopsis thaliana
  misc_feature (1)..(2118): Ceres Seq. ID no. 13488391
  misc_feature: MA Experiment ID: 108434 Result: Up-regulated in Transcription
  misc_feature: MA Experiment 108434 PARAMETER Experiment Name: At_Root_Tips_cDNA_P Parameter: Tissue Value: Root Tips
  misc_feature: MA Experiment ID: 108488 Result: Up-regulated in Transcription
  misc_feature: MA Experiment ID: 108595 Result: Down-regulated in Transcription
  misc_feature: MA Experiment 108595 PARAMETER Experiment Name: At_Ler-pi_Ovule_cDNA_P Parameter: Plant Line Value: null
  misc_feature: MA Experiment ID: 20000113 Result: Down-regulated in Transcription
  misc_feature: MA Experiment 20000113 PARAMETER Experiment Name: At_42deg_Heat_cDNA_P Parameter: Temperature (deg C) Value: 42 vs. 22
  misc_feature: MA Experiment 20000113 PARAMETER Experiment Name: At_42deg_Heat_cDNA_P Parameter: Timepoint (hr) Value: 8
  misc_feature: MA Experiment 20000113 PARAMETER Experiment Name: At_42deg_Heat_cDNA_P Parameter: Tissue Value: Aerial
  misc_feature: MA Experiment ID: 20000179 Result: Up-regulated in Transcription
  misc_feature: MA Experiment 20000179 PARAMETER Experiment Name: At_Germinating_Seeds_P Parameter: Age (hr) Value: 6 vs. 0
  misc_feature: MA Experiment 20000179 PARAMETER Experiment Name: At_Germinating_Seeds_P Parameter: Tissue Value: Germinating Seeds
  misc_feature: MA Experiment ID: 20000214 Result: Down-regulated in Transcription
  misc_feature: MA Experiment 20000214 PARAMETER Experiment Name: At_4deg_Cold_P Parameter: Timepoint (hr) Value: 6
  misc_feature: MA Experiment ID: 20000224 Result: Down-regulated in Transcription
  misc_feature: MA Experiment ID: 20000234 Result: Down-regulated in Transcription
  misc_feature: MA Experiment 20000234 PARAMETER Experiment Name: At_Siliques_P Parameter: Age (day) Value: 21
  misc_feature: MA Experiment 20000234 PARAMETER Experiment Name: At_Siliques_P Parameter: Organism Value: A. thaliana
  misc_feature: MA Experiment 20000234 PARAMETER Experiment Name: At_Siliques_P Parameter: Plant Line Value: WS
  misc_feature: MA Experiment 20000234 PARAMETER Experiment Name: At_Siliques_P Parameter: Tissue Value: Less Than 5mm Siliques vs. Whole Plant
  misc_feature: MA Experiment ID: 20000264 Result: Down-regulated in Transcription
  misc_feature: MA Experiment 20000264 PARAMETER Experiment Name: At_Open_Flower_P Parameter: Age (day) Value: 21
  misc_feature: MA Experiment 20000264 PARAMETER Experiment Name: At_Open_Flower_P Parameter: Plant Line Value: WS
  misc_feature: MA Experiment 20000264 PARAMETER Experiment Name: At_Open_Flower_P Parameter: Tissue Value: Open Flower vs. Whole Plant
  misc_feature: MA Experiment ID: 20000265 Result: Down-regulated in Transcription
  misc_feature: MA Experiment 20000265 PARAMETER Experiment Name: At_Open_Flower_P Parameter: Age (day) Value: 21
  misc_feature: MA Experiment 20000265 PARAMETER Experiment Name: At_Open_Flower_P Parameter: Plant Line Value: WS
  misc_feature: MA Experiment 20000265 PARAMETER Experiment Name: At_Open_Flower_P Parameter: Tissue Value: Closed Flower vs. Whole Plant
  misc_feature: MA Experiment ID: 20000286 Result: Down-regulated in Transcription
  misc_feature: MA Experiment 20000286 PARAMETER Experiment Name: At_Open_Flower_P Parameter: Age (day) Value: 21
  misc_feature: MA Experiment 20000286 PARAMETER Experiment Name: At_Open_Flower_P Parameter: Plant Line Value: WS
  misc_feature: MA Experiment 20000286 PARAMETER Experiment Name: At_Open_Flower_P Parameter: Tissue Value: Half Open vs. Whole Plant
  misc_feature: MA Experiment ID: 20000794 Result: Down-regulated in Transcription
  misc_feature: MA Experiment 20000794 PARAMETER Experiment Name: At_Petals_P Parameter: Age (day) Value: 23-25 days
  misc_feature: MA Experiment 20000794 PARAMETER Experiment Name: At_Petals_P Parameter: Plant Line Value: WS
  misc_feature: MA Experiment 20000794 PARAMETER Experiment Name: At_Petals_P Parameter: Tissue Value: Petals vs. Whole plant
  misc_feature: MA Experiment ID: 20001248 Result: Up-regulated in Transcription
  misc_feature: MA Experiment 20001248 PARAMETER Experiment Name: At_Far-red-induction_P Parameter: Age (day) Value: 7
  misc_feature: MA Experiment 20001248 PARAMETER Experiment Name: At_Far-red-induction_P Parameter: Light Value: Far-red vs. White
  misc_feature: MA Experiment 20001248 PARAMETER Experiment Name: At_Far-red-induction_P Parameter: Organism Value: A. thaliana
  misc_feature: MA Experiment 20001248 PARAMETER Experiment Name: At_Far-red-induction_P Parameter: Plant Line Value: Columbia
  misc_feature: MA Experiment 20001248 PARAMETER Experiment Name: At_Far-red-induction_P Parameter: Timepoint (hr) Value: 4
  misc_feature: MA Experiment 20001248 PARAMETER Experiment Name: At_Far-red-induction_P Parameter: Tissue Value: Whole Plant
  misc_feature: MA Experiment ID: 20001450 Result: Up-regulated in Transcription
  misc_feature: MA Experiment 20001450 PARAMETER Experiment Name: At_Far-red-induction_P Parameter: Age (day) Value: 7
  misc_feature: MA Experiment 20001450 PARAMETER Experiment Name: At_Far-red-induction_P Parameter: Light Value: Far-red vs. White
  misc_feature: MA Experiment 20001450 PARAMETER Experiment Name: At_Far-red-induction_P Parameter: Organism Value: A. thaliana
  misc_feature: MA Experiment 20001450 PARAMETER Experiment Name: At_Far-red-induction_P Parameter: Plant Line Value: Columbia
  misc_feature: MA Experiment 20001450 PARAMETER Experiment Name: At_Far-red-induction_P Parameter: Timepoint (hr) Value: 8
  misc_feature: MA Experiment 20001450 PARAMETER Experiment Name: At_Far-red-induction_P Parameter: Tissue Value: Whole Plant
aaaaaaaagaaaaatcaaaatccaattcaacactctcacacttcgatatctccgccttcattcttctcagagccaattgtcctgagatttcgatttctccaatctctcttcctccgtcgccggcgaaactatgtctcagtctattcaattctccactccttcacacactcctcaccttctccatctccctcactcacaattcaaccgtcctctctcctctatctccttccgtcgcttccctctaacaaccatcaaatacacttccatcagagcctcctcgtcatcatctccttcaccggatctcgattcatcgtcctcatcatcatcctcgcaagtacttctctcacctaacggtactggtgctgtgaagtctgatgagagatccgttgtcgctacggcggttacgactgatacgtctgggattgaggttgatactgtgacggaagctgagcttaaggagaatggatttagaagtacgaggaggacgaagctgatctgtacgatcggaccggcgacttgtggatttgagcagcttgaggcgcttgctgtgggaggtatgaatgtggcaaggcttaatatgtgtcacggtacgcgtgattggcaccgcggtgtgattcgtagtgttcggaggcttaatgaggagaaaggctttgcggttgctattatgatggatactgaaggtagtgagattcatatgggagatcttggtggtgaagcttcagctaaagcagaggatggtgaggtttggactttcactgttagagcttttgattcttctcgtcctgaacgtaccattagtgttagctacgatggtttcgctgaagatgtaagagttggggatgaacttttggttgatggtgggatggtgagatttgaagtgattgagaagattggtcctgatgttaagtgtctatgtaccgatcctggattgttgcttcctcgagctaacttgacgttttggagagatggaagtcttgtacgagagcgtaatgccatgcttccaacaatttcttccaaggactggttggatattgattttggaattgctgaaggtgtggatttcattgctgtatcgtttgtcaagtcggctgaagtcattaatcaccttaaaagttatcttgctgctcgttcccgtggaggggaaattggagtgattgcaaagatcgagagtatcgattcactgaccaatttggaagaaattattctagcatcagatggggccatggttgcaagaggagatctgggagctcagatacctcttgagcaagttccagcagctcaacagagaatcgtccaagtatgcagagctcttaacaaacccgtcattgtcgcttcacagctattggagtccatgattgagtacccaactccaaccagagcagaagttgccgacgtgtctgaagcagtaagacaaagatcagatgcattgatgctctctggagaatcagctatgggacaattcccagacaaggcgctcacggttctaaggactgtcagtttaagaatcgagagatggtggagggaagagaaacgccatgagtctgtaccgcttcaagccataggctcttcattttcagacaaaatctcagaagagatctgtaactcagctgctaaaatggctaacaatcttggagtggacgcggttttcgtttacacaacgagcggacacatggcatcactggtctcccgatgtcgcccggactgcccgatctttgctttcacaaccacaacctcagtgagaagacgcttaaacctacaatggggacttatcccattccgtctcagcttctcagacgacatggaaagcaacttgaacaaaacattctcgttactgaaatcaagaggtatgatcaaatctggtgacctcgtgatcgcagtctcggacatgctgcaatcaatccaggtaatgaacgtcccgtaattctctctctttatacaatttcgcaatcccgcaaaagagtgttttgtttcctacttttgttactgtttttagactactcttacattagattccagaggcatcatcatcttcggtttgttaacaacagtaatgtgtaagctttgtttgtagtgtgtactgtttgtttttggttttcaataatatcagtaatcttattc

SEQ ID NO: 29225 - protein, 596 aa, Arabidopsis thaliana
  peptide (1)..(596): Ceres Seq. ID no. 13488392
  misc_feature (486)..(596): Pfam Name: Pyruvate kinase, alpha/beta domain Pfam Description: Pyruvate kinase, alpha/beta domain
  misc_feature (115)..(590): Homolog of NCBI NO: 37537030 NR Description: putative pyruvate kinase [Oryza sativa (japonica
  misc_feature (60)..(585): Homolog of NCBI NO: 29788835 NR Description: putative pyruvate kinase [Oryza sativa (japonica
  misc_feature (273)..(596): Homolog of NCBI NO: 21954080 NR Description: putative pyruvate kinase [Arabidopsis thaliana]
  misc_feature (143)..(596): Homolog of NCBI NO: 34393488 NR Description: putative Pyruvate kinase isozyme A, chloroplast
  misc_feature (140)..(596): Homolog of NCBI NO: 7434450 NR Description: pyruvate kinase (EC 2.7.1.40) isoform beta -
  misc_feature (1)..(596): Homolog of NCBI NO: 2129963 NR Description: pyruvate kinase (EC 2.7.1.40) A, chloroplast -
  misc_feature (1)..(596): Homolog of NCBI NO: 2497541 NR Description: Pyruvate kinase isozyme A, chloroplast precursor
  misc_feature (1)..(596): Homolog of NCBI NO: 2497539 NR Description: Pyruvate kinase isozyme A, chloroplast precursor
  misc_feature (1)..(596): Homolog of NCBI NO: 21537361 NR Description: pyruvate kinase, putative [Arabidopsis thaliana]
  misc_feature (1)..(596): Homolog of NCBI NO: 18403597 NR Description: pyruvate kinase, putative [Arabidopsis thaliana]
MSQSIQFSTPSHTPHLLHLPHSQFNRPLSSISFRRFPLTTIKYTSIRASSSSSPSPDLDSSSSSSSSQVLLSPNGTGAVKSDERSVVATAVTTDTSGIEVDTVTEAELKENGFRSTRRTKLICTIGPATCGFEQLEALAVGGMNVARLNMCHGTRDWHRGVIRSVRRLNEEKGFAVAIMMDTEGSEIHMGDLGGEASAKAEDGEVWTFTVRAFDSSRPERTISVSYDGFAEDVRVGDELLVDGGMVRFEVIEKIGPDVKCLCTDPGLLLPRANLTFWRDGSLVRERNAMLPTISSKDWLDIDFGIAEGVDFIAVSFVKSAEVINHLKSYLAARSRGGEIGVIAKIESIDSLTNLEEIILASDGAMVARGDLGAQIPLEQVPAAQQRIVQVCRALNKPVIVASQLLESMIEYPTPTRAEVADVSEAVRQRSDALMLSGESAMGQFPDKALTVLRTVSLRIERWWREEKRHESVPLQAIGSSFSDKISEEICNSAAKMANNLGVDAVFVYTTSGHMASLVSRCRPDCPIFAFTTTTSVRRRLNLQWGLIPFRLSFSDDMESNLNKTFSLLKSRGMIKSGDLVIAVSDMLQSIQVMNVP

SEQ ID NO: 29226 - protein, 454 aa, Arabidopsis thaliana
  peptide (1)..(454): Ceres Seq. ID no. 13488393
  misc_feature (344)..(454): Pfam Name: Pyruvate kinase, alpha/beta domain Pfam Description: Pyruvate kinase, alpha/beta domain
  misc_feature (1)..(448): Homolog of NCBI NO: 37537030 NR Description: putative pyruvate kinase [Oryza sativa (japonica
  misc_feature (1)..(443): Homolog of NCBI NO: 29788835 NR Description: putative pyruvate kinase [Oryza sativa (japonica
  misc_feature (131)..(454): Homolog of NCBI NO: 21954080 NR Description: putative pyruvate kinase [Arabidopsis thaliana]
  misc_feature (1)..(454): Homolog of NCBI NO: 34393488 NR Description: putative Pyruvate kinase isozyme A, chloroplast
  misc_feature (1)..(454): Homolog of NCBI NO: 7434450 NR Description: pyruvate kinase (EC 2.7.1.40) isoform beta -
  misc_feature (1)..(454): Homolog of NCBI NO: 2129963 NR Description: pyruvate kinase (EC 2.7.1.40) A, chloroplast -
  misc_feature (1)..(454): Homolog of NCBI NO: 2497541 NR Description: Pyruvate kinase isozyme A, chloroplast precursor
  misc_feature (1)..(454): Homolog of NCBI NO: 2497539 NR Description: Pyruvate kinase isozyme A, chloroplast precursor
  misc_feature (1)..(454): Homolog of NCBI NO: 21537361 NR Description: pyruvate kinase, putative [Arabidopsis thaliana]
  misc_feature (1)..(454): Homolog of NCBI NO: 18403597 NR Description: pyruvate kinase, putative [Arabidopsis thaliana]
MNVARLNMCHGTRDWHRGVIRSVRRLNEEKGFAVAIMMDTEGSEIHMGDLGGEASAKAEDGEVWTFTVRAFDSSRPERTISVSYDGFAEDVRVGDELLVDGGMVRFEVIEKIGPDVKCLCTDPGLLLPRANLTFWRDGSLVRERNAMLPTISSKDWLDIDFGIAEGVDFIAVSFVKSAEVINHLKSYLAARSRGGEIGVIAKIESIDSLTNLEEIILASDGAMVARGDLGAQIPLEQVPAAQQRIVQVCRALNKPVIVASQLLESMIEYPTPTRAEVADVSEAVRQRSDALMLSGESAMGQFPDKALTVLRTVSLRIERWWREEKRHESVPLQAIGSSFSDKISEEICNSAAKMANNLGVDAVFVYTTSGHMASLVSRCRPDCPIFAFTTTTSVRRRLNLQWGLIPFRLSFSDDMESNLNKTFSLLKSRGMIKSGDLVIAVSDMLQSIQVMNVP

SEQ ID NO: 29227 - protein, 447 aa, Arabidopsis thaliana
  peptide (1)..(447): Ceres Seq. ID no. 13488394
  misc_feature (337)..(447): Pfam Name: Pyruvate kinase, alpha/beta domain Pfam Description: Pyruvate kinase, alpha/beta domain
  misc_feature (1)..(441): Homolog of NCBI NO: 37537030 NR Description: putative pyruvate kinase [Oryza sativa (japonica
  misc_feature (1)..(436): Homolog of NCBI NO: 29788835 NR Description: putative pyruvate kinase [Oryza sativa (japonica
  misc_feature (124)..(447): Homolog of NCBI NO: 21954080 NR Description: putative pyruvate kinase [Arabidopsis thaliana]
  misc_feature (1)..(447): Homolog of NCBI NO: 34393488 NR Description: putative Pyruvate kinase isozyme A, chloroplast
  misc_feature (1)..(447): Homolog of NCBI NO: 7434450 NR Description: pyruvate kinase (EC 2.7.1.40) isoform beta -
  misc_feature (1)..(447): Homolog of NCBI NO: 2129963 NR Description: pyruvate kinase (EC 2.7.1.40) A, chloroplast -
  misc_feature (1)..(447): Homolog of NCBI NO: 2497541 NR Description: Pyruvate kinase isozyme A, chloroplast precursor
  misc_feature (1)..(447): Homolog of NCBI NO: 2497539 NR Description: Pyruvate kinase isozyme A, chloroplast precursor
  misc_feature (1)..(447): Homolog of NCBI NO: 21537361 NR Description: pyruvate kinase, putative [Arabidopsis thaliana]
  misc_feature (1)..(447): Homolog of NCBI NO: 18403597 NR Description: pyruvate kinase, putative [Arabidopsis thaliana]
MCHGTRDWHRGVIRSVRRLNEEKGFAVAIMMDTEGSEIHMGDLGGEASAKAEDGEVWTFTVRAFDSSRPERTISVSYDGFAEDVRVGDELLVDGGMVRFEVIEKIGPDVKCLCTDPGLLLPRANLTFWRDGSLVRERNAMLPTISSKDWLDIDFGIAEGVDFIAVSFVKSAEVINHLKSYLAARSRGGEIGVIAKIESIDSLTNLEEIILASDGAMVARGDLGAQIPLEQVPAAQQRIVQVCRALNKPVIVASQLLESMIEYPTPTRAEVADVSEAVRQRSDALMLSGESAMGQFPDKALTVLRTVSLRIERWWREEKRHESVPLQAIGSSFSDKISEEICNSAAKMANNLGVDAVFVYTTSGHMASLVSRCRPDCPIFAFTTTTSVRRRLNLQWGLIPFRLSFSDDMESNLNKTFSLLKSRGMIKSGDLVIAVSDMLQSIQVMNVP

SEQ ID NO: 29228 - DNA, 1406 bp, Arabidopsis thaliana
  misc_feature (1)..(1406): Ceres Seq. ID no. 13490460
  misc_feature: MA Experiment ID: 108577 Result: Down-regulated in Transcription
  misc_feature: MA Experiment 108577 PARAMETER Experiment Name: At_42deg_Heat_cDNA_P Parameter: Temperature (deg C) Value: 42 vs. 22
  misc_feature: MA Experiment 108577 PARAMETER Experiment Name: At_42deg_Heat_cDNA_P Parameter: Timepoint (hr) Value: 6
  misc_feature: MA Experiment 108577 PARAMETER Experiment Name: At_42deg_Heat_cDNA_P Parameter: Tissue Value: Aerial
  misc_feature: MA Experiment ID: 108595 Result: Down-regulated in Transcription
  misc_feature: MA Experiment 108595 PARAMETER Experiment Name: At_Ler-pi_Ovule_cDNA_P Parameter: Plant Line Value: null
  misc_feature: MA Experiment ID: 20000224 Result: Down-regulated in Transcription
  misc_feature: MA Experiment ID: 20000794 Result: Down-regulated in Transcription
  misc_feature: MA Experiment 20000794 PARAMETER Experiment Name: At_Petals_P Parameter: Age (day) Value: 23-25 days
  misc_feature: MA Experiment 20000794 PARAMETER Experiment Name: At_Petals_P Parameter: Plant Line Value: WS
  misc_feature: MA Experiment 20000794 PARAMETER Experiment Name: At_Petals_P Parameter: Tissue Value: Petals vs. Whole plant
ctcctctcttcaagcttttcacagaaaaccaccacccttctctctctactgcctttttaccacagagaagagagaggatccgtcggtgtgctagtctcactgacactacatccgatcgtcgccggtgacattttataagtgtggagtttacttcagctttattattcaggaattgatggatcagtacgagaaagttgagaagattggtgaaggaacttacggtgtggtttataaggcacgtgacaaagtgactaatgagacaattgctttgaagaagatcaggctagagcaggaggatgaaggtgttcctagcacagcaatcagagaaatctccctcttgaaagaaatgcagcacagcaacattgtcaaattgcaggatgtggtgcacagcgagaaacgtttgtatctggtttttgagtatcttgacttggatctcaaaaagcacatggattctactcctgatttctccaaggatctacatatgatcaaaacatatctttaccagattctccgtggaattgcgtattgccactctcatagggttctccatcgtgatctgaagccacagaatttgttgattgatcgccgcacaaactcactgaagcttgctgattttggactggccagagcattcggtatccctgtcaggacatttactcatgaggttgttactctctggtaccgagcaccagagatactcctaggatctcatcattactctacacctgttgatatttggtctgtggggtgcatatttgctgagatgatcagccaaaagcccttatttcctggagactccgagattgatcaactcttcaagattttcagaatcatgggaactccgtacgaggatacatggcgtggggtaacttctctaccggattataaatctgctttccctaaatggaaaccaacggacctagaaacttttgtccccaatctagatcccgatggagtcgatctcctttctaaaatgctgttaatggatccgaccaaaagaatcaacgcaagagccgccctggagcatgaatacttcaaggatcttggaggcatgccttagaaaggcataaaaccagtaatctccttcattctatatataattatcaatcctaagaaaatgaagaacaatattaatgggttttgtttattctttttctgagttcgtttcctacttatattctattacgaaaaaaaagaaagaagaagatttcgagtgtgtgtgtttttttacttctaagcttttgagatcagtttcttgtatcttattttacccagaatatagtatttccctatatgaaatatggtttttgttttgcaaaatgaccatattatgcaacttctcagctcttgattgtgccttgatagtgatcttttgaaatatatcccaaaaaacatcacttttttcg

SEQ ID NO: 29229 - protein, 294 aa, Arabidopsis thaliana [sequence omitted]

SEQ ID NO: 29230 - protein, 237 aa, Arabidopsis thaliana
  peptide (1)..(237): Ceres Seq. ID no. 13490462
  misc_feature (1)..(230): Pfam Name: Protein kinase domain Pfam Description: Protein kinase domain
  misc_feature (1)..(237): Homolog of NCBI NO: 25989351 NR Description: cyclin-dependent kinase [Helianthus tuberosus]
  misc_feature (1)..(237): Homolog of NCBI NO: 3123614 NR Description: cyclin-dependent protein kinase p34cdc2
  misc_feature (1)..(237): Homolog of NCBI NO: 24636265 NR Description: Cell division control protein 2 homolog (p34cdc2)
  misc_feature (1)..(237): Homolog of NCBI NO: 17224978 NR Description: cyclin dependent kinase [Helianthus annuus]
  misc_feature (1)..(237): Homolog of NCBI NO: 9885803 NR Description: cyclin-dependent kinase A:4 [Nicotiana tabacum]
  misc_feature (1)..(237): Homolog of NCBI NO: 13249052 NR Description: CDC2 homolog [Populus tremula x Populus
  misc_feature (1)..(228): Homolog of NCBI NO: 19699294 NR Description: AT3g48750/T21J18_20 [Arabidopsis thaliana]
  misc_feature (1)..(237): Homolog of NCBI NO: 1236190 NR Description: cyclin dependent protein kinase homolog
  misc_feature (1)..(237): Homolog of NCBI NO: 11259538 NR Description: CELL DIVISION CONTROL PROTEIN 2 HOMOLOG A -
  misc_feature (1)..(237): Homolog of NCBI NO: 18408696 NR Description: cell division control protein 2 homolog A (CDC2A)
MQHSNIVKLQDVVHSEKRLYLVFEYLDLDLKKHMDSTPDFSKDLHMIKTYLYQILRGIAYCHSHRVLHRDLKPQNLLIDRRTNSLKLADFGLARAFGIPVRTFTHEVVTLWYRAPEILLGSHHYSTPVDIWSVGCIFAEMISQKPLFPGDSEIDQLFKIFRIMGTPYEDTWRGVTSLPDYKSAFPKWKPTDLETFVPNLDPDGVDLLSKMLLMDPTKRINARAALEHEYFKDLGGMP

SEQ ID NO: 29231 - protein, 204 aa, Arabidopsis thaliana
  peptide (1)..(204): Ceres Seq. ID no. 13490463
  misc_feature (1)..(197): Pfam Name: Protein kinase domain Pfam Description: Protein kinase domain
  misc_feature (1)..(204): Homolog of NCBI NO: 25989351 NR Description: cyclin-dependent kinase [Helianthus tuberosus]
  misc_feature (1)..(204): Homolog of NCBI NO: 3123614 NR Description: cyclin-dependent protein kinase p34cdc2
  misc_feature (1)..(204): Homolog of NCBI NO: 24636265 NR Description: Cell division control protein 2 homolog (p34cdc2)
  misc_feature (1)..(204): Homolog of NCBI NO: 17224978 NR Description: cyclin dependent kinase [Helianthus annuus]
  misc_feature (1)..(204): Homolog of NCBI NO: 9885803 NR Description: cyclin-dependent kinase A:4 [Nicotiana tabacum]
  misc_feature (1)..(204): Homolog of NCBI NO: 13249052 NR Description: CDC2 homolog [Populus tremula x Populus
  misc_feature (1)..(195): Homolog of NCBI NO: 19699294 NR Description: AT3g48750/T21J18_20 [Arabidopsis thaliana]
  misc_feature (1)..(204): Homolog of NCBI NO: 1236190 NR Description: cyclin dependent protein kinase homolog
  misc_feature (1)..(204): Homolog of NCBI NO: 11259538 NR Description: CELL DIVISION CONTROL PROTEIN 2 HOMOLOG A -
  misc_feature (1)..(204): Homolog of NCBI NO: 18408696 NR Description: cell division control protein 2 homolog A (CDC2A)
MDSTPDFSKDLHMIKTYLYQILRGIAYCHSHRVLHRDLKPQNLLIDRRTNSLKLADFGLARAFGIPVRTFTHEVVTLWYRAPEILLGSHHYSTPVDIWSVGCIFAEMISQKPLFPGDSEIDQLFKIFRIMGTPYEDTWRGVTSLPDYKSAFPKWKPTDLETFVPNLDPDGVDLLSKMLLMDPTKRINARAALEHEYFKDLGGMP

SEQ ID NO: 29232 - DNA, 1444 bp, Arabidopsis thaliana
  misc_feature (1)..(1444): Ceres Seq. ID no. 13486778
  misc_feature: MA Experiment ID: 108561 Result: Up-regulated in Transcription
  misc_feature: MA Experiment 108561 PARAMETER Experiment Name: At_100uM_ABA_cDNA_P Parameter: Timepoint (hr) Value: 6
  misc_feature: MA Experiment 108561 PARAMETER Experiment Name: At_100uM_ABA_cDNA_P Parameter: Tissue Value: Aerial
  misc_feature: MA Experiment 108561 PARAMETER Experiment Name: At_100uM_ABA_cDNA_P Parameter: Treatment Value: 100uM ABA vs. No Treatment
  misc_feature: MA Experiment ID: 108572 Result: Up-regulated in Transcription
  misc_feature: MA Experiment 108572 PARAMETER Experiment Name: At_Drought_cDNA_P Parameter: Timepoint (hr) Value: 1
  misc_feature: MA Experiment 108572 PARAMETER Experiment Name: At_Drought_cDNA_P Parameter: Tissue Value: Aerial
  misc_feature: MA Experiment 108572 PARAMETER Experiment Name: At_Drought_cDNA_P Parameter: Treatment Value: Drought vs. No Drought
  misc_feature: MA Experiment ID: 108573 Result: Up-regulated in Transcription
  misc_feature: MA Experiment 108573 PARAMETER Experiment Name: At_Drought_cDNA_P Parameter: Timepoint (hr) Value: 6
  misc_feature: MA Experiment 108573 PARAMETER Experiment Name: At_Drought_cDNA_P Parameter: Tissue Value: Aerial
  misc_feature: MA Experiment 108573 PARAMETER Experiment Name: At_Drought_cDNA_P Parameter: Treatment Value: Drought vs. No Drought
  misc_feature: MA Experiment ID: 108585 Result: Up-regulated in Transcription
  misc_feature: MA Experiment 108585 PARAMETER Experiment Name: At_5mM_NaNP_cDNA_P Parameter: Timepoint (hr) Value: 6
  misc_feature: MA Experiment 108585 PARAMETER Experiment Name: At_5mM_NaNP_cDNA_P Parameter: Tissue Value: Aerial
  misc_feature: MA Experiment 108585 PARAMETER Experiment Name: At_5mM_NaNP_cDNA_P Parameter: Treatment Value: null
  misc_feature: MA Experiment ID: 108605 Result: Up-regulated in Transcription
  misc_feature: MA Experiment 108605 PARAMETER Experiment Name: At_100uM_ABA_cDNA_P Parameter: Timepoint (hr) Value: 6
  misc_feature: MA Experiment 108605 PARAMETER Experiment Name: At_100uM_ABA_cDNA_P Parameter: Tissue Value: Aerial
  misc_feature: MA Experiment 108605 PARAMETER Experiment Name: At_100uM_ABA_cDNA_P Parameter: Treatment Value: 100uM ABA vs. No Treatment
  misc_feature: MA Experiment ID: 108607 Result: Up-regulated in Transcription
  misc_feature: MA Experiment 108607 PARAMETER Experiment Name: At_100uM_ABA_cDNA_P Parameter: Timepoint (hr) Value: 4
  misc_feature: MA Experiment 108607 PARAMETER Experiment Name: At_100uM_ABA_cDNA_P Parameter: Tissue Value: Aerial
  misc_feature: MA Experiment 108607 PARAMETER Experiment Name: At_100uM_ABA_cDNA_P Parameter: Treatment Value: 100uM ABA vs. No Treatment
  misc_feature: MA Experiment ID: 20000069 Result: Up-regulated in Transcription
  misc_feature: MA Experiment 20000069 PARAMETER Experiment Name: At_100uM_ABA_Mutants_cDNA_P Parameter: Plant Line Value: CS23
  misc_feature: MA Experiment 20000069 PARAMETER Experiment Name: At_100uM_ABA_Mutants_cDNA_P Parameter: Timepoint (hr) Value: 6
  misc_feature: MA Experiment 20000069 PARAMETER Experiment Name: At_100uM_ABA_Mutants_cDNA_P Parameter: Tissue Value: Aerial
  misc_feature: MA Experiment 20000069 PARAMETER Experiment Name: At_100uM_ABA_Mutants_cDNA_P Parameter: Treatment Value: 100uM ABA vs. No Treatment
  misc_feature: MA Experiment ID: 20000070 Result: Up-regulated in Transcription
  misc_feature: MA Experiment 20000070 PARAMETER Experiment Name: At_100uM_ABA_Mutants_cDNA_P Parameter: Plant Line Value: CS24
  misc_feature: MA Experiment 20000070 PARAMETER Experiment Name: At_100uM_ABA_Mutants_cDNA_P Parameter: Timepoint (hr) Value: 6
  misc_feature: MA Experiment 20000070 PARAMETER Experiment Name: At_100uM_ABA_Mutants_cDNA_P Parameter: Tissue Value: Aerial
  misc_feature: MA Experiment 20000070 PARAMETER Experiment Name: At_100uM_ABA_Mutants_cDNA_P Parameter: Treatment Value: 100uM ABA vs. No Treatment
  misc_feature: MA Experiment ID: 20000071 Result: Up-regulated in Transcription
  misc_feature: MA Experiment 20000071 PARAMETER Experiment Name: At_100uM_ABA_Mutants_cDNA_P Parameter: Plant Line Value: CS8104
  misc_feature: MA Experiment 20000071 PARAMETER Experiment Name: At_100uM_ABA_Mutants_cDNA_P Parameter: Timepoint (hr) Value: 6
  misc_feature: MA Experiment 20000071 PARAMETER Experiment Name: At_100uM_ABA_Mutants_cDNA_P Parameter: Tissue Value: Aerial
  misc_feature: MA Experiment 20000071 PARAMETER Experiment Name: At_100uM_ABA_Mutants_cDNA_P Parameter: Treatment Value: 100uM ABA vs. No Treatment
  misc_feature: MA Experiment ID: 20000072 Result: Up-regulated in Transcription
  misc_feature: MA Experiment 20000072 PARAMETER Experiment Name: At_100uM_ABA_Mutants_cDNA_P Parameter: Plant Line Value: CS8105
  misc_feature: MA Experiment 20000072 PARAMETER Experiment Name: At_100uM_ABA_Mutants_cDNA_P Parameter: Timepoint (hr) Value: 6
  misc_feature: MA Experiment 20000072 PARAMETER Experiment Name: At_100uM_ABA_Mutants_cDNA_P Parameter: Tissue Value: Aerial
  misc_feature: MA Experiment 20000072 PARAMETER Experiment Name: At_100uM_ABA_Mutants_cDNA_P Parameter: Treatment Value: 100uM ABA vs. No Treatment
  misc_feature: MA Experiment ID: 20000086 Result: Up-regulated in Transcription
  misc_feature: MA Experiment 20000086 PARAMETER Experiment Name: At_100uM_ABA_Mutants_cDNA_P Parameter: Plant Line Value: CS22
  misc_feature: MA Experiment 20000086 PARAMETER Experiment Name: At_100uM_ABA_Mutants_cDNA_P Parameter: Timepoint (hr) Value: 6
  misc_feature: MA Experiment 20000086 PARAMETER Experiment Name: At_100uM_ABA_Mutants_cDNA_P Parameter: Tissue Value: Aerial
  misc_feature: MA Experiment 20000086 PARAMETER Experiment Name: At_100uM_ABA_Mutants_cDNA_P Parameter: Treatment Value: 100uM ABA vs. No Treatment
  misc_feature: MA Experiment ID: 20000087 Result: Up-regulated in Transcription
  misc_feature: MA Experiment 20000087 PARAMETER Experiment Name: At_100uM_ABA_Mutants_cDNA_P Parameter: Plant Line Value: WS
  misc_feature: MA Experiment 20000087 PARAMETER Experiment Name: At_100uM_ABA_Mutants_cDNA_P Parameter: Timepoint (hr) Value: 6
  misc_feature: MA Experiment 20000087 PARAMETER Experiment Name: At_100uM_ABA_Mutants_cDNA_P Parameter: Tissue Value: Aerial
  misc_feature: MA Experiment 20000087 PARAMETER Experiment Name: At_100uM_ABA_Mutants_cDNA_P Parameter: Treatment Value: 100uM ABA vs. No Treatment
  misc_feature: MA Experiment ID: 20000088 Result: Up-regulated in Transcription
  misc_feature: MA Experiment 20000088 PARAMETER Experiment Name: At_100uM_ABA_Mutants_cDNA_P Parameter: Plant Line Value: Landsberg
  misc_feature: MA Experiment 20000088 PARAMETER Experiment Name: At_100uM_ABA_Mutants_cDNA_P Parameter: Timepoint (hr) Value: 6
  misc_feature: MA Experiment 20000088 PARAMETER Experiment Name: At_100uM_ABA_Mutants_cDNA_P Parameter: Tissue Value: Aerial
  misc_feature: MA Experiment 20000088 PARAMETER Experiment Name: At_100uM_ABA_Mutants_cDNA_P Parameter: Treatment Value: 100uM ABA vs. No Treatment
  misc_feature: MA Experiment ID: 20000111 Result: Down-regulated in Transcription
  misc_feature: MA Experiment 20000111 PARAMETER Experiment Name: At_42deg_Heat_cDNA_P Parameter: Temperature (deg C) Value: 42 vs. 22
  misc_feature: MA Experiment 20000111 PARAMETER Experiment Name: At_42deg_Heat_cDNA_P Parameter: Timepoint (hr) Value: 6
  misc_feature: MA Experiment 20000111 PARAMETER Experiment Name: At_42deg_Heat_cDNA_P Parameter: Tissue Value: Aerial
  misc_feature: MA Experiment ID: 20000113 Result: Down-regulated in Transcription
  misc_feature: MA Experiment 20000113 PARAMETER Experiment Name: At_42deg_Heat_cDNA_P Parameter: Temperature (deg C) Value: 42 vs. 22
  misc_feature: MA Experiment 20000113 PARAMETER Experiment Name: At_42deg_Heat_cDNA_P Parameter: Timepoint (hr) Value: 8
  misc_feature: MA Experiment 20000113 PARAMETER Experiment Name: At_42deg_Heat_cDNA_P Parameter: Tissue Value: Aerial
  misc_feature: MA Experiment ID: 20000117 Result: Up-regulated in Transcription
  misc_feature: MA Experiment 20000117 PARAMETER Experiment Name: At_100uM_ABA_Mutants_cDNA_P Parameter: Plant Line Value: Columbia
  misc_feature: MA Experiment 20000117 PARAMETER Experiment Name: At_100uM_ABA_Mutants_cDNA_P Parameter: Timepoint (hr) Value: 6
  misc_feature: MA Experiment 20000117 PARAMETER Experiment Name: At_100uM_ABA_Mutants_cDNA_P Parameter: Tissue Value: Aerial
  misc_feature: MA Experiment 20000117 PARAMETER Experiment Name: At_100uM_ABA_Mutants_cDNA_P Parameter: Treatment Value: 100uM ABA vs. No Treatment
  misc_feature: MA Experiment ID: 20000224 Result: Up-regulated in Transcription
  misc_feature: MA Experiment ID: 20000437 Result: Up-regulated in Transcription
  misc_feature: MA Experiment 20000437 PARAMETER Experiment Name: At_Drought_P Parameter: Age (day) Value: 8
  misc_feature: MA Experiment 20000437 PARAMETER Experiment Name: At_Drought_P Parameter: Organism Value: A. thaliana
  misc_feature: MA Experiment 20000437 PARAMETER Experiment Name: At_Drought_P Parameter: Plant Line Value: WS
  misc_feature: MA Experiment 20000437 PARAMETER Experiment Name: At_Drought_P Parameter: Timepoint (hr) Value: 24
  misc_feature: MA Experiment 20000437 PARAMETER Experiment Name: At_Drought_P Parameter: Tissue Value: Whole Plant
  misc_feature: MA Experiment 20000437 PARAMETER Experiment Name: At_Drought_P Parameter: Treatment Value: Drought vs. No Drought
  misc_feature: MA Experiment ID: 20000438 Result: Down-regulated in Transcription
  misc_feature: MA Experiment 20000438 PARAMETER Experiment Name: At_Shoots__P Parameter: Age (day) Value: 14
  misc_feature: MA Experiment 20000438 PARAMETER Experiment Name: At_Shoots__P Parameter: Tissue Value: Shoots vs. Whole Plant
  misc_feature: MA Experiment ID: 20000453 Result: Up-regulated in Transcription
  misc_feature: MA Experiment 20000453 PARAMETER Experiment Name: At_100uM_ABA_P Parameter: Age (day) Value: 15
  misc_feature: MA Experiment 20000453 PARAMETER Experiment Name: At_100uM_ABA_P Parameter: Organism Value: A. thaliana
  misc_feature: MA Experiment 20000453 PARAMETER Experiment Name: At_100uM_ABA_P Parameter: Plant Line Value: WS
  misc_feature: MA Experiment 20000453 PARAMETER Experiment Name: At_100uM_ABA_P Parameter: Timepoint (hr) Value: 24
  misc_feature: MA Experiment 20000453 PARAMETER Experiment Name: At_100uM_ABA_P Parameter: Tissue Value: Aerial
  misc_feature: MA Experiment 20000453 PARAMETER Experiment Name: At_100uM_ABA_P Parameter: Treatment Value: 100uM ABA vs. No Treatment
  misc_feature: MA Experiment ID: 20000794 Result: Up-regulated in Transcription
  misc_feature: MA Experiment 20000794 PARAMETER Experiment Name: At_Petals_P Parameter: Age (day) Value: 23-25 days
  misc_feature: MA Experiment 20000794 PARAMETER Experiment Name: At_Petals_P Parameter: Plant Line Value: WS
  misc_feature: MA Experiment 20000794 PARAMETER Experiment Name: At_Petals_P Parameter: Tissue Value: Petals vs. Whole plant
  misc_feature: MA Experiment ID: 20001555 Result: Up-regulated in Transcription
  misc_feature: MA Experiment 20001555 PARAMETER Experiment Name: At_Drought_Soil_Dry_P Parameter: Age (day) Value: 24
  misc_feature: MA Experiment 20001555 PARAMETER Experiment Name: At_Drought_Soil_Dry_P Parameter: Organism Value: A. thaliana
  misc_feature: MA Experiment 20001555 PARAMETER Experiment Name: At_Drought_Soil_Dry_P Parameter: Plant Line Value: WS
  misc_feature: MA Experiment 20001555 PARAMETER Experiment Name: At_Drought_Soil_Dry_P Parameter: Post Timepoint (hr) Value: None
  misc_feature: MA Experiment 20001555 PARAMETER Experiment Name: At_Drought_Soil_Dry_P Parameter: Post-Treatment Value: None
  misc_feature: MA Experiment 20001555 PARAMETER Experiment Name: At_Drought_Soil_Dry_P Parameter: Timepoint (day) Value: 10
  misc_feature: MA Experiment 20001555 PARAMETER Experiment Name: At_Drought_Soil_Dry_P Parameter: Treatment Value: Drought vs. No Drought
  misc_feature: MA Experiment ID: 20001556 Result: Up-regulated in Transcription
  misc_feature: MA Experiment 20001556 PARAMETER Experiment Name: At_Drought_Soil_Dry_P Parameter: Age (day) Value: 26
  misc_feature: MA Experiment 20001556 PARAMETER Experiment Name: At_Drought_Soil_Dry_P Parameter: Organism Value: A. thaliana
  misc_feature: MA Experiment 20001556 PARAMETER Experiment Name: At_Drought_Soil_Dry_P Parameter: Plant Line Value: WS
  misc_feature: MA Experiment 20001556 PARAMETER Experiment Name: At_Drought_Soil_Dry_P Parameter: Post Timepoint (hr) Value: None
  misc_feature: MA Experiment 20001556 PARAMETER Experiment Name: At_Drought_Soil_Dry_P Parameter: Post-Treatment Value: None
  misc_feature: MA Experiment 20001556 PARAMETER Experiment Name: At_Drought_Soil_Dry_P Parameter: Timepoint (day) Value: 12
  misc_feature: MA Experiment 20001556 PARAMETER Experiment Name: At_Drought_Soil_Dry_P Parameter: Treatment Value: Drought vs. No Drought
  misc_feature: MA Experiment ID: 20001559 Result: Up-regulated in Transcription
  misc_feature: MA Experiment 20001559 PARAMETER Experiment Name: At_Drought_Soil_Dry_P Parameter: Age (day) Value: 28
  misc_feature: MA Experiment 20001559 PARAMETER Experiment Name: At_Drought_Soil_Dry_P Parameter: Organism Value: A. thaliana
  misc_feature: MA Experiment 20001559 PARAMETER Experiment Name: At_Drought_Soil_Dry_P Parameter: Plant Line Value: WS
  misc_feature: MA Experiment 20001559 PARAMETER Experiment Name: At_Drought_Soil_Dry_P Parameter: Post Timepoint (hr) Value: 29
  misc_feature: MA Experiment 20001559 PARAMETER Experiment Name: At_Drought_Soil_Dry_P Parameter: Post-Treatment Value: Re-Water vs. No Drought
  misc_feature: MA Experiment 20001559 PARAMETER Experiment Name: At_Drought_Soil_Dry_P Parameter: Timepoint (day) Value: 14
  misc_feature: MA Experiment 20001559 PARAMETER Experiment Name: At_Drought_Soil_Dry_P Parameter: Treatment Value: Drought vs. No Drought
  misc_feature: MA Experiment ID: 20001757 Result: Down-regulated in Transcription
  misc_feature: MA Experiment 20001757 PARAMETER Experiment Name: At_50mM_NH4NO3_L-to-H_P Parameter: Timepoint (hr) Value: 6
  misc_feature: MA Experiment 20001757 PARAMETER Experiment Name: At_50mM_NH4NO3_L-to-H_P Parameter: Tissue Value: Leaf
  misc_feature: MA Experiment 20001757 PARAMETER Experiment Name: At_50mM_NH4NO3_L-to-H_P Parameter: Treatment Value: 50mM NH4NO3 vs 100mM Mannitol
  misc_feature: MA Experiment ID: 20001905 Result: Up-regulated in Transcription
  misc_feature: MA Experiment 20001905 PARAMETER Experiment Name: At_Drought_Reproduction_P Parameter: Age (day) Value: 40
  misc_feature: MA Experiment 20001905 PARAMETER Experiment Name: At_Drought_Reproduction_P Parameter: Organism Value: A. thaliana
  misc_feature: MA Experiment 20001905 PARAMETER Experiment Name: At_Drought_Reproduction_P Parameter: Plant Line Value: WS
  misc_feature: MA Experiment 20001905 PARAMETER Experiment Name: At_Drought_Reproduction_P Parameter: Timepoint (day) Value: 10
  misc_feature: MA Experiment 20001905 PARAMETER Experiment Name: At_Drought_Reproduction_P Parameter: Tissue Value: Rosettes
  misc_feature: MA Experiment 20001905 PARAMETER Experiment Name: At_Drought_Reproduction_P Parameter: Treatment Value: Drought vs. No Drought
  misc_feature: MA Experiment ID: 20001908 Result: Up-regulated in Transcription
  misc_feature: MA Experiment 20001908 PARAMETER Experiment Name: At_Drought_Reproduction_P Parameter: Age (day) Value: 40
  misc_feature: MA Experiment 20001908 PARAMETER Experiment Name: At_Drought_Reproduction_P Parameter: Organism Value: A. thaliana
  misc_feature: MA Experiment 20001908 PARAMETER Experiment Name: At_Drought_Reproduction_P Parameter: Plant Line Value: WS
  misc_feature: MA Experiment 20001908 PARAMETER Experiment Name: At_Drought_Reproduction_P Parameter: Timepoint (day) Value: 10
  misc_feature: MA Experiment 20001908 PARAMETER Experiment Name: At_Drought_Reproduction_P Parameter: Tissue Value: Siliques
  misc_feature: MA Experiment 20001908 PARAMETER Experiment Name: At_Drought_Reproduction_P Parameter: Treatment Value: Drought vs. No Drought
  misc_feature: MA Experiment ID: 20001911 Result: Up-regulated in Transcription
  misc_feature: MA Experiment 20001911 PARAMETER Experiment Name: At_Drought_Reproduction_P Parameter: Age (day) Value: 40
  misc_feature: MA Experiment 20001911 PARAMETER Experiment Name: At_Drought_Reproduction_P Parameter: Organism Value: A. thaliana
  misc_feature: MA Experiment 20001911 PARAMETER Experiment Name: At_Drought_Reproduction_P Parameter: Plant Line Value: WS
  misc_feature: MA Experiment 20001911 PARAMETER Experiment Name: At_Drought_Reproduction_P Parameter: Timepoint (day) Value: 10
  misc_feature: MA Experiment 20001911 PARAMETER Experiment Name: At_Drought_Reproduction_P Parameter: Tissue Value: Flowers
  misc_feature: MA Experiment 20001911 PARAMETER Experiment Name: At_Drought_Reproduction_P Parameter: Treatment Value: Drought vs. No Drought
actgaattaggatactgtgtggtgttttgcaaaactgctcttgtgctatgactctggctaatgatttcggatattcgaccgctatgtcttcatcttattcagctcttcatactagtgtagaagacagataccacaagttgcctaactctttttgggtttcatcaggtcaggaactgatgaataaccctgtaccgtgtcagtcggtctctggtggcaattctggtggttatttgtttccttcttcctctggatactgcaatgtttcagctgtcttgcctcatggaaggaatttgcaaaaccagccacctgtttccaccgtgcctagagacagattggctatgcaggattgtcctttgatagctcaatcctcgttgattaatcatcaccctcaagagttcatagatccacttcatgagttctttgatttctctgatcatgttcctgttcagaatctacaagcagagagtagtggagtaagggtggactcatccgtggaacttcataagaaaagtgaatggcaagattgggcagatcagctgatttctgttgacgatggttctgagccaaattggtctgaacttcttggagattcaagttcccacaatccaaattcagagatacctacaccatttttggatgtaccaaggctagatataacagctaaccagcagcaacagatggtttcatcagaggaccagctcagcggcagaaactcatcatctagtgtagcaacatctaaacaacgtatgcgttggacaccagaacttcacgaggcattcgttgaagctgttaatcagcttggtggtagtgaacgagccacccctaaggctgttttgaagctcttgaataaccctggcttgaccatttatcatgtaaaaagccatttgcagaaatatagaacggcaaggtataaaccggagacttcggaagttacaggagaacctcaagagaagaagatgacatctattgaagatatcaaatctcttgacatgaaaacgagcgttgagatcacacaagctctacggttacaaatggaagtgcagaaacgtctccacgagcagctcgagatccaacggtcactgcagttacagattgaaaaacagggccggtacctacagatgatgttcgagaaacaacaaaagatacaagacaacaagagctcttcttcagaagcatcaccaaagcaatgcaatggttcatttgcagaagttgaagttggtcttgagacactaacaggggaccaaaatgaatctgcttcagcatcaaggaaacgtgtcagagaagattaaagcatgtttaatttgatctcgtttgacgaaacatgtttattgggaattaattgtggaaaccaactccagttttgttaaaagaatctgtttctttcttagctctgtattgttctagtttagaagcagttgatttggccttgcatggctgcaacacc

SEQ ID NO: 29233 - protein, 413 aa, Arabidopsis thaliana
  peptide (1)..(413): Ceres Seq. ID no. 13486779
  misc_feature (233)..(284): Pfam Name: Myb-like DNA-binding domain Pfam Description: Myb-like DNA-binding domain
  misc_feature (168)..(365): Homolog of NCBI NO: 4519671 NR Description: transfactor [Nicotiana tabacum]
  misc_feature (124)..(379): Homolog of NCBI NO: 7487685 NR Description: hypothetical protein T5F17.60 - Arabidopsis
  misc_feature (5)..(387): Homolog of NCBI NO: 6942190 NR Description: CDPK substrate protein 1; CSP1 [Mesembryanthemum
  misc_feature (124)..(379): Homolog of NCBI NO: 22329004 NR Description: expressed protein [Arabidopsis thaliana]
  misc_feature (45)..(377): Homolog of NCBI NO: 26452281 NR Description: putative transfactor [Arabidopsis thaliana]
  misc_feature (1)..(377): Homolog of NCBI NO: 15229298 NR Description: transfactor -related [Arabidopsis thaliana]
  misc_feature (44)..(413): Homolog of NCBI NO: 30692105 NR Description: expressed protein [Arabidopsis thaliana]
  misc_feature (39)..(413): Homolog of NCBI NO: 21954075 NR Description: unknown protein [Arabidopsis thaliana]
  misc_feature (1)..(413): Homolog of NCBI NO: 21537366 NR Description: transfactor, putative [Arabidopsis thaliana]
  misc_feature (1)..(413): Homolog of NCBI NO: 30692110 NR Description: expressed protein [Arabidopsis thaliana]
MTLANDFGYSTAMSSSYSALHTSVEDRYHKLPNSFWVSSGQELMNNPVPCQSVSGGNSGGYLFPSSSGYCNVSAVLPHGRNLQNQPPVSTVPRDRLAMQDCPLIAQSSLINHHPQEFIDPLHEFFDFSDHVPVQNLQAESSGVRVDSSVELHKKSEWQDWADQLISVDDGSEPNWSELLGDSSSHNPNSEIPTPFLDVPRLDITANQQQQMVSSEDQLSGRNSSSSVATSKQRMRWTPELHEAFVEAVNQLGGSERATPKAVLKLLNNPGLTIYHVKSHLQKYRTARYKPETSEVTGEPQEKKMTSIEDIKSLDMKTSVEITQALRLQMEVQKRLHEQLEIQRSLQLQIEKQGRYLQMMFEKQQKIQDNKSSSSEASPKQCNGSFAEVEVGLETLTGDQNESASASRKRVRED

SEQ ID NO: 29234 - protein, 401 aa, Arabidopsis thaliana
  peptide (1)..(401): Ceres Seq. ID no. 13486780
  misc_feature (221)..(272): Pfam Name: Myb-like DNA-binding domain Pfam Description: Myb-like DNA-binding domain
  misc_feature (156)..(353): Homolog of NCBI NO: 4519671 NR Description: transfactor [Nicotiana tabacum]
  misc_feature (112)..(367): Homolog of NCBI NO: 7487685 NR Description: hypothetical protein T5F17.60 - Arabidopsis
  misc_feature (1)..(375): Homolog of NCBI NO: 6942190 NR Description: CDPK substrate protein 1; CSP1 [Mesembryanthemum
  misc_feature (112)..(367): Homolog of NCBI NO: 22329004 NR Description: expressed protein [Arabidopsis thaliana]
  misc_feature (33)..(365): Homolog of NCBI NO: 26452281 NR Description: putative transfactor [Arabidopsis thaliana]
  misc_feature (1)..(365): Homolog of NCBI NO: 15229298 NR Description: transfactor -related [Arabidopsis thaliana]
  misc_feature (32)..(401): Homolog of NCBI NO: 30692105 NR Description: expressed protein [Arabidopsis thaliana]
  misc_feature (27)..(401): Homolog of NCBI NO: 21954075 NR Description: unknown protein [Arabidopsis thaliana]
  misc_feature (1)..(401): Homolog of NCBI NO: 21537366 NR Description: transfactor, putative [Arabidopsis thaliana]
  misc_feature (1)..(401): Homolog of NCBI NO: 30692110 NR Description: expressed protein [Arabidopsis thaliana]
MSSSYSALHTSVEDRYHKLPNSFWVSSGQELMNNPVPCQSVSGGNSGGYLFPSSSGYCNVSAVLPHGRNLQNQPPVSTVPRDRLAMQDCPLIAQSSLINHHPQEFIDPLHEFFDFSDHVPVQNLQAESSGVRVDSSVELHKKSEWQDWADQLISVDDGSEPNWSELLGDSSSHNPNSEIPTPFLDVPRLDITANQQQQMVSSEDQLSGRNSSSSVATSKQRMRWTPELHEAFVEAVNQLGGSERATPKAVLKLLNNPGLTIYHVKSHLQKYRTARYKPETSEVTGEPQEKKMTSIEDIKSLDMKTSVEITQALRLQMEVQKRLHEQLEIQRSLQLQIEKQGRYLQMMFEKQQKIQDNKSSSSEASPKQCNGSFAEVEVGLETLTGDQNESASASRKRVRED

SEQ ID NO: 29235 - protein, 370 aa, Arabidopsis thaliana
  peptide (1)..(370): Ceres Seq. ID no. 13486781
  misc_feature (190)..(241): Pfam Name: Myb-like DNA-binding domain Pfam Description: Myb-like DNA-binding domain
  misc_feature (125)..(322): Homolog of NCBI NO: 4519671 NR Description: transfactor [Nicotiana tabacum]
  misc_feature (81)..(336): Homolog of NCBI NO: 7487685 NR Description: hypothetical protein T5F17.60 - Arabidopsis
  misc_feature (1)..(344): Homolog of NCBI NO: 6942190 NR Description: CDPK substrate protein 1; CSP1 [Mesembryanthemum
  misc_feature (81)..(336): Homolog of NCBI NO: 22329004 NR Description: expressed protein [Arabidopsis thaliana]
  misc_feature (2)..(334): Homolog of NCBI NO: 26452281 NR Description: putative transfactor [Arabidopsis thaliana]
  misc_feature (1)..(334): Homolog of NCBI NO: 15229298 NR Description: transfactor -related [Arabidopsis thaliana]
  misc_feature (1)..(370): Homolog of NCBI NO: 30692105 NR Description: expressed protein [Arabidopsis thaliana]
  misc_feature (1)..(370): Homolog of NCBI NO: 21954075 NR Description: unknown protein [Arabidopsis thaliana]
  misc_feature (1)..(370): Homolog of NCBI NO: 21537366 NR Description: transfactor, putative [Arabidopsis thaliana]
  misc_feature (1)..(370): Homolog of NCBI NO: 30692110 NR Description: expressed protein [Arabidopsis thaliana]
MNNPVPCQSVSGGNSGGYLFPSSSGYCNVSAVLPHGRNLQNQPPVSTVPRDRLAMQDCPLIAQSSLINHHPQEFIDPLHEFFDFSDHVPVQNLQAESSGVRVDSSVELHKKSEWQDWADQLISVDDGSEPNWSELLGDSSSHNPNSEIPTPFLDVPRLDITANQQQQMVSSEDQLSGRNSSSSVATSKQRMRWTPELHEAFVEAVNQLGGSERATPKAVLKLLNNPGLTIYHVKSHLQKYRTARYKPETSEVTGEPQEKKMTSIEDIKSLDMKTSVEITQALRLQMEVQKRLHEQLEIQRSLQLQIEKQGRYLQMMFEKQQKIQDNKSSSSEASPKQCNGSFAEVEVGLETLTGDQNESASASRKRVRED

SEQ ID NO: 29236 - DNA, 1338 bp, Arabidopsis thaliana
  misc_feature (1)..(1338): Ceres Seq. ID no. 12324858
  misc_feature: MA Experiment ID: 108434 Result: Down-regulated in Transcription
  misc_feature: MA Experiment 108434 PARAMETER Experiment Name: At_Root_Tips_cDNA_P Parameter: Tissue Value: Root Tips
  misc_feature: MA Experiment ID: 108462 Result: Down-regulated in Transcription
  misc_feature: MA Experiment 108462 PARAMETER Experiment Name: At_Germinating_Seeds_cDNA_P Parameter: Age (day) Value: 2 vs. 0
  misc_feature: MA Experiment 108462 PARAMETER Experiment Name: At_Germinating_Seeds_cDNA_P Parameter: Tissue Value: Germinating Seeds
  misc_feature: MA Experiment ID: 20001451 Result: Down-regulated in Transcription
  misc_feature: MA Experiment 20001451 PARAMETER Experiment Name: At_Far-red-induction_P Parameter: Age (day) Value: 7
  misc_feature: MA Experiment 20001451 PARAMETER Experiment Name: At_Far-red-induction_P Parameter: Light Value: Far-red vs. White
  misc_feature: MA Experiment 20001451 PARAMETER Experiment Name: At_Far-red-induction_P Parameter: Organism Value: A. thaliana
  misc_feature: MA Experiment 20001451 PARAMETER Experiment Name: At_Far-red-induction_P Parameter: Plant Line Value: Columbia
  misc_feature: MA Experiment 20001451 PARAMETER Experiment Name: At_Far-red-induction_P Parameter: Timepoint (hr) Value: 24
  misc_feature: MA Experiment 20001451 PARAMETER Experiment Name: At_Far-red-induction_P Parameter: Tissue Value: Whole Plant
aattagaaggaaaaatcatttatgagtgaaatagaaatttgatatctctttattagtttctgcatctcgaggggtttttgggattctctgattcgattgagttctatttgtcgttgtgtacaacatctcgggtggatctttgttgatggcgaaactgagacactcgcgatttcaagcgaggaaatggtcgacattgatgcttgttctgtttatgttgtttatgttaacgattgttctcttaatgcttttggctttcggagttttctctcttcctattaacaacgatgaatcctctcctatcgatctctcttatttccgacgagctgccactgagagaagtgaaggacttgggaagagaggagaccagtggaactgaagtgctttcttgggaacctagagcttttgtctaccacaatttcttgtcgaaggaagaatgtgaatatttaatcagtcttgcaaaaccacatatggtgaagtcaactgttgtagatagcgaaaccggcaagagcaaagatagcagggtgcgaacaagctcagggactttccttaggagaggaagggacaaaatcattaagaccattgagaaaagaatagcagattacacctttattcctgcagatcatggtgaaggacttcaagttcttcactacgaagcagggcaaaagtatgaaccacactatgattattttgttgatgagttcaacactaaaaatggaggtcaacggatggctacaatgcttatgtatctgtcggatgttgaggaaggcggtgaaacagtgtttcctgctgccaatatgaattttagttctgtaccatggtataatgagctctctgagtgtgggaaaaagggactttccgtaaagccgagaatgggtgatgcattgcttttctggagcatgaggcctgatgctacactagatcctacaagtttgcatggtggatgtcctgtgattagagggaacaagtggtcatctaccaaatggattcatgttggcgagtacaaaatctagcgtgtttggtttctggacagtaaactgtttcctttcatggtggatgggatgcaaagttggaactagaaattacagagagttgatgtttgttttttccctgcggctcagtgcattccttgctttgatgggattcaaggtttatcattagagaataccaaaagatagagattttgttagagtaaattaggatggcttagagtgactcttactcattggtatacccataaaggtcttgtgtctttgaacaagagttgtgaattacatagttttgtggtattcttttgttttgtttgtgattagaaacataatcaaattaaaaattgttacc

SEQ ID NO: 29237 - protein, 241 aa, Arabidopsis thaliana
  peptide (1)..(241): Ceres Seq. ID no. 12324859
  misc_feature (113)..(236): Pfam Name: 2OG-Fe(II) oxygenase superfamily Pfam Description: 2OG-Fe(II) oxygenase superfamily
  misc_feature (33)..(239): Homolog of NCBI NO: 29150365 NR Description: putative oxidoreductase [Oryza sativa (japonica
  misc_feature (1)..(82): Homolog of NCBI NO: 15233341 NR Description: putative protein; protein id: At4g35810.1
  misc_feature (79)..(218): Homolog of NCBI NO: 15233341 NR Description: putative protein; protein id: At4g35810.1
  misc_feature (23)..(218): Homolog of NCBI NO: 7488226 NR Description: procollagen-proline dioxygenase alpha chain
  misc_feature (23)..(223): Homolog of NCBI NO: 37535718 NR Description: putative prolyl 4-hydroxylase, alpha subunit
  misc_feature (23)..(241): Homolog of NCBI NO: 21593091 NR Description: putative prolyl 4-hydroxylase, alpha subunit
  misc_feature (23)..(241): Homolog of NCBI NO: 15227885 NR Description: putative prolyl 4-hydroxylase, alpha subunit
  misc_feature (31)..(218): Homolog of NCBI NO: 15239240 NR Description: prolyl 4-hydroxylase, alpha subunit-like protein
  misc_feature (22)..(241): Homolog of NCBI NO: 18394842 NR Description: expressed protein
  misc_feature (22)..(241): Homolog of NCBI NO: 21537370 NR Description: putative prolyl 4-hydroxylase, alpha subunit
MNPLLSISLISDELPLREVKDLGREETSGTEVLSWEPRAFVYHNFLSKEECEYLISLAKPHMVKSTVVDSETGKSKDSRVRTSSGTFLRRGRDKIIKTIEKRIADYTFIPADHGEGLQVLHYEAGQKYEPHYDYFVDEFNTKNGGQRMATMLMYLSDVEEGGETVFPAANMNFSSVPWYNELSECGKKGLSVKPRMGDALLFWSMRPDATLDPTSLHGGCPVIRGNKWSSTKWIHVGEYKI

SEQ ID NO: 29238 - protein, 180 aa, Arabidopsis thaliana
  peptide (1)..(180): Ceres Seq. ID no. 12324860
  misc_feature (52)..(175): Pfam Name: 2OG-Fe(II) oxygenase superfamily Pfam Description: 2OG-Fe(II) oxygenase superfamily
  misc_feature (1)..(178): Homolog of NCBI NO: 29150365 NR Description: putative oxidoreductase [Oryza sativa (japonica
  misc_feature (1)..(21): Homolog of NCBI NO: 15233341 NR Description: putative protein; protein id: At4g35810.1
  misc_feature (18)..(157): Homolog of NCBI NO: 15233341 NR Description: putative protein; protein id: At4g35810.1
  misc_feature (1)..(157): Homolog of NCBI NO: 7488226 NR Description: procollagen-proline dioxygenase alpha chain
  misc_feature (1)..(162): Homolog of NCBI NO: 37535718 NR Description: putative prolyl 4-hydroxylase, alpha subunit
  misc_feature (1)..(180): Homolog of NCBI NO: 21593091 NR Description: putative prolyl 4-hydroxylase, alpha subunit
  misc_feature (1)..(180): Homolog of NCBI NO: 15227885 NR Description: putative prolyl 4-hydroxylase, alpha subunit
  misc_feature (1)..(157): Homolog of NCBI NO: 15239240 NR Description: prolyl 4-hydroxylase, alpha subunit-like protein
  misc_feature (1)..(180): Homolog of NCBI NO: 18394842 NR Description: expressed protein
  misc_feature (1)..(180): Homolog of NCBI NO: 21537370 NR Description: putative prolyl 4-hydroxylase, alpha subunit
MVKSTVVDSETGKSKDSRVRTSSGTFLRRGRDKIIKTIEKRIADYTFIPADHGEGLQVLHYEAGQKYEPHYDYFVDEFNTKNGGQRMATMLMYLSDVEEGGETVFPAANMNFSSVPWYNELSECGKKGLSVKPRMGDALLFWSMRPDATLDPTSLHGGCPVIRGNKWSSTKWIHVGEYKI

SEQ ID NO: 29239 - DNA, 1386 bp, Arabidopsis thaliana
  misc_feature (1)..(1386): Ceres Seq. ID no. 12321239
  misc_feature: MA Experiment ID: 108434 Result: Down-regulated in Transcription
  misc_feature: MA Experiment 108434 PARAMETER Experiment Name: At_Root_Tips_cDNA_P Parameter: Tissue Value: Root Tips
  misc_feature: MA Experiment ID: 108488 Result: Down-regulated in Transcription
  misc_feature: MA Experiment ID: 108489 Result: Up-regulated in Transcription
  misc_feature: MA Experiment ID: 108561 Result: Up-regulated in Transcription
  misc_feature: MA Experiment 108561 PARAMETER Experiment Name: At_100uM_ABA_cDNA_P Parameter: Timepoint (hr) Value: 6
  misc_feature: MA Experiment 108561 PARAMETER Experiment Name: At_100uM_ABA_cDNA_P Parameter: Tissue Value: Aerial
  misc_feature: MA Experiment 108561 PARAMETER Experiment Name: At_100uM_ABA_cDNA_P Parameter: Treatment Value: 100uM ABA vs. No Treatment
  misc_feature: MA Experiment ID: 108573 Result: Up-regulated in Transcription
  misc_feature: MA Experiment 108573 PARAMETER Experiment Name: At_Drought_cDNA_P Parameter: Timepoint (hr) Value: 6
  misc_feature: MA Experiment 108573 PARAMETER Experiment Name: At_Drought_cDNA_P Parameter: Tissue Value: Aerial
  misc_feature: MA Experiment 108573 PARAMETER Experiment Name: At_Drought_cDNA_P Parameter: Treatment Value: Drought vs. No Drought
  misc_feature: MA Experiment ID: 108577 Result: Up-regulated in Transcription
  misc_feature: MA Experiment 108577 PARAMETER Experiment Name: At_42deg_Heat_cDNA_P Parameter: Temperature (deg C) Value: 42 vs. 22
  misc_feature: MA Experiment 108577 PARAMETER Experiment Name: At_42deg_Heat_cDNA_P Parameter: Timepoint (hr) Value: 6
  misc_feature: MA Experiment 108577 PARAMETER Experiment Name: At_42deg_Heat_cDNA_P Parameter: Tissue Value: Aerial
  misc_feature: MA Experiment ID: 20000071 Result: Up-regulated in Transcription
  misc_feature: MA Experiment 20000071 PARAMETER Experiment Name: At_100uM_ABA_Mutants_cDNA_P Parameter: Plant Line Value: CS8104
  misc_feature: MA Experiment 20000071 PARAMETER Experiment Name: At_100uM_ABA_Mutants_cDNA_P Parameter: Timepoint (hr) Value: 6
  misc_feature: MA Experiment 20000071 PARAMETER Experiment Name: At_100uM_ABA_Mutants_cDNA_P Parameter: Tissue Value: Aerial
  misc_feature: MA Experiment 20000071 PARAMETER Experiment Name: At_100uM_ABA_Mutants_cDNA_P Parameter: Treatment Value: 100uM ABA vs. No Treatment
  misc_feature: MA Experiment ID: 20000111 Result: Up-regulated in Transcription
  misc_feature: MA Experiment 20000111 PARAMETER Experiment Name: At_42deg_Heat_cDNA_P Parameter: Temperature (deg C) Value: 42 vs. 22
  misc_feature: MA Experiment 20000111 PARAMETER Experiment Name: At_42deg_Heat_cDNA_P Parameter: Timepoint (hr) Value: 6
  misc_feature: MA Experiment 20000111 PARAMETER Experiment Name: At_42deg_Heat_cDNA_P Parameter: Tissue Value: Aerial
  misc_feature: MA Experiment ID: 20000112 Result: Up-regulated in Transcription
  misc_feature: MA Experiment 20000112 PARAMETER Experiment Name: At_42deg_Heat_cDNA_P Parameter: Temperature (deg C) Value: 42 vs. 22
  misc_feature: MA Experiment 20000112 PARAMETER Experiment Name: At_42deg_Heat_cDNA_P Parameter: Timepoint (hr) Value: 2
  misc_feature: MA Experiment 20000112 PARAMETER Experiment Name: At_42deg_Heat_cDNA_P Parameter: Tissue Value: Aerial
  misc_feature: MA Experiment ID: 20000144 Result: Up-regulated in Transcription
  misc_feature: MA Experiment 20000144 PARAMETER Experiment Name: At_42deg_Heat_cDNA_P Parameter: Temperature (deg C) Value: 42 vs. 22
  misc_feature: MA Experiment 20000144 PARAMETER Experiment Name: At_42deg_Heat_cDNA_P Parameter: Timepoint (hr) Value: 1
  misc_feature: MA Experiment 20000144 PARAMETER Experiment Name: At_42deg_Heat_cDNA_P Parameter: Tissue Value: Aerial
  misc_feature: MA Experiment ID: 20000173 Result: Up-regulated in Transcription
  misc_feature: MA Experiment 20000173 PARAMETER Experiment Name: At_42deg_Heat_P Parameter: Age (day) Value: 14
  misc_feature: MA Experiment 20000173 PARAMETER Experiment Name: At_42deg_Heat_P Parameter: Organism Value: A. thaliana
  misc_feature: MA Experiment 20000173 PARAMETER Experiment Name: At_42deg_Heat_P Parameter: Plant Line Value: WS
  misc_feature: MA Experiment 20000173 PARAMETER Experiment Name: At_42deg_Heat_P Parameter: Temperature (deg C) Value: 42 vs. 22
  misc_feature: MA Experiment 20000173 PARAMETER Experiment Name: At_42deg_Heat_P Parameter: Timepoint (hr) Value: 6
  misc_feature: MA Experiment 20000173 PARAMETER Experiment Name: At_42deg_Heat_P Parameter: Tissue Value: Aerial
  misc_feature: MA Experiment ID: 20000179 Result: Down-regulated in Transcription
  misc_feature: MA Experiment 20000179 PARAMETER Experiment Name: At_Germinating_Seeds_P Parameter: Age (hr) Value: 6 vs. 0
  misc_feature: MA Experiment 20000179 PARAMETER Experiment Name: At_Germinating_Seeds_P Parameter: Tissue Value: Germinating Seeds
  misc_feature: MA Experiment ID: 20000224 Result: Down-regulated in Transcription
  misc_feature: MA Experiment ID: 20000436 Result: Up-regulated in Transcription
  misc_feature: MA Experiment 20000436 PARAMETER Experiment Name: At_Drought_P Parameter: Age (day) Value: 7
  misc_feature: MA Experiment 20000436 PARAMETER Experiment Name: At_Drought_P Parameter: Organism Value: A. thaliana
  misc_feature: MA Experiment 20000436 PARAMETER Experiment Name: At_Drought_P Parameter: Plant Line Value: WS
  misc_feature: MA Experiment 20000436 PARAMETER Experiment Name: At_Drought_P Parameter: Timepoint (hr) Value: 12
  misc_feature: MA Experiment 20000436 PARAMETER Experiment Name: At_Drought_P Parameter: Tissue Value: Whole Plant
  misc_feature: MA Experiment 20000436 PARAMETER Experiment Name: At_Drought_P Parameter: Treatment Value: Drought vs. No Drought
  misc_feature: MA Experiment ID: 20000437 Result: Up-regulated in Transcription
  misc_feature: MA Experiment 20000437 PARAMETER Experiment Name: At_Drought_P Parameter: Age (day) Value: 8
  misc_feature: MA Experiment 20000437 PARAMETER Experiment Name: At_Drought_P Parameter: Organism Value: A. thaliana
  misc_feature: MA Experiment 20000437 PARAMETER Experiment Name: At_Drought_P Parameter: Plant Line Value: WS
  misc_feature: MA Experiment 20000437 PARAMETER Experiment Name: At_Drought_P Parameter: Timepoint (hr) Value: 24
  misc_feature: MA Experiment 20000437 PARAMETER Experiment Name: At_Drought_P Parameter: Tissue Value: Whole Plant
  misc_feature: MA Experiment 20000437 PARAMETER Experiment Name: At_Drought_P Parameter: Treatment Value: Drought vs. No Drought
  misc_feature: MA Experiment ID: 20000794 Result: Up-regulated in Transcription
  misc_feature: MA Experiment 20000794 PARAMETER Experiment Name: At_Petals_P Parameter: Age (day) Value: 23-25 days
  misc_feature: MA Experiment 20000794 PARAMETER Experiment Name: At_Petals_P Parameter: Plant Line Value: WS
  misc_feature: MA Experiment 20000794 PARAMETER Experiment Name: At_Petals_P Parameter: Tissue Value: Petals vs. Whole plant
  misc_feature: MA Experiment ID: 20001560 Result: Down-regulated in Transcription
  misc_feature: MA Experiment 20001560 PARAMETER Experiment Name: At_Drought_Soil_Dry_P Parameter: Age (day) Value: 28
  misc_feature: MA Experiment 20001560 PARAMETER Experiment Name: At_Drought_Soil_Dry_P Parameter: Organism Value: A. thaliana
  misc_feature: MA Experiment 20001560 PARAMETER Experiment Name: At_Drought_Soil_Dry_P Parameter: Plant Line Value: WS
  misc_feature: MA Experiment 20001560 PARAMETER Experiment Name: At_Drought_Soil_Dry_P Parameter: Post Timepoint (hr) Value: None
  misc_feature: MA Experiment 20001560 PARAMETER Experiment Name: At_Drought_Soil_Dry_P Parameter: Post-Treatment Value: None
  misc_feature: MA Experiment 20001560 PARAMETER Experiment Name: At_Drought_Soil_Dry_P Parameter: Timepoint (day) Value: 14
  misc_feature: MA Experiment 20001560 PARAMETER Experiment Name: At_Drought_Soil_Dry_P Parameter: Treatment Value: Drought vs. No Drought
atctctcttacgattccttcaaatcattcttccatggccaccgtatcttcttcctcctggccaaaccccaaccctaatcccgattccacgtctgcctcagattccgattctacttttccctctcaccgcgatcgcgtagacgaacccgactctctcgattccttctcctccatgagtcttaactccgacgaacctaatcagacttctaatcaatcgcctctttctccccctacgcccaatttaccggtgatgcctcctccgtccgtgcttcatctttcctttaaccaagatcatgcttgcttcgctgtcggcactgaccgtggcttccggatccttaattgcgatccctttcgcgagattttccggcgtgatttcgatcgtggcggtggtgttgcagtcgtggagatgcttttcagatgcaatatattagccctagttggtggcggacctgatcctcaatatcctcctaataaggttatgatttgggatgatcaccagggccgatgtatcggagaactctctttcaggtccgatgttagatccgtccggcttaggagggatcggattattgtcgttcttgagcagaagatttttgtctacaatttctctgacctcaagctgatgcatcagattgaaaccattgccaaccctaagggtttgtgtgctgtttctcagggtgttggttctatggttttggtatgtccaggtttgcagaaaggtcaagttcggatcgagcactacgcttctaaacggaccaaattcgtcatggctcatgattccagaatagcttgcttcgctctcacgcaggatggccatttgttggccacagctagctctaagggtactctggttcggatcttcaaatgctcagtggttagctgtctcaagtgacaaaggaacggtccatgtctttggtctcaaagtcaactccggatctcaagtgaaagactcatcccgaattgcacctgatgctactccctcatccccatcgtcgtctctgtctttattcaaaggagtgttaccgaggtatttcagctcggagtggtcggtggctcagttcaggttggttgaaggaactcagtacatagccgcctttggccatcaaaagaacaccgttgttattcttggcatggatgggagcttctacagatgccagtttgatccggtgaacggcggtgaaatgtctcagctcgagtaccacaactgtctgaaaccgccttcagttttctaaaagctttactacttatactcttttgttccttctctctctttatatctctctgctacttaagcggtgagatttggtgtatagttttgtgtatataataatgatgggtcgtcctataatttgtaaaaccttttatcactaaccaaaactgattcacg

SEQ ID NO: 29240 - protein, 296 aa, Arabidopsis thaliana
  peptide (1)..(296): Ceres Seq. ID no. 12321240
  misc_feature (89)..(296): Homolog of NCBI NO: 15238452 NR Description: putative protein; protein id: At5g05150.1
  misc_feature (89)..(287): Homolog of NCBI NO: 11288366 NR Description: hypothetical protein T5P19.90 - Arabidopsis
  misc_feature (89)..(287): Homolog of NCBI NO: 30688413 NR Description: WD-40 repeat protein family [Arabidopsis
  misc_feature (89)..(287): Homolog of NCBI NO: 7487233 NR Description: hypothetical protein At2g40810 [imported] -
  misc_feature (89)..(287): Homolog of NCBI NO: 34896164 NR Description: hypothetical protein~similar to Arabidopsis
  misc_feature (89)..(287): Homolog of NCBI NO: 30694449 NR Description: WD-40 repeat protein family [Arabidopsis thaliana]
  misc_feature (23)..(296): Homolog of NCBI NO: 34907164 NR Description: P0423A12.19 [Oryza sativa (japonica
  misc_feature (12)..(287): Homolog of NCBI NO: 18412493 NR Description: putative protein
  misc_feature (12)..(296): Homolog of NCBI NO: 11288364 NR Description: hypothetical protein F26K9.200 - Arabidopsis
  misc_feature (12)..(287): Homolog of NCBI NO: 14517420 NR Description: AT3g62770/F26K9_200 [Arabidopsis thaliana]
ISLTIPSNHSSMATVSSSSWPNPNPNPDSTSASDSDSTFPSHRDRVDEPDSLDSFSSMSLNSDEPNQTSNQSPLSPPTPNLPVMPPPSVLHLSFNQDHACFAVGTDRGFRILNCDPFREIFRRDFDRGGGVAVVEMLFRCNILALVGGGPDPQYPPNKVMIWDDHQGRCIGELSFRSDVRSVRLRRDRIIVVLEQKIFVYNFSDLKLMHQIETIANPKGLCAVSQGVGSMVLVCPGLQKGQVRIEHYASKRTKFVMAHDSRIACFALTQDGHLLATASSKGTLVRIFKCSVVSCLK

SEQ ID NO: 29241 - protein, 285 aa, Arabidopsis thaliana
  peptide (1)..(285): Ceres Seq. ID no. 12321241
  misc_feature (78)..(285): Homolog of NCBI NO: 15238452 NR Description: putative protein; protein id: At5g05150.1
  misc_feature (78)..(276): Homolog of NCBI NO: 11288366 NR Description: hypothetical protein T5P19.90 - Arabidopsis
  misc_feature (78)..(276): Homolog of NCBI NO: 30688413 NR Description: WD-40 repeat protein family [Arabidopsis
  misc_feature (78)..(276): Homolog of NCBI NO: 7487233 NR Description: hypothetical protein At2g40810 [imported] -
  misc_feature (78)..(276): Homolog of NCBI NO: 34896164 NR Description: hypothetical protein~similar to Arabidopsis
  misc_feature (78)..(276): Homolog of NCBI NO: 30694449 NR Description: WD-40 repeat protein family [Arabidopsis thaliana]
  misc_feature (12)..(285): Homolog of NCBI NO: 34907164 NR Description: P0423A12.19 [Oryza sativa (japonica
  misc_feature (1)..(276): Homolog of NCBI NO: 18412493 NR Description: putative protein
  misc_feature (1)..(285): Homolog of NCBI NO: 11288364 NR Description: hypothetical protein F26K9.200 - Arabidopsis
  misc_feature (1)..(276): Homolog of NCBI NO: 14517420 NR Description: AT3g62770/F26K9_200 [Arabidopsis thaliana]
MATVSSSSWPNPNPNPDSTSASDSDSTFPSHRDRVDEPDSLDSFSSMSLNSDEPNQTSNQSPLSPPTPNLPVMPPPSVLHLSFNQDHACFAVGTDRGFRILNCDPFREIFRRDFDRGGGVAVVEMLFRCNILALVGGGPDPQYPPNKVMIWDDHQGRCIGELSFRSDVRSVRLRRDRIIVVLEQKIFVYNFSDLKLMHQIETIANPKGLCAVSQGVGSMVLVCPGLQKGQVRIEHYASKRTKFVMAHDSRIACFALTQDGHLLATASSKGTLVRIFKCSVVSCLK

SEQ ID NO: 29242 - protein, 239 aa, Arabidopsis thaliana
  peptide (1)..(239): Ceres Seq. ID no. 12321242
  misc_feature (32)..(239): Homolog of NCBI NO: 15238452 NR Description: putative protein; protein id: At5g05150.1
  misc_feature (32)..(230): Homolog of NCBI NO: 11288366 NR Description: hypothetical protein T5P19.90 - Arabidopsis
  misc_feature (32)..(230): Homolog of NCBI NO: 30688413 NR Description: WD-40 repeat protein family [Arabidopsis
  misc_feature (32)..(230): Homolog of NCBI NO: 7487233 NR Description: hypothetical protein At2g40810 [imported] -
  misc_feature (32)..(230): Homolog of NCBI NO: 34896164 NR Description: hypothetical protein~similar to Arabidopsis
  misc_feature (32)..(230): Homolog of NCBI NO: 30694449 NR Description: WD-40 repeat protein family [Arabidopsis thaliana]
  misc_feature (1)..(239): Homolog of NCBI NO: 34907164 NR Description: P0423A12.19 [Oryza sativa (japonica
  misc_feature (1)..(230): Homolog of NCBI NO: 18412493 NR Description: putative protein
  misc_feature (1)..(239): Homolog of NCBI NO: 11288364 NR Description: hypothetical protein F26K9.200 - Arabidopsis
  misc_feature (1)..(230): Homolog of NCBI NO: 14517420 NR Description: AT3g62770/F26K9_200 [Arabidopsis thaliana]
MSLNSDEPNQTSNQSPLSPPTPNLPVMPPPSVLHLSFNQDHACFAVGTDRGFRILNCDPFREIFRRDFDRGGGVAVVEMLFRCNILALVGGGPDPQYPPNKVMIWDDHQGRCIGELSFRSDVRSVRLRRDRIIVVLEQKIFVYNFSDLKLMHQIETIANPKGLCAVSQGVGSMVLVCPGLQKGQVRIEHYASKRTKFVMAHDSRIACFALTQDGHLLATASSKGTLVRIFKCSVVSCLK

SEQ ID NO: 29243 - DNA, 468 bp, Arabidopsis thaliana
  misc_feature (1)..(468): Ceres Seq. ID no. 12397076
  misc_feature: MA Experiment ID: 108461 Result: Up-regulated in Transcription
  misc_feature: MA Experiment 108461 PARAMETER Experiment Name: At_Germinating_Seeds_cDNA_P Parameter: Age (day) Value: 1 vs. 0
  misc_feature: MA Experiment 108461 PARAMETER Experiment Name: At_Germinating_Seeds_cDNA_P Parameter: Tissue Value: Germinating Seeds
  misc_feature: MA Experiment ID: 108462 Result: Up-regulated in Transcription
  misc_feature: MA Experiment 108462 PARAMETER Experiment Name: At_Germinating_Seeds_cDNA_P Parameter: Age (day) Value: 2 vs. 0
  misc_feature: MA Experiment 108462 PARAMETER Experiment Name: At_Germinating_Seeds_cDNA_P Parameter: Tissue Value: Germinating Seeds
  misc_feature: MA Experiment ID: 108464 Result: Up-regulated in Transcription
  misc_feature: MA Experiment 108464 PARAMETER Experiment Name: At_Germinating_Seeds_cDNA_P Parameter: Age (day) Value: 4 vs. 0
  misc_feature: MA Experiment 108464 PARAMETER Experiment Name: At_Germinating_Seeds_cDNA_P Parameter: Tissue Value: Germinating Seeds
  misc_feature: MA Experiment ID: 108488 Result: Up-regulated in Transcription
  misc_feature: MA Experiment ID: 108572 Result: Up-regulated in Transcription
  misc_feature: MA Experiment 108572 PARAMETER Experiment Name: At_Drought_cDNA_P Parameter: Timepoint (hr) Value: 1
  misc_feature: MA Experiment 108572 PARAMETER Experiment Name: At_Drought_cDNA_P Parameter: Tissue Value: Aerial
  misc_feature: MA Experiment 108572 PARAMETER Experiment Name: At_Drought_cDNA_P Parameter: Treatment Value: Drought vs. No Drought
  misc_feature: MA Experiment ID: 108576 Result: Down-regulated in Transcription
  misc_feature: MA Experiment 108576 PARAMETER Experiment Name: At_42deg_Heat_cDNA_P Parameter: Temperature (deg C) Value: 42 vs. 22
  misc_feature: MA Experiment 108576 PARAMETER Experiment Name: At_42deg_Heat_cDNA_P Parameter: Timepoint (hr) Value: 1
  misc_feature: MA Experiment 108576 PARAMETER Experiment Name: At_42deg_Heat_cDNA_P Parameter: Tissue Value: Aerial
  misc_feature: MA Experiment ID: 108577 Result: Down-regulated in Transcription
  misc_feature: MA Experiment 108577 PARAMETER Experiment Name: At_42deg_Heat_cDNA_P Parameter: Temperature (deg C) Value: 42 vs. 22
  misc_feature: MA Experiment 108577 PARAMETER Experiment Name: At_42deg_Heat_cDNA_P Parameter: Timepoint (hr) Value: 6
  misc_feature: MA Experiment 108577 PARAMETER Experiment Name: At_42deg_Heat_cDNA_P Parameter: Tissue Value: Aerial
  misc_feature: MA Experiment ID: 108585 Result: Down-regulated in Transcription
  misc_feature: MA Experiment 108585 PARAMETER Experiment Name: At_5mM_NaNP_cDNA_P Parameter: Timepoint (hr) Value: 6
  misc_feature: MA Experiment 108585 PARAMETER Experiment Name: At_5mM_NaNP_cDNA_P Parameter: Tissue Value: Aerial
  misc_feature: MA Experiment 108585 PARAMETER Experiment Name: At_5mM_NaNP_cDNA_P Parameter: Treatment Value: null
  misc_feature: MA Experiment ID: 108594 Result: Down-regulated in Transcription
  misc_feature: MA Experiment 108594 PARAMETER Experiment Name: At_Ler-rhl_Root_cDNA_P Parameter: Plant Line Value: null
  misc_feature: MA Experiment ID: 108595 Result: Down-regulated in Transcription
  misc_feature: MA Experiment 108595 PARAMETER Experiment Name: At_Ler-pi_Ovule_cDNA_P Parameter: Plant Line Value: null
  misc_feature: MA Experiment ID: 108607 Result: Up-regulated in Transcription
  misc_feature: MA Experiment 108607 PARAMETER Experiment Name: At_100uM_ABA_cDNA_P Parameter: Timepoint (hr) Value: 4
  misc_feature: MA Experiment 108607 PARAMETER Experiment Name: At_100uM_ABA_cDNA_P Parameter: Tissue Value: Aerial
  misc_feature: MA Experiment 108607 PARAMETER Experiment Name: At_100uM_ABA_cDNA_P Parameter: Treatment Value: 100uM ABA vs. No Treatment
  misc_feature: MA Experiment ID: 108668 Result: Down-regulated in Transcription
  misc_feature: MA Experiment 108668 PARAMETER Experiment Name: At_2mM_SA_cDNA_P Parameter: Plant Line Value: WS
  misc_feature: MA Experiment 108668 PARAMETER Experiment Name: At_2mM_SA_cDNA_P Parameter: Timepoint (hr) Value: 6
  misc_feature: MA Experiment 108668 PARAMETER Experiment Name: At_2mM_SA_cDNA_P Parameter: Treatment Value: 2mM SA vs. No Treatment
  misc_feature: MA Experiment ID: 20000112 Result: Down-regulated in Transcription
  misc_feature: MA Experiment 20000112 PARAMETER Experiment Name: At_42deg_Heat_cDNA_P Parameter: Temperature (deg C) Value: 42 vs. 22
  misc_feature: MA Experiment 20000112 PARAMETER Experiment Name: At_42deg_Heat_cDNA_P Parameter: Timepoint (hr) Value: 2
  misc_feature: MA Experiment 20000112 PARAMETER Experiment Name: At_42deg_Heat_cDNA_P Parameter: Tissue Value: Aerial
  misc_feature: MA Experiment ID: 20000113 Result: Down-regulated in Transcription
  misc_feature: MA Experiment 20000113 PARAMETER Experiment Name: At_42deg_Heat_cDNA_P Parameter: Temperature (deg C) Value: 42 vs. 22
  misc_feature: MA Experiment 20000113 PARAMETER Experiment Name: At_42deg_Heat_cDNA_P Parameter: Timepoint (hr) Value: 8
  misc_feature: MA Experiment 20000113 PARAMETER Experiment Name: At_42deg_Heat_cDNA_P Parameter: Tissue Value: Aerial
  misc_feature: MA Experiment ID: 20000144 Result: Down-regulated in Transcription
  misc_feature: MA Experiment 20000144 PARAMETER Experiment Name: At_42deg_Heat_cDNA_P Parameter: Temperature (deg C) Value: 42 vs. 22
  misc_feature: MA Experiment 20000144 PARAMETER Experiment Name: At_42deg_Heat_cDNA_P Parameter: Timepoint (hr) Value: 1
  misc_feature: MA Experiment 20000144 PARAMETER Experiment Name: At_42deg_Heat_cDNA_P Parameter: Tissue Value: Aerial
  misc_feature: MA Experiment ID: 20000171 Result: Down-regulated in Transcription
  misc_feature: MA Experiment 20000171 PARAMETER Experiment Name: At_42deg_Heat_P Parameter: Age (day) Value: 14
  misc_feature: MA Experiment 20000171 PARAMETER Experiment Name: At_42deg_Heat_P Parameter: Organism Value: A. thaliana
  misc_feature: MA Experiment 20000171 PARAMETER Experiment Name: At_42deg_Heat_P Parameter: Plant Line Value: WS
  misc_feature: MA Experiment 20000171 PARAMETER Experiment Name: At_42deg_Heat_P Parameter: Temperature (deg C) Value: 42 vs. 22
  misc_feature: MA Experiment 20000171 PARAMETER Experiment Name: At_42deg_Heat_P Parameter: Timepoint (hr) Value: 1
  misc_feature: MA Experiment 20000171 PARAMETER Experiment Name: At_42deg_Heat_P Parameter: Tissue Value: Aerial
  misc_feature: MA Experiment ID: 20000173 Result: Down-regulated in Transcription
  misc_feature: MA Experiment 20000173 PARAMETER Experiment Name: At_42deg_Heat_P Parameter: Age (day) Value: 14
  misc_feature: MA Experiment 20000173 PARAMETER Experiment Name: At_42deg_Heat_P Parameter: Organism Value: A. thaliana
  misc_feature: MA Experiment 20000173 PARAMETER Experiment Name: At_42deg_Heat_P Parameter: Plant Line Value: WS
  misc_feature: MA Experiment 20000173 PARAMETER Experiment Name: At_42deg_Heat_P Parameter: Temperature (deg C) Value: 42 vs. 22
  misc_feature: MA Experiment 20000173 PARAMETER Experiment Name: At_42deg_Heat_P Parameter: Timepoint (hr) Value: 6
  misc_feature: MA Experiment 20000173 PARAMETER Experiment Name: At_42deg_Heat_P Parameter: Tissue Value: Aerial
  misc_feature: MA Experiment ID: 20000180 Result: Up-regulated in Transcription
  misc_feature: MA Experiment 20000180 PARAMETER Experiment Name: At_Germinating_Seeds_P Parameter: Age (hr) Value: 24 vs. 0
  misc_feature: MA Experiment 20000180 PARAMETER Experiment Name: At_Germinating_Seeds_P Parameter: Tissue Value: Germinating Seeds
  misc_feature: MA Experiment ID: 20000184 Result: Up-regulated in Transcription
  misc_feature: MA Experiment 20000184 PARAMETER Experiment Name: At_Shoots__P Parameter: Age (day) Value: 7
  misc_feature: MA Experiment 20000184 PARAMETER Experiment Name: At_Shoots__P Parameter: Tissue Value: Shoots vs. Whole Plant
  misc_feature: MA Experiment ID: 20000185 Result: Down-regulated in Transcription
  misc_feature: MA Experiment 20000185 PARAMETER Experiment Name: At_Roots__P Parameter: Age (day) Value: 7 vs. 21
  misc_feature: MA Experiment 20000185 PARAMETER Experiment Name: At_Roots__P Parameter: Organism Value: A. thaliana
  misc_feature: MA Experiment 20000185 PARAMETER Experiment Name: At_Roots__P Parameter: Tissue Value: Roots vs. Whole Plant
  misc_feature: MA Experiment ID: 20000224 Result: Down-regulated in Transcription
  misc_feature: MA Experiment ID: 20000234 Result: Up-regulated in Transcription
  misc_feature: MA Experiment 20000234 PARAMETER Experiment Name: At_Siliques_P Parameter: Age (day) Value: 21
  misc_feature: MA Experiment 20000234 PARAMETER Experiment Name: At_Siliques_P Parameter: Organism Value: A. thaliana
  misc_feature: MA Experiment 20000234 PARAMETER Experiment Name: At_Siliques_P Parameter: Plant Line Value: WS
  misc_feature: MA Experiment 20000234 PARAMETER Experiment Name: At_Siliques_P Parameter: Tissue Value: Less Than 5mm Siliques vs. Whole Plant
  misc_feature: MA Experiment ID: 20000286 Result: Up-regulated in Transcription
  misc_feature: MA Experiment 20000286 PARAMETER Experiment Name: At_Open_Flower_P Parameter: Age (day) Value: 21
  misc_feature: MA Experiment 20000286 PARAMETER Experiment Name: At_Open_Flower_P Parameter: Plant Line Value: WS
  misc_feature: MA Experiment 20000286 PARAMETER Experiment Name: At_Open_Flower_P Parameter: Tissue Value: Half Open vs. Whole Plant
  misc_feature: MA Experiment ID: 20000438 Result: Up-regulated in Transcription
  misc_feature: MA Experiment 20000438 PARAMETER Experiment Name: At_Shoots__P Parameter: Age (day) Value: 14
  misc_feature: MA Experiment 20000438 PARAMETER Experiment Name: At_Shoots__P Parameter: Tissue Value: Shoots vs. Whole Plant
  misc_feature: MA Experiment ID: 20000439 Result: Down-regulated in Transcription
  misc_feature: MA Experiment 20000439 PARAMETER Experiment Name: At_Roots__P Parameter: Age (day) Value: 14 vs. 21
  misc_feature: MA Experiment 20000439 PARAMETER Experiment Name: At_Roots__P Parameter: Organism Value: A. thaliana
  misc_feature: MA Experiment 20000439 PARAMETER Experiment Name: At_Roots__P Parameter: Tissue Value: Roots vs. Whole Plant
  misc_feature: MA Experiment ID: 20000451 Result: Up-regulated in Transcription
  misc_feature: MA Experiment 20000451 PARAMETER Experiment Name: At_CS6879_Shoots-Roots_P Parameter: Age (day) Value: 14
  misc_feature: MA Experiment 20000451 PARAMETER Experiment Name: At_CS6879_Shoots-Roots_P Parameter: Organism Value: A. thaliana
  misc_feature: MA Experiment 20000451 PARAMETER Experiment Name: At_CS6879_Shoots-Roots_P Parameter: Plant Line Value: CS6879 vs. WS
  misc_feature: MA Experiment 20000451 PARAMETER Experiment Name: At_CS6879_Shoots-Roots_P Parameter: Tissue Value: Roots
  misc_feature: MA Experiment ID: 20000573 Result: Down-regulated in Transcription
  misc_feature: MA Experiment 20000573 PARAMETER Experiment Name: At_100uM_ABA_Mutants__P Parameter: Organism Value: A. thaliana
  misc_feature: MA Experiment 20000573 PARAMETER Experiment Name: At_100uM_ABA_Mutants__P Parameter: Plant Line Value: CS22 vs. Ler wt
  misc_feature: MA Experiment 20000573 PARAMETER Experiment Name: At_100uM_ABA_Mutants__P Parameter: Timepoint (hr) Value: N/A
  misc_feature: MA Experiment 20000573 PARAMETER Experiment Name: At_100uM_ABA_Mutants__P Parameter: Tissue Value: Whole Plant
  misc_feature: MA Experiment 20000573 PARAMETER Experiment Name: At_100uM_ABA_Mutants__P Parameter: Treatment Value: None
  misc_feature: MA Experiment ID: 20000574 Result: Down-regulated in Transcription
  misc_feature: MA Experiment 20000574 PARAMETER Experiment Name: At_100uM_ABA_Mutants__P Parameter: Organism Value: A. thaliana
  misc_feature: MA Experiment 20000574 PARAMETER Experiment Name: At_100uM_ABA_Mutants__P Parameter: Plant Line Value: CS23 vs. Ler wt
  misc_feature: MA Experiment 20000574 PARAMETER Experiment Name: At_100uM_ABA_Mutants__P Parameter: Timepoint (hr) Value: N/A
  misc_feature: MA Experiment 20000574 PARAMETER Experiment Name: At_100uM_ABA_Mutants__P Parameter: Tissue Value: Whole Plant
  misc_feature: MA Experiment 20000574 PARAMETER Experiment Name: At_100uM_ABA_Mutants__P Parameter: Treatment Value: None
  misc_feature: MA Experiment ID: 20001248 Result: Down-regulated in Transcription
  misc_feature: MA Experiment 20001248 PARAMETER Experiment Name: At_Far-red-induction_P Parameter: Age (day) Value: 7
  misc_feature: MA Experiment 20001248 PARAMETER Experiment Name: At_Far-red-induction_P Parameter: Light Value: Far-red vs. White
  misc_feature: MA Experiment 20001248 PARAMETER Experiment Name: At_Far-red-induction_P Parameter: Organism Value: A. thaliana
  misc_feature: MA Experiment 20001248 PARAMETER Experiment Name: At_Far-red-induction_P Parameter: Plant Line Value: Columbia
  misc_feature: MA Experiment 20001248 PARAMETER Experiment Name: At_Far-red-induction_P Parameter: Timepoint (hr) Value: 4
  misc_feature: MA Experiment 20001248 PARAMETER Experiment Name: At_Far-red-induction_P Parameter: Tissue Value: Whole Plant
  misc_feature: MA Experiment ID: 20001558 Result: Up-regulated in Transcription
  misc_feature: MA Experiment 20001558 PARAMETER Experiment Name: At_Drought_Soil_Dry_P Parameter: Age (day) Value: 27
  misc_feature: MA Experiment 20001558 PARAMETER Experiment Name: At_Drought_Soil_Dry_P Parameter: Organism Value: A. thaliana
  misc_feature: MA Experiment 20001558 PARAMETER Experiment Name: At_Drought_Soil_Dry_P Parameter: Plant Line Value: WS
  misc_feature: MA Experiment 20001558 PARAMETER Experiment Name: At_Drought_Soil_Dry_P Parameter: Post Timepoint (hr) Value: 6
  misc_feature: MA Experiment 20001558 PARAMETER Experiment Name: At_Drought_Soil_Dry_P Parameter: Post-Treatment Value: Re-Water vs. No Drought
  misc_feature: MA Experiment 20001558 PARAMETER Experiment Name: At_Drought_Soil_Dry_P Parameter: Timepoint (day) Value: 13
  misc_feature: MA Experiment 20001558 PARAMETER Experiment Name: At_Drought_Soil_Dry_P Parameter: Treatment Value: Drought vs. No Drought
  misc_feature: MA Experiment ID: 20001906 Result: Down-regulated in Transcription
  misc_feature: MA Experiment 20001906 PARAMETER Experiment Name: At_Drought_Reproduction_P Parameter: Age (day) Value: 35
  misc_feature: MA Experiment 20001906 PARAMETER Experiment Name: At_Drought_Reproduction_P Parameter: Organism Value: A. thaliana
  misc_feature: MA Experiment 20001906 PARAMETER Experiment Name: At_Drought_Reproduction_P Parameter: Plant Line Value: WS
  misc_feature: MA Experiment 20001906 PARAMETER Experiment Name: At_Drought_Reproduction_P Parameter: Timepoint (day) Value: 5
  misc_feature: MA Experiment 20001906 PARAMETER Experiment Name: At_Drought_Reproduction_P Parameter: Tissue Value: Siliques
  misc_feature: MA Experiment 20001906 PARAMETER Experiment Name: At_Drought_Reproduction_P Parameter: Treatment Value: Drought vs. No Drought
  misc_feature: MA Experiment ID: 20001908 Result: Down-regulated in Transcription
  misc_feature: MA Experiment 20001908 PARAMETER Experiment Name: At_Drought_Reproduction_P Parameter: Age (day) Value: 40
  misc_feature: MA Experiment 20001908 PARAMETER Experiment Name: At_Drought_Reproduction_P Parameter: Organism Value: A. thaliana
  misc_feature: MA Experiment 20001908 PARAMETER Experiment Name: At_Drought_Reproduction_P Parameter: Plant Line Value: WS
  misc_feature: MA Experiment 20001908 PARAMETER Experiment Name: At_Drought_Reproduction_P Parameter: Timepoint (day) Value: 10
  misc_feature: MA Experiment 20001908 PARAMETER Experiment Name: At_Drought_Reproduction_P Parameter: Tissue Value: Siliques
  misc_feature: MA Experiment 20001908 PARAMETER Experiment Name: At_Drought_Reproduction_P Parameter: Treatment Value: Drought vs. No Drought
  misc_feature: MA Experiment ID: 20001911 Result: Down-regulated in Transcription
  misc_feature: MA Experiment 20001911 PARAMETER Experiment Name: At_Drought_Reproduction_P Parameter: Age (day) Value: 40
  misc_feature: MA Experiment 20001911 PARAMETER Experiment Name: At_Drought_Reproduction_P Parameter: Organism Value: A. thaliana
  misc_feature: MA Experiment 20001911 PARAMETER Experiment Name: At_Drought_Reproduction_P Parameter: Plant Line Value: WS
  misc_feature: MA Experiment 20001911 PARAMETER Experiment Name: At_Drought_Reproduction_P Parameter: Timepoint (day) Value: 10
  misc_feature: MA Experiment 20001911 PARAMETER Experiment Name: At_Drought_Reproduction_P Parameter: Tissue Value: Flowers
  misc_feature: MA Experiment 20001911 PARAMETER Experiment Name: At_Drought_Reproduction_P Parameter: Treatment Value: Drought vs. No Drought
aagactcaacacagatgctcaaaactttaacaagaagcttaacgctgctgcttcaaagcttcagaagcaatattccgatcttaagattgttgtcttcgacatctactctccactttatgatcttgttcagaacccttccaaatccggattcacggaagcaaccaaaggatgttgtggaacaggaacagtcgagacaacttcactcttgtgcaacccgaaatcgtttgggacatgctccaatgctactcagtatgtgttctgggacagtgtgcatccttctgaagctgccaatgagattcttgccactgccctaattggacagggcttttctctcctcggttgatctcacgtatttatcttatattctcttttcaaatcgctgtttctatcacacatgagtcatacatttgtttttctttgaattatgtatcaaagcatcactgttttactaaaaatgtattgaaactt

SEQ ID NO: 29244 - protein, 113 aa, Arabidopsis thaliana
  peptide (1)..(113): Ceres Seq. ID no. 12397077
  misc_feature (1)..(104): Pfam Name: GDSL-like Lipase/Acylhydrolase Pfam Description: GDSL-like Lipase/Acylhydrolase
  misc_feature (1)..(105): Homolog of NCBI NO: 28393626 NR Description: putative family II extracellular lipase 1 (EXL1)
  misc_feature (1)..(112): Homolog of NCBI NO: 15237528 NR Description: putative protein; protein id: At5g03810.1
  misc_feature (1)..(112): Homolog of NCBI NO: 9758010 NR Description: proline-rich protein APG-like [Arabidopsis
  misc_feature (1)..(112): Homolog of NCBI NO: 30693763 NR Description: GDSL-motif lipase/hydrolase protein [Arabidopsis
  misc_feature (1)..(112): Homolog of NCBI NO: 15237531 NR Description: putative protein; protein id: At5g03820.1
  misc_feature (1)..(112): Homolog of NCBI NO: 15237137 NR Description: GDSL-motif lipase/hydrolase-like protein; protein
  misc_feature (1)..(112): Homolog of NCBI NO: 13174242 NR Description: putative proline-rich protein [Oryza sativa]
  misc_feature (1)..(112): Homolog of NCBI NO: 10638955 NR Description: putative proline-rich protein APG isolog [Cicer
  misc_feature (1)..(113): Homolog of NCBI NO: 15228189 NR Description: putative APG protein
  misc_feature (1)..(113): Homolog of NCBI NO: 2062167 NR Description: Proline-rich protein APG isolog [Arabidopsis
RLNTDAQNFNKKLNAAASKLQKQYSDLKIVVFDIYSPLYDLVQNPSKSGFTEATKGCCGTGTVETTSLLCNPKSFGTCSNATQYVFWDSVHPSEAANEILATALIGQGFSLLG

SEQ ID NO: 29245 - protein, 103 aa, Arabidopsis thaliana
  peptide (1)..(103): Ceres Seq. ID no. 12397078
DSTQMLKTLTRSLTLLLQSFRSNIPILRLLSSTSTLHFMILFRTLPNPDSRKQPKDVVEQEQSRQLHSCATRNRLGHAPMLLSMCSGTVCILLKLPMRFLPLP

SEQ ID NO: 29246 - protein, 99 aa, Arabidopsis thaliana
  peptide (1)..(99): Ceres Seq. ID no. 12397079
MLKTLTRSLTLLLQSFRSNIPILRLLSSTSTLHFMILFRTLPNPDSRKQPKDVVEQEQSRQLHSCATRNRLGHAPMLLSMCSGTVCILLKLPMRFLPLP

SEQ ID NO: 29247 - DNA, 726 bp, Arabidopsis thaliana
  misc_feature (1)..(726): Ceres Seq. ID no. 12372146
  misc_feature: MA Experiment ID: 108462 Result: Down-regulated in Transcription
  misc_feature: MA Experiment 108462 PARAMETER Experiment Name: At_Germinating_Seeds_cDNA_P Parameter: Age (day) Value: 2 vs. 0
  misc_feature: MA Experiment 108462 PARAMETER Experiment Name: At_Germinating_Seeds_cDNA_P Parameter: Tissue Value: Germinating Seeds
  misc_feature: MA Experiment ID: 108463 Result: Down-regulated in Transcription
  misc_feature: MA Experiment 108463 PARAMETER Experiment Name: At_Germinating_Seeds_cDNA_P Parameter: Age (day) Value: 3 vs. 0
  misc_feature: MA Experiment 108463 PARAMETER Experiment Name: At_Germinating_Seeds_cDNA_P Parameter: Tissue Value: Germinating Seeds
  misc_feature: MA Experiment ID: 108464 Result: Down-regulated in Transcription
  misc_feature: MA Experiment 108464 PARAMETER Experiment Name: At_Germinating_Seeds_cDNA_P Parameter: Age (day) Value: 4 vs. 0
  misc_feature: MA Experiment 108464 PARAMETER Experiment Name: At_Germinating_Seeds_cDNA_P Parameter: Tissue Value: Germinating Seeds
  misc_feature: MA Experiment ID: 108605 Result: Down-regulated in Transcription
  misc_feature: MA Experiment 108605 PARAMETER Experiment Name: At_100uM_ABA_cDNA_P Parameter: Timepoint (hr) Value: 6
  misc_feature: MA Experiment 108605 PARAMETER Experiment Name: At_100uM_ABA_cDNA_P Parameter: Tissue Value: Aerial
  misc_feature: MA Experiment 108605 PARAMETER Experiment Name: At_100uM_ABA_cDNA_P Parameter: Treatment Value: 100uM ABA vs. No Treatment
  misc_feature: MA Experiment ID: 108607 Result: Down-regulated in Transcription
  misc_feature: MA Experiment 108607 PARAMETER Experiment Name: At_100uM_ABA_cDNA_P Parameter: Timepoint (hr) Value: 4
  misc_feature: MA Experiment 108607 PARAMETER Experiment Name: At_100uM_ABA_cDNA_P Parameter: Tissue Value: Aerial
  misc_feature: MA Experiment 108607 PARAMETER Experiment Name: At_100uM_ABA_cDNA_P Parameter: Treatment Value: 100uM ABA vs. No Treatment
  misc_feature: MA Experiment ID: 108609 Result: Down-regulated in Transcription
  misc_feature: MA Experiment 108609 PARAMETER Experiment Name: At_100uM_ABA_cDNA_P Parameter: Timepoint (hr) Value: 24
  misc_feature: MA Experiment 108609 PARAMETER Experiment Name: At_100uM_ABA_cDNA_P Parameter: Tissue Value: Aerial
  misc_feature: MA Experiment 108609 PARAMETER Experiment Name: At_100uM_ABA_cDNA_P Parameter: Treatment Value: 100uM ABA vs. No Treatment
  misc_feature: MA Experiment ID: 20000069 Result: Up-regulated in Transcription
  misc_feature: MA Experiment 20000069 PARAMETER Experiment Name: At_100uM_ABA_Mutants_cDNA_P Parameter: Plant Line Value: CS23
  misc_feature: MA Experiment 20000069 PARAMETER Experiment Name: At_100uM_ABA_Mutants_cDNA_P Parameter: Timepoint (hr) Value: 6
  misc_feature: MA Experiment 20000069 PARAMETER Experiment Name: At_100uM_ABA_Mutants_cDNA_P Parameter: Tissue Value: Aerial
  misc_feature: MA Experiment 20000069 PARAMETER Experiment Name: At_100uM_ABA_Mutants_cDNA_P Parameter: Treatment Value: 100uM ABA vs. No Treatment
  misc_feature: MA Experiment ID: 20000070 Result: Up-regulated in Transcription
  misc_feature: MA Experiment 20000070 PARAMETER Experiment Name: At_100uM_ABA_Mutants_cDNA_P Parameter: Plant Line Value: CS24
  misc_feature: MA Experiment 20000070 PARAMETER Experiment Name: At_100uM_ABA_Mutants_cDNA_P Parameter: Timepoint (hr) Value: 6
  misc_feature: MA Experiment 20000070 PARAMETER Experiment Name: At_100uM_ABA_Mutants_cDNA_P Parameter: Tissue Value: Aerial
  misc_feature: MA Experiment 20000070 PARAMETER Experiment Name: At_100uM_ABA_Mutants_cDNA_P Parameter: Treatment Value: 100uM ABA vs. No Treatment
  misc_feature: MA Experiment ID: 20000072 Result: Up-regulated in Transcription
  misc_feature: MA Experiment 20000072 PARAMETER Experiment Name: At_100uM_ABA_Mutants_cDNA_P Parameter: Plant Line Value: CS8105
  misc_feature: MA Experiment 20000072 PARAMETER Experiment Name: At_100uM_ABA_Mutants_cDNA_P Parameter: Timepoint (hr) Value: 6
  misc_feature: MA Experiment 20000072 PARAMETER Experiment Name: At_100uM_ABA_Mutants_cDNA_P Parameter: Tissue Value: Aerial
  misc_feature: MA Experiment 20000072 PARAMETER Experiment Name: At_100uM_ABA_Mutants_cDNA_P Parameter: Treatment Value: 100uM ABA vs. No Treatment
  misc_feature: MA Experiment ID: 20000086 Result: Up-regulated in Transcription
  misc_feature: MA Experiment 20000086 PARAMETER Experiment Name: At_100uM_ABA_Mutants_cDNA_P Parameter: Plant Line Value: CS22
  misc_feature: MA Experiment 20000086 PARAMETER Experiment Name: At_100uM_ABA_Mutants_cDNA_P Parameter: Timepoint (hr) Value: 6
  misc_feature: MA Experiment 20000086 PARAMETER Experiment Name: At_100uM_ABA_Mutants_cDNA_P Parameter: Tissue Value: Aerial
  misc_feature: MA Experiment 20000086 PARAMETER Experiment Name: At_100uM_ABA_Mutants_cDNA_P Parameter: Treatment Value: 100uM ABA vs. No Treatment
  misc_feature: MA Experiment ID: 20000087 Result: Up-regulated in Transcription
  misc_feature: MA Experiment 20000087 PARAMETER Experiment Name: At_100uM_ABA_Mutants_cDNA_P Parameter: Plant Line Value: WS
  misc_feature: MA Experiment 20000087 PARAMETER Experiment Name: At_100uM_ABA_Mutants_cDNA_P Parameter: Timepoint (hr) Value: 6
  misc_feature: MA Experiment 20000087 PARAMETER Experiment Name: At_100uM_ABA_Mutants_cDNA_P Parameter: Tissue Value: Aerial
  misc_feature: MA Experiment 20000087 PARAMETER Experiment Name: At_100uM_ABA_Mutants_cDNA_P Parameter: Treatment Value: 100uM ABA vs. No Treatment
  misc_feature: MA Experiment ID: 20000088 Result: Up-regulated in Transcription
  misc_feature: MA Experiment 20000088 PARAMETER Experiment Name: At_100uM_ABA_Mutants_cDNA_P Parameter: Plant Line Value: Landsberg
  misc_feature: MA Experiment 20000088 PARAMETER Experiment Name: At_100uM_ABA_Mutants_cDNA_P Parameter: Timepoint (hr) Value: 6
  misc_feature: MA Experiment 20000088 PARAMETER Experiment Name: At_100uM_ABA_Mutants_cDNA_P Parameter: Tissue Value: Aerial
  misc_feature: MA Experiment 20000088 PARAMETER Experiment Name: At_100uM_ABA_Mutants_cDNA_P Parameter: Treatment Value: 100uM ABA vs. No Treatment
  misc_feature: MA Experiment ID: 20000089 Result: Up-regulated in Transcription
  misc_feature: MA Experiment ID: 20000090 Result: Up-regulated in Transcription
  misc_feature: MA Experiment ID: 20000111 Result: Down-regulated in Transcription
  misc_feature: MA Experiment 20000111 PARAMETER Experiment Name: At_42deg_Heat_cDNA_P Parameter: Temperature (deg C) Value: 42 vs. 22
  misc_feature: MA Experiment 20000111 PARAMETER Experiment Name: At_42deg_Heat_cDNA_P Parameter: Timepoint (hr) Value: 6
  misc_feature: MA Experiment 20000111 PARAMETER Experiment Name: At_42deg_Heat_cDNA_P Parameter: Tissue Value: Aerial
  misc_feature: MA Experiment ID: 20000112 Result: Down-regulated in Transcription
  misc_feature: MA Experiment 20000112 PARAMETER Experiment Name: At_42deg_Heat_cDNA_P Parameter: Temperature (deg C) Value: 42 vs. 22
  misc_feature: MA Experiment 20000112 PARAMETER Experiment Name: At_42deg_Heat_cDNA_P Parameter: Timepoint (hr) Value: 2
  misc_feature: MA Experiment 20000112 PARAMETER Experiment Name: At_42deg_Heat_cDNA_P Parameter: Tissue Value: Aerial
  misc_feature: MA Experiment ID: 20000117 Result: Up-regulated in Transcription
  misc_feature: MA Experiment 20000117 PARAMETER Experiment Name: At_100uM_ABA_Mutants_cDNA_P Parameter: Plant Line Value: Columbia
  misc_feature: MA Experiment 20000117 PARAMETER Experiment Name: At_100uM_ABA_Mutants_cDNA_P Parameter: Timepoint (hr) Value: 6
  misc_feature: MA Experiment 20000117 PARAMETER Experiment Name: At_100uM_ABA_Mutants_cDNA_P Parameter: Tissue Value: Aerial
  misc_feature: MA Experiment 20000117 PARAMETER Experiment Name: At_100uM_ABA_Mutants_cDNA_P Parameter: Treatment Value: 100uM ABA vs. No Treatment
  misc_feature: MA Experiment ID: 20000173 Result: Down-regulated in Transcription
  misc_feature: MA Experiment 20000173 PARAMETER Experiment Name: At_42deg_Heat_P Parameter: Age (day) Value: 14
  misc_feature: MA Experiment 20000173 PARAMETER Experiment Name: At_42deg_Heat_P Parameter: Organism Value: A. thaliana
  misc_feature: MA Experiment 20000173 PARAMETER Experiment Name: At_42deg_Heat_P Parameter: Plant Line Value: WS
  misc_feature: MA Experiment 20000173 PARAMETER Experiment Name: At_42deg_Heat_P Parameter: Temperature (deg C) Value: 42 vs. 22
  misc_feature: MA Experiment 20000173 PARAMETER Experiment Name: At_42deg_Heat_P Parameter: Timepoint (hr) Value: 6
  misc_feature: MA Experiment 20000173 PARAMETER Experiment Name: At_42deg_Heat_P Parameter: Tissue Value: Aerial
  misc_feature: MA Experiment ID: 20000213 Result: Up-regulated in Transcription
  misc_feature: MA Experiment 20000213 PARAMETER Experiment Name: At_4deg_Cold_P Parameter: Timepoint (hr) Value: 2
  misc_feature: MA Experiment ID: 20000453 Result: Down-regulated in Transcription
  misc_feature: MA Experiment 20000453 PARAMETER Experiment Name: At_100uM_ABA_P Parameter: Age (day) Value: 15
  misc_feature: MA Experiment 20000453 PARAMETER Experiment Name: At_100uM_ABA_P Parameter: Organism Value: A. thaliana
  misc_feature: MA Experiment 20000453 PARAMETER Experiment Name: At_100uM_ABA_P Parameter: Plant Line Value: WS
  misc_feature: MA Experiment 20000453 PARAMETER Experiment Name: At_100uM_ABA_P Parameter: Timepoint (hr) Value: 24
  misc_feature: MA Experiment 20000453 PARAMETER Experiment Name: At_100uM_ABA_P Parameter: Tissue Value: Aerial
  misc_feature: MA Experiment 20000453 PARAMETER Experiment Name: At_100uM_ABA_P Parameter: Treatment Value: 100uM ABA vs. No Treatment
  misc_feature: MA Experiment ID: 20001247 Result: Down-regulated in Transcription
  misc_feature: MA Experiment 20001247 PARAMETER Experiment Name: At_Far-red-induction_P Parameter: Age (day) Value: 7
  misc_feature: MA Experiment 20001247 PARAMETER Experiment Name: At_Far-red-induction_P Parameter: Light Value: Far-red vs. White
  misc_feature: MA Experiment 20001247 PARAMETER Experiment Name: At_Far-red-induction_P Parameter: Organism Value: A. thaliana
  misc_feature: MA Experiment 20001247 PARAMETER Experiment Name: At_Far-red-induction_P Parameter: Plant Line Value: Columbia
  misc_feature: MA Experiment 20001247 PARAMETER Experiment Name: At_Far-red-induction_P Parameter: Timepoint (hr) Value: 1
  misc_feature: MA Experiment 20001247 PARAMETER Experiment Name: At_Far-red-induction_P Parameter: Tissue Value: Whole Plant
  misc_feature: MA Experiment ID: 20001248 Result: Up-regulated in Transcription
  misc_feature: MA Experiment 20001248 PARAMETER Experiment Name: At_Far-red-induction_P Parameter: Age (day) Value: 7
  misc_feature: MA Experiment 20001248 PARAMETER Experiment Name: At_Far-red-induction_P Parameter: Light Value: Far-red vs. White
  misc_feature: MA Experiment 20001248 PARAMETER Experiment Name: At_Far-red-induction_P Parameter: Organism Value: A. thaliana
  misc_feature: MA Experiment 20001248 PARAMETER Experiment Name: At_Far-red-induction_P Parameter: Plant Line Value: Columbia
  misc_feature: MA Experiment 20001248 PARAMETER Experiment Name: At_Far-red-induction_P Parameter: Timepoint (hr) Value: 4
  misc_feature: MA Experiment 20001248 PARAMETER Experiment Name: At_Far-red-induction_P Parameter: Tissue Value: Whole Plant
  misc_feature: MA Experiment ID: 20001557 Result: Up-regulated in Transcription
  misc_feature: MA Experiment 20001557 PARAMETER Experiment Name: At_Drought_Soil_Dry_P Parameter: Age (day) Value: 27
  misc_feature: MA Experiment 20001557 PARAMETER Experiment Name: At_Drought_Soil_Dry_P Parameter: Organism Value: A. thaliana
  misc_feature: MA Experiment 20001557 PARAMETER Experiment Name: At_Drought_Soil_Dry_P Parameter: Plant Line Value: WS
  misc_feature: MA Experiment 20001557 PARAMETER Experiment Name: At_Drought_Soil_Dry_P Parameter: Post Timepoint (hr) Value: 3
  misc_feature: MA Experiment 20001557 PARAMETER Experiment Name: At_Drought_Soil_Dry_P Parameter: Post-Treatment Value: Re-Water vs. No Drought
  misc_feature: MA Experiment 20001557 PARAMETER Experiment Name: At_Drought_Soil_Dry_P Parameter: Timepoint (day) Value: 13
  misc_feature: MA Experiment 20001557 PARAMETER Experiment Name: At_Drought_Soil_Dry_P Parameter: Treatment Value: Drought vs. No Drought
aacataagtctctctcttacattttgaaaccctaatttctcaaaaaaaatgtctgaagttgagtaccggtgctttgtcggcggccttgcctgggccaccaatgatgaagatcttcaaaggacgttctcacagttcggcgacgttatcgattctaagatcattaacgaccgcgagagtggaagatcaaggggattcggattcgtcaccttcaaggacgagaaagccatgagggatgcgattgaagagatgaacggtaaagagctcgatggacgtgtcatcaccgtgaacgaggctcagtcgagaggtagcggcggtggcggaggaggccgtggtggaagcggtggtggttaccgcagcggaggcggtggtggatactcaggaggcggtggcggcggatactcaggaggaggcggtggtggttacgagagacgtagcggaggttacggatctggtggaggcggtggtggccgaggatacggtggtggtggacgccgtgagggaggtggctacggaggcggtgatggtggaagttacggaggcggtggtggcggctggtaatcaaagatagagttgtttgcgtgctgctgctctgtttttggtttagatttggatttgtgtcaccacttctggtttggttatcgttcgtttggtttacttttttgatgaaacagtttcgtttaagtcttctttgtctggatcgaaatgttaattcgcgtgttgtttacc

SEQ ID NO: 29248 - protein, 169 aa, Arabidopsis thaliana; identical to SEQ ID NO: 22059
  peptide (1)..(169): Ceres Seq. ID no. 12372147
  misc_feature (8)..(79): Pfam Name: RNA recognition motif. (a.k.a. RRM, RBD, or RNP domain) Pfam Description: RNA recognition motif. (a.k.a. RRM, RBD, or RNP
  misc_feature (3)..(169): Homolog of NCBI NO: 30681492 NR Description: glycine-rich RNA-binding protein (AtGRP7)
  misc_feature (2)..(168): Homolog of NCBI NO: 34851124 NR Description: putative glycine-rich RNA-binding protein [Prunus
  misc_feature (1)..(161): Homolog of NCBI NO: 544426 NR Description: Glycine-rich RNA-binding protein
  misc_feature (1)..(124): Homolog of NCBI NO: 30692254 NR Description: glycine-rich RNA-binding protein 8 (GRP8) (CCR1)
  misc_feature (3)..(169): Homolog of NCBI NO: 1346180 NR Description: Glycine-rich RNA-binding protein GRP1A
  misc_feature (3)..(169): Homolog of NCBI NO: 21553354 NR Description: glycine-rich RNA binding protein 7 [Arabidopsis
  misc_feature (3)..(169): Homolog of NCBI NO: 1346181 NR Description: Glycine-rich RNA-binding protein GRP2A
  misc_feature (1)..(169): Homolog of NCBI NO: 544416 NR Description: Glycine-rich RNA-binding protein 10
  misc_feature (3)..(169): Homolog of NCBI NO: 15226605 NR Description: glycine-rich RNA binding protein AtGRP7
  misc_feature (1)..(169): Homolog of NCBI NO: 15235002 NR Description: glycine-rich RNA-binding protein 8 (GRP8)

SEQ ID NO: 29249 - protein, 110 aa, Arabidopsis thaliana; identical to SEQ ID NO: 22060
  peptide (1)..(110): Ceres Seq. ID no. 12372148
  misc_feature (30)..(109): Pfam Name: Herpesvirus large structural phosphoprotein UL32 Pfam Description: Herpesvirus large structural phosphoprotein UL32
  misc_feature (1)..(110): Homolog of NCBI NO: 30681492 NR Description: glycine-rich RNA-binding protein (AtGRP7)
  misc_feature (1)..(109): Homolog of NCBI NO: 34851124 NR Description: putative glycine-rich RNA-binding protein [Prunus
  misc_feature (1)..(102): Homolog of NCBI NO: 544426 NR Description: Glycine-rich RNA-binding protein
  misc_feature (1)..(65): Homolog of NCBI NO: 30692254 NR Description: glycine-rich RNA-binding protein 8 (GRP8) (CCR1)
  misc_feature (1)..(110): Homolog of NCBI NO: 1346180 NR Description: Glycine-rich RNA-binding protein GRP1A
  misc_feature (1)..(110): Homolog of NCBI NO: 21553354 NR Description: glycine-rich RNA binding protein 7 [Arabidopsis
  misc_feature (1)..(110): Homolog of NCBI NO: 1346181 NR Description: Glycine-rich RNA-binding protein GRP2A
  misc_feature (1)..(110): Homolog of NCBI NO: 544416 NR Description: Glycine-rich RNA-binding protein 10
  misc_feature (1)..(110): Homolog of NCBI NO: 15226605 NR Description: glycine-rich RNA binding protein AtGRP7
  misc_feature (1)..(110): Homolog of NCBI NO: 15235002 NR Description: glycine-rich RNA-binding protein 8 (GRP8)

SEQ ID NO: 29250 - protein, 103 aa, Arabidopsis thaliana; identical to SEQ ID NO: 22061
  peptide (1)..(103): Ceres Seq. ID no. 12372149
  misc_feature (23)..(102): Pfam Name: Herpesvirus large structural phosphoprotein UL32 Pfam Description: Herpesvirus large structural phosphoprotein UL32
  misc_feature (1)..(103): Homolog of NCBI NO: 30681492 NR Description: glycine-rich RNA-binding protein (AtGRP7)
  misc_feature (1)..(102): Homolog of NCBI NO: 34851124 NR Description: putative glycine-rich RNA-binding protein [Prunus
  misc_feature (1)..(95): Homolog of NCBI NO: 544426 NR Description: Glycine-rich RNA-binding protein
  misc_feature (1)..(58): Homolog of NCBI NO: 30692254 NR Description: glycine-rich RNA-binding protein 8 (GRP8) (CCR1)
  misc_feature (1)..(103): Homolog of NCBI NO: 1346180 NR Description: Glycine-rich RNA-binding protein GRP1A
  misc_feature (1)..(103): Homolog of NCBI NO: 21553354 NR Description: glycine-rich RNA binding protein 7 [Arabidopsis
  misc_feature (1)..(103): Homolog of NCBI NO: 1346181 NR Description: Glycine-rich RNA-binding protein GRP2A
  misc_feature (1)..(103): Homolog of NCBI NO: 544416 NR Description: Glycine-rich RNA-binding protein 10
  misc_feature (1)..(103): Homolog of NCBI NO: 15226605 NR Description: glycine-rich RNA binding protein AtGRP7
  misc_feature (1)..(103): Homolog of NCBI NO: 15235002 NR Description: glycine-rich RNA-binding protein 8 (GRP8)

SEQ ID NO: 29251 - DNA, 671 bp, Arabidopsis thaliana
  misc_feature (1)..(671): Ceres Seq. ID no. 12561505
  misc_feature: MA Experiment ID: 20000113 Result: Up-regulated in Transcription
  misc_feature: MA Experiment 20000113 PARAMETER Experiment Name: At_42deg_Heat_cDNA_P Parameter: Temperature (deg C) Value: 42 vs. 22
  misc_feature: MA Experiment 20000113 PARAMETER Experiment Name: At_42deg_Heat_cDNA_P Parameter: Timepoint (hr) Value: 8
  misc_feature: MA Experiment 20000113 PARAMETER Experiment Name: At_42deg_Heat_cDNA_P Parameter: Tissue Value: Aerial
  misc_feature: MA Experiment ID: 20000185 Result: Down-regulated in Transcription
  misc_feature: MA Experiment 20000185 PARAMETER Experiment Name: At_Roots__P Parameter: Age (day) Value: 7 vs. 21
  misc_feature: MA Experiment 20000185 PARAMETER Experiment Name: At_Roots__P Parameter: Organism Value: A. thaliana
  misc_feature: MA Experiment 20000185 PARAMETER Experiment Name: At_Roots__P Parameter: Tissue Value: Roots vs. Whole Plant
  misc_feature: MA Experiment ID: 20000234 Result: Down-regulated in Transcription
  misc_feature: MA Experiment 20000234 PARAMETER Experiment Name: At_Siliques_P Parameter: Age (day) Value: 21
  misc_feature: MA Experiment 20000234 PARAMETER Experiment Name: At_Siliques_P Parameter: Organism Value: A. thaliana
  misc_feature: MA Experiment 20000234 PARAMETER Experiment Name: At_Siliques_P Parameter: Plant Line Value: WS
  misc_feature: MA Experiment 20000234 PARAMETER Experiment Name: At_Siliques_P Parameter: Tissue Value: Less Than 5mm Siliques vs. Whole Plant
  misc_feature: MA Experiment ID: 20000235 Result: Down-regulated in Transcription
  misc_feature: MA Experiment 20000235 PARAMETER Experiment Name: At_Siliques_P Parameter: Age (day) Value: 21
  misc_feature: MA Experiment 20000235 PARAMETER Experiment Name: At_Siliques_P Parameter: Organism Value: A. thaliana
  misc_feature: MA Experiment 20000235 PARAMETER Experiment Name: At_Siliques_P Parameter: Plant Line Value: WS
  misc_feature: MA Experiment 20000235 PARAMETER Experiment Name: At_Siliques_P Parameter: Tissue Value: 5-10mm Siliques vs. Whole Plant
  misc_feature: MA Experiment ID: 20000264 Result: Down-regulated in Transcription
  misc_feature: MA Experiment 20000264 PARAMETER Experiment Name: At_Open_Flower_P Parameter: Age (day) Value: 21
  misc_feature: MA Experiment 20000264 PARAMETER Experiment Name: At_Open_Flower_P Parameter: Plant Line Value: WS
  misc_feature: MA Experiment 20000264 PARAMETER Experiment Name: At_Open_Flower_P Parameter: Tissue Value: Open Flower vs. Whole Plant
  misc_feature: MA Experiment ID: 20000265 Result: Down-regulated in Transcription
  misc_feature: MA Experiment 20000265 PARAMETER Experiment Name: At_Open_Flower_P Parameter: Age (day) Value: 21
  misc_feature: MA Experiment 20000265 PARAMETER Experiment Name: At_Open_Flower_P Parameter: Plant Line Value: WS
  misc_feature: MA Experiment 20000265 PARAMETER Experiment Name: At_Open_Flower_P Parameter: Tissue Value: Closed Flower vs. Whole Plant
  misc_feature: MA Experiment ID: 20000286 Result: Down-regulated in Transcription
  misc_feature: MA Experiment 20000286 PARAMETER Experiment Name: At_Open_Flower_P Parameter: Age (day) Value: 21
  misc_feature: MA Experiment 20000286 PARAMETER Experiment Name: At_Open_Flower_P Parameter: Plant Line Value: WS
  misc_feature: MA Experiment 20000286 PARAMETER Experiment Name: At_Open_Flower_P Parameter: Tissue Value: Half Open vs. Whole Plant
  misc_feature: MA Experiment ID: 20000439 Result: Down-regulated in Transcription
  misc_feature: MA Experiment 20000439 PARAMETER Experiment Name: At_Roots__P Parameter: Age (day) Value: 14 vs. 21
  misc_feature: MA Experiment 20000439 PARAMETER Experiment Name: At_Roots__P Parameter: Organism Value: A. thaliana
  misc_feature: MA Experiment 20000439 PARAMETER Experiment Name: At_Roots__P Parameter: Tissue Value: Roots vs. Whole Plant
  misc_feature: MA Experiment ID: 20001451 Result: Up-regulated in Transcription
  misc_feature: MA Experiment 20001451 PARAMETER Experiment Name: At_Far-red-induction_P Parameter: Age (day) Value: 7
  misc_feature: MA Experiment 20001451 PARAMETER Experiment Name: At_Far-red-induction_P Parameter: Light Value: Far-red vs. White
  misc_feature: MA Experiment 20001451 PARAMETER Experiment Name: At_Far-red-induction_P Parameter: Organism Value: A. thaliana
  misc_feature: MA Experiment 20001451 PARAMETER Experiment Name: At_Far-red-induction_P Parameter: Plant Line Value: Columbia
  misc_feature: MA Experiment 20001451 PARAMETER Experiment Name: At_Far-red-induction_P Parameter: Timepoint (hr) Value: 24
  misc_feature: MA Experiment 20001451 PARAMETER Experiment Name: At_Far-red-induction_P Parameter: Tissue Value: Whole Plant
  misc_feature: MA Experiment ID: 20001911 Result: Up-regulated in Transcription
  misc_feature: MA Experiment 20001911 PARAMETER Experiment Name: At_Drought_Reproduction_P Parameter: Age (day) Value: 40
  misc_feature: MA Experiment 20001911 PARAMETER Experiment Name: At_Drought_Reproduction_P Parameter: Organism Value: A. thaliana
  misc_feature: MA Experiment 20001911 PARAMETER Experiment Name: At_Drought_Reproduction_P Parameter: Plant Line Value: WS
  misc_feature: MA Experiment 20001911 PARAMETER Experiment Name: At_Drought_Reproduction_P Parameter: Timepoint (day) Value: 10
  misc_feature: MA Experiment 20001911 PARAMETER Experiment Name: At_Drought_Reproduction_P Parameter: Tissue Value: Flowers
  misc_feature: MA Experiment 20001911 PARAMETER Experiment Name: At_Drought_Reproduction_P Parameter: Treatment Value: Drought vs. No Drought
tcttctctccttcgtctcccgtcaagctgctttagccatggctatggcggcgtctattatccaatcttctccgctctccttcaatagcaacaacgcaaagccacggattcatagttcaggatcgctcggcggaatcaaaagccaaaatagagtctctccattgagtgcggttggattaagctcaggccttggaagtagaaggaaatctcttttgatatgtcactcagccattaacgcgaaatgcagtgaaggacaaacacagaccgttactcgggagtcaccgactataacacaggctcctgtacactctaaggagaaatcaccaagcctagacgatggaggagacgggttcccaccgcgagatgatggagatggtggtggaggaggagggggtggaggcaactggtcgggtgggttcttcttctttggttttctggccttcttgggtctattgaaggataaagagggcgaggaagattaccgagggagcagaaggcgataataatatgggccactcttggttatcttattacagctacaggactcattttgtatctgtttcgttgagtgggggatgatatgccttgtattcaagagaagagagacacggttgatttcaacaaagcttatattgataactttgaaatcctggcaaaataacaaattcgaac

SEQ ID NO: 29252 - protein, 166 aa, Arabidopsis thaliana
  peptide (1)..(166): Ceres Seq. ID no. 12561506
  misc_feature (26)..(159): Homolog of NCBI NO: 25372889 NR Description: protein F26G16.9 [imported] - Arabidopsis
  misc_feature (13)..(166): Homolog of NCBI NO: 18405726 NR Description: expressed protein
LLSFVSRQAALAMAMAASIIQSSPLSFNSNNAKPRIHSSGSLGGIKSQNRVSPLSAVGLSSGLGSRRKSLLICHSAINAKCSEGQTQTVTRESPTITQAPVHSKEKSPSLDDGGDGFPPRDDGDGGGGGGGGGNWSGGFFFFGFLAFLGLLKDKEGEEDYRGSRRR

SEQ ID NO: 29253 - protein, 154 aa, Arabidopsis thaliana
  peptide (1)..(154): Ceres Seq. ID no. 12561507
  misc_feature (14)..(147): Homolog of NCBI NO: 25372889 NR Description: protein F26G16.9 [imported] - Arabidopsis
  misc_feature (1)..(154): Homolog of NCBI NO: 18405726 NR Description: expressed protein
MAMAASIIQSSPLSFNSNNAKPRIHSSGSLGGIKSQNRVSPLSAVGLSSGLGSRRKSLLICHSAINAKCSEGQTQTVTRESPTITQAPVHSKEKSPSLDDGGDGFPPRDDGDGGGGGGGGGNWSGGFFFFGFLAFLGLLKDKEGEEDYRGSRRR

SEQ ID NO: 29254 - protein, 152 aa, Arabidopsis thaliana
  peptide (1)..(152): Ceres Seq. ID no. 12561508
  misc_feature (12)..(145): Homolog of NCBI NO: 25372889 NR Description: protein F26G16.9 [imported] - Arabidopsis
  misc_feature (1)..(152): Homolog of NCBI NO: 18405726 NR Description: expressed protein
MAASIIQSSPLSFNSNNAKPRIHSSGSLGGIKSQNRVSPLSAVGLSSGLGSRRKSLLICHSAINAKCSEGQTQTVTRESPTITQAPVHSKEKSPSLDDGGDGFPPRDDGDGGGGGGGGGNWSGGFFFFGFLAFLGLLKDKEGEEDYRGSRRR

SEQ ID NO: 29255 - DNA, 2743 bp, Arabidopsis thaliana
  misc_feature (1)..(2743): Ceres Seq. ID no. 13494317
  misc_feature: MA Experiment ID: 108434 Result: Down-regulated in Transcription
  misc_feature: MA Experiment 108434 PARAMETER Experiment Name: At_Root_Tips_cDNA_P Parameter: Tissue Value: Root Tips
  misc_feature: MA Experiment ID: 108501 Result: Up-regulated in Transcription
  misc_feature: MA Experiment 108501 PARAMETER Experiment Name: At_ap2_floral_buds_cDNA_P Parameter: Plant Line Value: ap2 (Ler.)
  misc_feature: MA Experiment 108501 PARAMETER Experiment Name: At_ap2_floral_buds_cDNA_P Parameter: Tissue Value: Closed Flower
  misc_feature: MA Experiment ID: 108579 Result: Up-regulated in Transcription
  misc_feature: MA Experiment 108579 PARAMETER Experiment Name: At_4deg_Cold_cDNA_P Parameter: Temperature (deg C) Value: 4 vs. 22
  misc_feature: MA Experiment 108579 PARAMETER Experiment Name: At_4deg_Cold_cDNA_P Parameter: Timepoint (hr) Value: 6
  misc_feature: MA Experiment 108579 PARAMETER Experiment Name: At_4deg_Cold_cDNA_P Parameter: Tissue Value: Aerial
  misc_feature: MA Experiment ID: 108585 Result: Up-regulated in Transcription
  misc_feature: MA Experiment 108585 PARAMETER Experiment Name: At_5mM_NaNP_cDNA_P Parameter: Timepoint (hr) Value: 6
  misc_feature: MA Experiment 108585 PARAMETER Experiment Name: At_5mM_NaNP_cDNA_P Parameter: Tissue Value: Aerial
  misc_feature: MA Experiment 108585 PARAMETER Experiment Name: At_5mM_NaNP_cDNA_P Parameter: Treatment Value: null
  misc_feature: MA Experiment ID: 108668 Result: Up-regulated in Transcription
  misc_feature: MA Experiment 108668 PARAMETER Experiment Name: At_2mM_SA_cDNA_P Parameter: Plant Line Value: WS
  misc_feature: MA Experiment 108668 PARAMETER Experiment Name: At_2mM_SA_cDNA_P Parameter: Timepoint (hr) Value: 6
  misc_feature: MA Experiment 108668 PARAMETER Experiment Name: At_2mM_SA_cDNA_P Parameter: Treatment Value: 2mM SA vs. No Treatment
  misc_feature: MA Experiment ID: 20000030 Result: Down-regulated in Transcription
  misc_feature: MA Experiment 20000030 PARAMETER Experiment Name: At_CS6630_Roots_cDNA_P Parameter: Plant Line Value: CS6630 vs. WS
  misc_feature: MA Experiment 20000030 PARAMETER Experiment Name: At_CS6630_Roots_cDNA_P Parameter: Tissue Value: Roots
  misc_feature: MA Experiment ID: 20000069 Result: Up-regulated in Transcription
  misc_feature: MA Experiment 20000069 PARAMETER Experiment Name: At_100uM_ABA_Mutants_cDNA_P Parameter: Plant Line Value: CS23
  misc_feature: MA Experiment 20000069 PARAMETER Experiment Name: At_100uM_ABA_Mutants_cDNA_P Parameter: Timepoint (hr) Value: 6
  misc_feature: MA Experiment 20000069 PARAMETER Experiment Name: At_100uM_ABA_Mutants_cDNA_P Parameter: Tissue Value: Aerial
  misc_feature: MA Experiment 20000069 PARAMETER Experiment Name: At_100uM_ABA_Mutants_cDNA_P Parameter: Treatment Value: 100uM ABA vs. No Treatment
  misc_feature: MA Experiment ID: 20000113 Result: Down-regulated in Transcription
  misc_feature: MA Experiment 20000113 PARAMETER Experiment Name: At_42deg_Heat_cDNA_P Parameter: Temperature (deg C) Value: 42 vs. 22
  misc_feature: MA Experiment 20000113 PARAMETER Experiment Name: At_42deg_Heat_cDNA_P Parameter: Timepoint (hr) Value: 8
  misc_feature: MA Experiment 20000113 PARAMETER Experiment Name: At_42deg_Heat_cDNA_P Parameter: Tissue Value: Aerial
atttaattatctcaggatacgttaacataaaagtttttttttctcttggtctcaatgctcactctatccccatgaagttttgctcatactcaagttatcttgcagagaaatagaaaaaagatgggtatggttttatttgcttgcttgcttttactaatcatattcccaacttgtggctatgcagctataaacacatcaagtcctttgtcaataagacaaactctgagttctcctggtggattttatgagttaggcttcttcagtcctaataatactcagaatcagtatgtcgggatctggttcaagaagattgttcctcgtgtagttgtgtgggtggctaacagagatacgccagttactagctctgcagcaaatctcactatcagcagcaatgggagcctgatcttgcttgatgggaaacaagatgttatttggtcaacaggaaaagctttcacatccaacaaatgtcatgcggagctcttagataccggaaattttgttgtaattgatgatgtttcagggaataaattatggcaaagcttcgagcatcttggtaatactatgctgcctcagtcatcattgatgtatgatacttctaatggcaagaagcgtgtgttgactacatggaaaagtaacagcgatccttcgcctggggagttctcactggagattacaccacaaatccccacacaaggccttataagaagaggctcagtaccttactggagatgtggtccttgggcaaaaacaagattctctgggatatctggaattgatgcatcatatgtaagtccattcagcgttgtccaggatacagcagccggcacaggatctttctcttattccacattaagaaactataatctctcatatgttacgctaacaccagaagggaaaatgaagatcctctgggatgatggaaataattggaagcttcacttgtctctcccagagaacccatgtgatctatatggtagatgcgggccttatggtttgtgtgtgagatctgatcccccaaagtgtgaatgcttgaaagggtttgtaccaaagtctgatgaggagtggggaaaaggaaactggacaagtgggtgtgtgagacgtacaaaattatcttgccaagcaaaatcttctatgaaaacacaaggcaaagacacagacatcttctatcgtatgacagatgtaaagactccggatctgcaccaatttgcaagctttctcaatgccgaacagtgctatcaaggttgtctaggcaactgttcttgcacagccttcgcctatattagtggaattggatgtttggtatggaatggggagctagcagacaccgttcaatttttgtctagcggagagtttctcttcattcgtcttgcaagttcagaattggctggaagcagtcgaaggaagattatcgtaggcactactgtcagcctttccattttcttgatcttggtatttgctgcaattatgttgtggagatacagagcgaaacaaaatgatgcatggaagaatggttttgaacgacaagatgtctccggcgtcaatttctttgagatgcatacaatacgaactgccaccaataacttcagtccttcaaataaacttggtcaaggtggatttggtccagtttacaagggaaagttggtagatgggaaggaaataggtgttaaacgccttgctagtagttccggtcagggtacagaggagttcatgaatgaaataacactgatctcaaaattgcaacacagaaacttggttcggcttttgggatactgcatcgacggagaagagaagctactgatctatgagttcatggtgaacaaaagtctcgatatttttatatttgatccatgtctaaagtttgagcttgattggccaaagagatttaatatcattcaaggtattgcgcgtggacttctctatctccaccgtgactcacgcctcagagttattcaccgagacctgaaggtcagcaatattcttctggacgacagaatgaatccaaaaatatcagattttggattggctcggatgttccagggaacccaatatcaagacaacactcgcagagttgtaggaactctaggatatatgtctcccgagtatgcatgggcaggattgttctctgagaagtctgatatctatagcttcggagttctgatgttagaaatcatcagcggaaagagaatttcacggttcatctatggtgatgaaagcaaaggccttcttgcttatacatgggattcttggtgcgagaccgggggatcaaatctacttgacagagatcttactgatacatgccaagcattcgaagttgcgagatgtgttcagattggtctgctctgtgttcaacacgaagccgtcgacagacccaacactcttcaagtactatccatgcttacttcagcaacagatcttccagtaccaaaacagccaatatttgcagtgcatactctaaacgatatgccaatgttacaggctaattctcaagatttcttatctgtaaatgagatgacagaatctatgatccaaggaaggtaagcctaaggatcttgttatctcactacagaagtagtagtatatacttgtaaattcatgaacatttaaagcttaagattttgatatctcactctatttttctaagcatgtgatctcataaagccccaatatgtcgttgacacgtcataatattgggtataatattgttattaaccgtcgcaaagataaagtatgctttttgatgacc

SEQ ID NO: 29256 - protein, 805 aa, Arabidopsis thaliana
  peptide (1)..(805): Ceres Seq. ID no. 13494318
  misc_feature (66)..(176): Pfam Name: D-mannose binding lectin Pfam Description: D-mannose binding lectin
  misc_feature (148)..(211): Homolog of NCBI NO: 30696575 NR Description: S-locus protein kinase, putative [Arabidopsis
  misc_feature (680)..(805): Homolog of NCBI NO: 30696575 NR Description: S-locus protein kinase, putative [Arabidopsis
  misc_feature (241)..(677): Homolog of NCBI NO: 30696575 NR Description: S-locus protein kinase, putative [Arabidopsis
  misc_feature (1)..(805): Homolog of NCBI NO: 15219914 NR Description: receptor protein kinase (IRK1) -related
  misc_feature (1)..(805): Homolog of NCBI NO: 30682149 NR Description: S-locus protein kinase, putative [Arabidopsis
  misc_feature (1)..(805): Homolog of NCBI NO: 18391259 NR Description: S-locus protein kinase, putative [Arabidopsis
  misc_feature (1)..(805): Homolog of NCBI NO: 15810423 NR Description: putative serine/threonine kinase [Arabidopsis
  misc_feature (1)..(805): Homolog of NCBI NO: 24417324 NR Description: unknown [Arabidopsis thaliana]
  misc_feature (1)..(805): Homolog of NCBI NO: 30682152 NR Description: S-locus protein kinase, putative [Arabidopsis
  misc_feature (3)..(800): Homolog of NCBI NO: 15219912 NR Description: S-locus protein kinase family [Arabidopsis
MGMVLFACLLLLIIFPTCGYAAINTSSPLSIRQTLSSPGGFYELGFFSPNNTQNQYVGIWFKKIVPRVVVWVANRDTPVTSSAANLTISSNGSLILLDGKQDVIWSTGKAFTSNKCHAELLDTGNFVVIDDVSGNKLWQSFEHLGNTMLPQSSLMYDTSNGKKRVLTTWKSNSDPSPGEFSLEITPQIPTQGLIRRGSVPYWRCGPWAKTRFSGISGIDASYVSPFSVVQDTAAGTGSFSYSTLRNYNLSYVTLTPEGKMKILWDDGNNWKLHLSLPENPCDLYGRCGPYGLCVRSDPPKCECLKGFVPKSDEEWGKGNWTSGCVRRTKLSCQAKSSMKTQGKDTDIFYRMTDVKTPDLHQFASFLNAEQCYQGCLGNCSCTAFAYISGIGCLVWNGELADTVQFLSSGEFLFIRLASSELAGSSRRKIIVGTTVSLSIFLILVFAAIMLWRYRAKQNDAWKNGFERQDVSGVNFFEMHTIRTATNNFSPSNKLGQGGFGPVYKGKLVDGKEIGVKRLASSSGQGTEEFMNEITLISKLQHRNLVRLLGYCIDGEEKLLIYEFMVNKSLDIFIFDPCLKFELDWPKRFNIIQGIARGLLYLHRDSRLRVIHRDLKVSNILLDDRMNPKISDFGLARMFQGTQYQDNTRRVVGTLGYMSPEYAWAGLFSEKSDIYSFGVLMLEIISGKRISRFIYGDESKGLLAYTWDSWCETGGSNLLDRDLTDTCQAFEVARCVQIGLLCVQHEAVDRPNTLQVLSMLTSATDLPVPKQPIFAVHTLNDMPMLQANSQDFLSVNEMTESMIQGR

SEQ ID NO: 29257 - protein, 803 aa, Arabidopsis thaliana
  peptide (1)..(803): Ceres Seq. ID no. 13494319
  misc_feature (64)..(174): Pfam Name: D-mannose binding lectin Pfam Description: D-mannose binding lectin
  misc_feature (146)..(209): Homolog of NCBI NO: 30696575 NR Description: S-locus protein kinase, putative [Arabidopsis
  misc_feature (678)..(803): Homolog of NCBI NO: 30696575 NR Description: S-locus protein kinase, putative [Arabidopsis
  misc_feature (239)..(675): Homolog of NCBI NO: 30696575 NR Description: S-locus protein kinase, putative [Arabidopsis
  misc_feature (1)..(803): Homolog of NCBI NO: 15219914 NR Description: receptor protein kinase (IRK1) -related
  misc_feature (1)..(803): Homolog of NCBI NO: 30682149 NR Description: S-locus protein kinase, putative [Arabidopsis
  misc_feature (1)..(803): Homolog of NCBI NO: 18391259 NR Description: S-locus protein kinase, putative [Arabidopsis
  misc_feature (1)..(803): Homolog of NCBI NO: 15810423 NR Description: putative serine/threonine kinase [Arabidopsis
  misc_feature (1)..(803): Homolog of NCBI NO: 24417324 NR Description: unknown [Arabidopsis thaliana]
  misc_feature (1)..(803): Homolog of NCBI NO: 30682152 NR Description: S-locus protein kinase, putative [Arabidopsis
  misc_feature (1)..(798): Homolog of NCBI NO: 15219912 NR Description: S-locus protein kinase family [Arabidopsis
MVLFACLLLLIIFPTCGYAAINTSSPLSIRQTLSSPGGFYELGFFSPNNTQNQYVGIWFKKIVPRVVVWVANRDTPVTSSAANLTISSNGSLILLDGKQDVIWSTGKAFTSNKCHAELLDTGNFVVIDDVSGNKLWQSFEHLGNTMLPQSSLMYDTSNGKKRVLTTWKSNSDPSPGEFSLEITPQIPTQGLIRRGSVPYWRCGPWAKTRFSGISGIDASYVSPFSVVQDTAAGTGSFSYSTLRNYNLSYVTLTPEGKMKILWDDGNNWKLHLSLPENPCDLYGRCGPYGLCVRSDPPKCECLKGFVPKSDEEWGKGNWTSGCVRRTKLSCQAKSSMKTQGKDTDIFYRMTDVKTPDLHQFASFLNAEQCYQGCLGNCSCTAFAYISGIGCLVWNGELADTVQFLSSGEFLFIRLASSELAGSSRRKIIVGTTVSLSIFLILVFAAIMLWRYRAKQNDAWKNGFERQDVSGVNFFEMHTIRTATNNFSPSNKLGQGGFGPVYKGKLVDGKEIGVKRLASSSGQGTEEFMNEITLISKLQHRNLVRLLGYCIDGEEKLLIYEFMVNKSLDIFIFDPCLKFELDWPKRFNIIQGIARGLLYLHRDSRLRVIHRDLKVSNILLDDRMNPKISDFGLARMFQGTQYQDNTRRVVGTLGYMSPEYAWAGLFSEKSDIYSFGVLMLEIISGKRISRFIYGDESKGLLAYTWDSWCETGGSNLLDRDLTDTCQAFEVARCVQIGLLCVQHEAVDRPNTLQVLSMLTSATDLPVPKQPIFAVHTLNDMPMLQANSQDFLSVNEMTESMIQGR

SEQ ID NO: 29258 - protein, 658 aa, Arabidopsis thaliana
  peptide (1)..(658): Ceres Seq. ID no. 13494320
  misc_feature (1)..(64): Homolog of NCBI NO: 30696575 NR Description: S-locus protein kinase, putative [Arabidopsis
  misc_feature (533)..(658): Homolog of NCBI NO: 30696575 NR Description: S-locus protein kinase, putative [Arabidopsis
  misc_feature (94)..(530): Homolog of NCBI NO: 30696575 NR Description: S-locus protein kinase, putative [Arabidopsis
  misc_feature (1)..(658): Homolog of NCBI NO: 15219914 NR Description: receptor protein kinase (IRK1) -related
  misc_feature (1)..(658): Homolog of NCBI NO: 30682149 NR Description: S-locus protein kinase, putative [Arabidopsis
  misc_feature (1)..(658): Homolog of NCBI NO: 18391259 NR Description: S-locus protein kinase, putative [Arabidopsis
  misc_feature (1)..(658): Homolog of NCBI NO: 15810423 NR Description: putative serine/threonine kinase [Arabidopsis
  misc_feature (1)..(658): Homolog of NCBI NO: 24417324 NR Description: unknown [Arabidopsis thaliana]
  misc_feature (1)..(658): Homolog of NCBI NO: 30682152 NR Description: S-locus protein kinase, putative [Arabidopsis
  misc_feature (1)..(653): Homolog of NCBI NO: 15219912 NR Description: S-locus protein kinase family [Arabidopsis
MLPQSSLMYDTSNGKKRVLTTWKSNSDPSPGEFSLEITPQIPTQGLIRRGSVPYWRCGPWAKTRFSGISGIDASYVSPFSVVQDTAAGTGSFSYSTLRNYNLSYVTLTPEGKMKILWDDGNNWKLHLSLPENPCDLYGRCGPYGLCVRSDPPKCECLKGFVPKSDEEWGKGNWTSGCVRRTKLSCQAKSSMKTQGKDTDIFYRMTDVKTPDLHQFASFLNAEQCYQGCLGNCSCTAFAYISGIGCLVWNGELADTVQFLSSGEFLFIRLASSELAGSSRRKIIVGTTVSLSIFLILVFAAIMLWRYRAKQNDAWKNGFERQDVSGVNFFEMHTIRTATNNFSPSNKLGQGGFGPVYKGKLVDGKEIGVKRLASSSGQGTEEFMNEITLISKLQHRNLVRLLGYCIDGEEKLLIYEFMVNKSLDIFIFDPCLKFELDWPKRFNIIQGIARGLLYLHRDSRLRVIHRDLKVSNILLDDRMNPKISDFGLARMFQGTQYQDNTRRVVGTLGYMSPEYAWAGLFSEKSDIYSFGVLMLEIISGKRISRFIYGDESKGLLAYTWDSWCETGGSNLLDRDLTDTCQAFEVARCVQIGLLCVQHEAVDRPNTLQVLSMLTSATDLPVPKQPIFAVHTLNDMPMLQANSQDFLSVNEMTESMIQGR

SEQ ID NO: 29259 - DNA, 1187 bp, Arabidopsis thaliana
  misc_feature (1)..(1187): Ceres Seq. ID no. 13500226
  misc_feature: MA Experiment ID: 108434 Result: Up-regulated in Transcription
  misc_feature: MA Experiment 108434 PARAMETER Experiment Name: At_Root_Tips_cDNA_P Parameter: Tissue Value: Root Tips
  misc_feature: MA Experiment ID: 108462 Result: Down-regulated in Transcription
  misc_feature: MA Experiment 108462 PARAMETER Experiment Name: At_Germinating_Seeds_cDNA_P Parameter: Age (day) Value: 2 vs. 0
  misc_feature: MA Experiment 108462 PARAMETER Experiment Name: At_Germinating_Seeds_cDNA_P Parameter: Tissue Value: Germinating Seeds
  misc_feature: MA Experiment ID: 108463 Result: Down-regulated in Transcription
  misc_feature: MA Experiment 108463 PARAMETER Experiment Name: At_Germinating_Seeds_cDNA_P Parameter: Age (day) Value: 3 vs. 0
  misc_feature: MA Experiment 108463 PARAMETER Experiment Name: At_Germinating_Seeds_cDNA_P Parameter: Tissue Value: Germinating Seeds
  misc_feature: MA Experiment ID: 108464 Result: Down-regulated in Transcription
  misc_feature: MA Experiment 108464 PARAMETER Experiment Name: At_Germinating_Seeds_cDNA_P Parameter: Age (day) Value: 4 vs. 0
  misc_feature: MA Experiment 108464 PARAMETER Experiment Name: At_Germinating_Seeds_cDNA_P Parameter: Tissue Value: Germinating Seeds
  misc_feature: MA Experiment ID: 108577 Result: Up-regulated in Transcription
  misc_feature: MA Experiment 108577 PARAMETER Experiment Name: At_42deg_Heat_cDNA_P Parameter: Temperature (deg C) Value: 42 vs. 22
  misc_feature: MA Experiment 108577 PARAMETER Experiment Name: At_42deg_Heat_cDNA_P Parameter: Timepoint (hr) Value: 6
  misc_feature: MA Experiment 108577 PARAMETER Experiment Name: At_42deg_Heat_cDNA_P Parameter: Tissue Value: Aerial
  misc_feature: MA Experiment ID: 20000224 Result: Up-regulated in Transcription
  misc_feature: MA Experiment ID: 20000264 Result: Up-regulated in Transcription
  misc_feature: MA Experiment 20000264 PARAMETER Experiment Name: At_Open_Flower_P Parameter: Age (day) Value: 21
  misc_feature: MA Experiment 20000264 PARAMETER Experiment Name: At_Open_Flower_P Parameter: Plant Line Value: WS
  misc_feature: MA Experiment 20000264 PARAMETER Experiment Name: At_Open_Flower_P Parameter: Tissue Value: Open Flower vs. Whole Plant
  misc_feature: MA Experiment ID: 20000286 Result: Up-regulated in Transcription
  misc_feature: MA Experiment 20000286 PARAMETER Experiment Name: At_Open_Flower_P Parameter: Age (day) Value: 21
  misc_feature: MA Experiment 20000286 PARAMETER Experiment Name: At_Open_Flower_P Parameter: Plant Line Value: WS
  misc_feature: MA Experiment 20000286 PARAMETER Experiment Name: At_Open_Flower_P Parameter: Tissue Value: Half Open vs. Whole Plant
  misc_feature: MA Experiment ID: 20000451 Result: Up-regulated in Transcription
  misc_feature: MA Experiment 20000451 PARAMETER Experiment Name: At_CS6879_Shoots-Roots_P Parameter: Age (day) Value: 14
  misc_feature: MA Experiment 20000451 PARAMETER Experiment Name: At_CS6879_Shoots-Roots_P Parameter: Organism Value: A. thaliana
  misc_feature: MA Experiment 20000451 PARAMETER Experiment Name: At_CS6879_Shoots-Roots_P Parameter: Plant Line Value: CS6879 vs. WS
  misc_feature: MA Experiment 20000451 PARAMETER Experiment Name: At_CS6879_Shoots-Roots_P Parameter: Tissue Value: Roots
  misc_feature: MA Experiment ID: 20000794 Result: Up-regulated in Transcription
  misc_feature: MA Experiment 20000794 PARAMETER Experiment Name: At_Petals_P Parameter: Age (day) Value: 23-25 days
  misc_feature: MA Experiment 20000794 PARAMETER Experiment Name: At_Petals_P Parameter: Plant Line Value: WS
  misc_feature: MA Experiment 20000794 PARAMETER Experiment Name: At_Petals_P Parameter: Tissue Value: Petals vs. Whole plant
  misc_feature: MA Experiment ID: 20001560 Result: Up-regulated in Transcription
  misc_feature: MA Experiment 20001560 PARAMETER Experiment Name: At_Drought_Soil_Dry_P Parameter: Age (day) Value: 28
  misc_feature: MA Experiment 20001560 PARAMETER Experiment Name: At_Drought_Soil_Dry_P Parameter: Organism Value: A. thaliana
  misc_feature: MA Experiment 20001560 PARAMETER Experiment Name: At_Drought_Soil_Dry_P Parameter: Plant Line Value: WS
  misc_feature: MA Experiment 20001560 PARAMETER Experiment Name: At_Drought_Soil_Dry_P Parameter: Post Timepoint (hr) Value: None
  misc_feature: MA Experiment 20001560 PARAMETER Experiment Name: At_Drought_Soil_Dry_P Parameter: Post-Treatment Value: None
  misc_feature: MA Experiment 20001560 PARAMETER Experiment Name: At_Drought_Soil_Dry_P Parameter: Timepoint (day) Value: 14
  misc_feature: MA Experiment 20001560 PARAMETER Experiment Name: At_Drought_Soil_Dry_P Parameter: Treatment Value: Drought vs. No Drought
cactttcgcttttcccaatacgaacaagcggtgacgcatatctcctgtatcatcactcttttacttccggcgatctctctccgacggccaatggacgccgtcctttactctgttccactctccttcactcccctacgcgcatcatcctctccttcctcgccgtatcttcttctgccgaggtttctctccgttcagccatgtcacaaattcaccttctctcgaagcttcccttccaaatcccggattccctcagcttcttccgccgccggttccacgttgatgacgaattcctcttcgccaagaagtggagtgtacactgttggtgagttcatgacaaagaaagaggacttgcacgtggtgaaacctacgactactgtggatgaagctctggaactccttgtggagaatagaatcactggatttcctgtaattgacgaagactggaaattggttgggcttgtttcagattatgacttgttggctttggactccatatctggtagtggaagaacagaaaattccatgttccctgaggttgacagcacctggaaaactttcaatgctgtgcaaaagctactcagcaaaaccaatgggaagcttgttggagatttaatgacaccagctccactagttgttgaggaaaaaaccaacctggaagatgctgctaaaatattgcttgagacaaaatatcgccggctccctgtggtagattctgatggcaaattggttggtatcatcacaagaggaaacgtggttagagccgcgcttcaaataaagcgctctggtgataggaatgcttgattaaggtagtatatataccaaacaagaaaatggctttgtagaggaaagcaatgatcaaacattctccagagaataaaagtgagaaaccgcgacaattgtaccatgtattagaataagagccataacttatacgacattttgcaacgaagttaaacctggtaaactctagaagcatcaaaggtaagtgcacatctaactttttgctattttagcagaatcagcttctctgtttgtttgataagttaggttatcagatgctttgggtatttgactctcatccaatatgctttcatttcgagaaaaaaaaaaattgtttcacactttctacatttggttaaccaccaaagtaacaaacctttttaaggtattttaattgattttggttc

SEQ ID NO: 29260 - protein, 266 aa, Arabidopsis thaliana
  peptide (1)..(266): Ceres Seq. ID no. 13500227
  misc_feature (111)..(164): Pfam Name: CBS domain Pfam Description: CBS domain
  misc_feature (114)..(254): Homolog of NCBI NO: 15678671 NR Description: conserved protein [Methanothermobacter
  misc_feature (106)..(254): Homolog of NCBI NO: 23127710 NR Description: hypothetical protein [Nostoc punctiforme]
  misc_feature (120)..(254): Homolog of NCBI NO: 23040753 NR Description: hypothetical protein [Trichodesmium erythraeum
  misc_feature (106)..(254): Homolog of NCBI NO: 16331252 NR Description: IMP dehydrogenase [Synechocystis sp. PCC 6803]
  misc_feature (119)..(254): Homolog of NCBI NO: 17231305 NR Description: hypothetical protein [Nostoc sp. PCC 7120]
  misc_feature (184)..(245): Homolog of NCBI NO: 7486280 NR Description: hypothetical protein F28A23.120 - Arabidopsis
  misc_feature (37)..(166): Homolog of NCBI NO: 7486280 NR Description: hypothetical protein F28A23.120 - Arabidopsis
  misc_feature (37)..(265): Homolog of NCBI NO: 18418376 NR Description: CBS domain containing protein [Arabidopsis
  misc_feature (85)..(260): Homolog of NCBI NO: 34015153 NR Description: putative CBS domain containing protein
  misc_feature (31)..(266): Homolog of NCBI NO: 15234564 NR Description: CBS domain containing protein [Arabidopsis
HFRFSQYEQAVTHISCIITLLLPAISLRRPMDAVLYSVPLSFTPLRASSSPSSPYLLLPRFLSVQPCHKFTFSRSFPSKSRIPSASSAAGSTLMTNSSSPRSGVYTVGEFMTKKEDLHVVKPTTTVDEALELLVENRITGFPVIDEDWKLVGLVSDYDLLALDSISGSGRTENSMFPEVDSTWKTFNAVQKLLSKTNGKLVGDLMTPAPLVVEEKTNLEDAAKILLETKYRRLPVVDSDGKLVGIITRGNVVRAALQIKRSGDRNA

SEQ ID NO: 29261 - protein, 236 aa, Arabidopsis thaliana
  peptide (1)..(236): Ceres Seq. ID no. 13500228
  misc_feature (81)..(134): Pfam Name: CBS domain Pfam Description: CBS domain
  misc_feature (84)..(224): Homolog of NCBI NO: 15678671 NR Description: conserved protein [Methanothermobacter
  misc_feature (76)..(224): Homolog of NCBI NO: 23127710 NR Description: hypothetical protein [Nostoc punctiforme]
  misc_feature (90)..(224): Homolog of NCBI NO: 23040753 NR Description: hypothetical protein [Trichodesmium erythraeum
  misc_feature (76)..(224): Homolog of NCBI NO: 16331252 NR Description: IMP dehydrogenase [Synechocystis sp. PCC 6803]
  misc_feature (89)..(224): Homolog of NCBI NO: 17231305 NR Description: hypothetical protein [Nostoc sp. PCC 7120]
  misc_feature (154)..(215): Homolog of NCBI NO: 7486280 NR Description: hypothetical protein F28A23.120 - Arabidopsis
  misc_feature (7)..(136): Homolog of NCBI NO: 7486280 NR Description: hypothetical protein F28A23.120 - Arabidopsis
  misc_feature (7)..(235): Homolog of NCBI NO: 18418376 NR Description: CBS domain containing protein [Arabidopsis
  misc_feature (55)..(230): Homolog of NCBI NO: 34015153 NR Description: putative CBS domain containing protein
  misc_feature (1)..(236): Homolog of NCBI NO: 15234564 NR Description: CBS domain containing protein [Arabidopsis
MDAVLYSVPLSFTPLRASSSPSSPYLLLPRFLSVQPCHKFTFSRSFPSKSRIPSASSAAGSTLMTNSSSPRSGVYTVGEFMTKKEDLHVVKPTTTVDEALELLVENRITGFPVIDEDWKLVGLVSDYDLLALDSISGSGRTENSMFPEVDSTWKTFNAVQKLLSKTNGKLVGDLMTPAPLVVEEKTNLEDAAKILLETKYRRLPVVDSDGKLVGIITRGNVVRAALQIKRSGDRNA

SEQ ID NO: 29262 - protein, 173 aa, Arabidopsis thaliana
  peptide (1)..(173): Ceres Seq. ID no. 13500229
  misc_feature (18)..(71): Pfam Name: CBS domain Pfam Description: CBS domain
  misc_feature (21)..(161): Homolog of NCBI NO: 15678671 NR Description: conserved protein [Methanothermobacter
  misc_feature (13)..(161): Homolog of NCBI NO: 23127710 NR Description: hypothetical protein [Nostoc punctiforme]
  misc_feature (27)..(161): Homolog of NCBI NO: 23040753 NR Description: hypothetical protein [Trichodesmium erythraeum
  misc_feature (13)..(161): Homolog of NCBI NO: 16331252 NR Description: IMP dehydrogenase [Synechocystis sp. PCC 6803]
  misc_feature (26)..(161): Homolog of NCBI NO: 17231305 NR Description: hypothetical protein [Nostoc sp. PCC 7120]
  misc_feature (91)..(152): Homolog of NCBI NO: 7486280 NR Description: hypothetical protein F28A23.120 - Arabidopsis
  misc_feature (1)..(73): Homolog of NCBI NO: 7486280 NR Description: hypothetical protein F28A23.120 - Arabidopsis
  misc_feature (1)..(172): Homolog of NCBI NO: 18418376 NR Description: CBS domain containing protein [Arabidopsis
  misc_feature (1)..(167): Homolog of NCBI NO: 34015153 NR Description: putative CBS domain containing protein
  misc_feature (1)..(173): Homolog of NCBI NO: 15234564 NR Description: CBS domain containing protein [Arabidopsis
MTNSSSPRSGVYTVGEFMTKKEDLHVVKPTTTVDEALELLVENRITGFPVIDEDWKLVGLVSDYDLLALDSISGSGRTENSMFPEVDSTWKTFNAVQKLLSKTNGKLVGDLMTPAPLVVEEKTNLEDAAKILLETKYRRLPVVDSDGKLVGIITRGNVVRAALQIKRSGDRNA

SEQ ID NO: 29263 - DNA, 870 bp, Arabidopsis thaliana
  misc_feature (1)..(870): Ceres Seq. ID no. 12776994
  misc_feature: MA Experiment ID: 108434 Result: Up-regulated in Transcription
  misc_feature: MA Experiment 108434 PARAMETER Experiment Name: At_Root_Tips_cDNA_P Parameter: Tissue Value: Root Tips
  misc_feature: MA Experiment ID: 108463 Result: Down-regulated in Transcription
  misc_feature: MA Experiment 108463 PARAMETER Experiment Name: At_Germinating_Seeds_cDNA_P Parameter: Age (day) Value: 3 vs. 0
  misc_feature: MA Experiment 108463 PARAMETER Experiment Name: At_Germinating_Seeds_cDNA_P Parameter: Tissue Value: Germinating Seeds
  misc_feature: MA Experiment ID: 108464 Result: Down-regulated in Transcription
  misc_feature: MA Experiment 108464 PARAMETER Experiment Name: At_Germinating_Seeds_cDNA_P Parameter: Age (day) Value: 4 vs. 0
  misc_feature: MA Experiment 108464 PARAMETER Experiment Name: At_Germinating_Seeds_cDNA_P Parameter: Tissue Value: Germinating Seeds
  misc_feature: MA Experiment ID: 108474 Result: Up-regulated in Transcription
  misc_feature: MA Experiment 108474 PARAMETER Experiment Name: At_Drought_Flowers_cDNA_P Parameter: Timepoint (hr) Value: null
  misc_feature: MA Experiment 108474 PARAMETER Experiment Name: At_Drought_Flowers_cDNA_P Parameter: Treatment Value: Drought vs. No Drought
  misc_feature: MA Experiment ID: 108488 Result: Up-regulated in Transcription
  misc_feature: MA Experiment ID: 108561 Result: Down-regulated in Transcription
  misc_feature: MA Experiment 108561 PARAMETER Experiment Name: At_100uM_ABA_cDNA_P Parameter: Timepoint (hr) Value: 6
  misc_feature: MA Experiment 108561 PARAMETER Experiment Name: At_100uM_ABA_cDNA_P Parameter: Tissue Value: Aerial
  misc_feature: MA Experiment 108561 PARAMETER Experiment Name: At_100uM_ABA_cDNA_P Parameter: Treatment Value: 100uM ABA vs. No Treatment
  misc_feature: MA Experiment ID: 108573 Result: Down-regulated in Transcription
  misc_feature: MA Experiment 108573 PARAMETER Experiment Name: At_Drought_cDNA_P Parameter: Timepoint (hr) Value: 6
  misc_feature: MA Experiment 108573 PARAMETER Experiment Name: At_Drought_cDNA_P Parameter: Tissue Value: Aerial
  misc_feature: MA Experiment 108573 PARAMETER Experiment Name: At_Drought_cDNA_P Parameter: Treatment Value: Drought vs. No Drought
  misc_feature: MA Experiment ID: 108595 Result: Down-regulated in Transcription
  misc_feature: MA Experiment 108595 PARAMETER Experiment Name: At_Ler-pi_Ovule_cDNA_P Parameter: Plant Line Value: null
  misc_feature: MA Experiment ID: 20000069 Result: Down-regulated in Transcription
  misc_feature: MA Experiment 20000069 PARAMETER Experiment Name: At_100uM_ABA_Mutants_cDNA_P Parameter: Plant Line Value: CS23
  misc_feature: MA Experiment 20000069 PARAMETER Experiment Name: At_100uM_ABA_Mutants_cDNA_P Parameter: Timepoint (hr) Value: 6
  misc_feature: MA Experiment 20000069 PARAMETER Experiment Name: At_100uM_ABA_Mutants_cDNA_P Parameter: Tissue Value: Aerial
  misc_feature: MA Experiment 20000069 PARAMETER Experiment Name: At_100uM_ABA_Mutants_cDNA_P Parameter: Treatment Value: 100uM ABA vs. No Treatment
  misc_feature: MA Experiment ID: 20000070 Result: Down-regulated in Transcription
  misc_feature: MA Experiment 20000070 PARAMETER Experiment Name: At_100uM_ABA_Mutants_cDNA_P Parameter: Plant Line Value: CS24
  misc_feature: MA Experiment 20000070 PARAMETER Experiment Name: At_100uM_ABA_Mutants_cDNA_P Parameter: Timepoint (hr) Value: 6
  misc_feature: MA Experiment 20000070 PARAMETER Experiment Name: At_100uM_ABA_Mutants_cDNA_P Parameter: Tissue Value: Aerial
  misc_feature: MA Experiment 20000070 PARAMETER Experiment Name: At_100uM_ABA_Mutants_cDNA_P Parameter: Treatment Value: 100uM ABA vs. No Treatment
  misc_feature: MA Experiment ID: 20000086 Result: Down-regulated in Transcription
  misc_feature: MA Experiment 20000086 PARAMETER Experiment Name: At_100uM_ABA_Mutants_cDNA_P Parameter: Plant Line Value: CS22
  misc_feature: MA Experiment 20000086 PARAMETER Experiment Name: At_100uM_ABA_Mutants_cDNA_P Parameter: Timepoint (hr) Value: 6
  misc_feature: MA Experiment 20000086 PARAMETER Experiment Name: At_100uM_ABA_Mutants_cDNA_P Parameter: Tissue Value: Aerial
  misc_feature: MA Experiment 20000086 PARAMETER Experiment Name: At_100uM_ABA_Mutants_cDNA_P Parameter: Treatment Value: 100uM ABA vs. No Treatment
  misc_feature: MA Experiment ID: 20000087 Result: Down-regulated in Transcription
  misc_feature: MA Experiment 20000087 PARAMETER Experiment Name: At_100uM_ABA_Mutants_cDNA_P Parameter: Plant Line Value: WS
  misc_feature: MA Experiment 20000087 PARAMETER Experiment Name: At_100uM_ABA_Mutants_cDNA_P Parameter: Timepoint (hr) Value: 6
  misc_feature: MA Experiment 20000087 PARAMETER Experiment Name: At_100uM_ABA_Mutants_cDNA_P Parameter: Tissue Value: Aerial
  misc_feature: MA Experiment 20000087 PARAMETER Experiment Name: At_100uM_ABA_Mutants_cDNA_P Parameter: Treatment Value: 100uM ABA vs. No Treatment
  misc_feature: MA Experiment ID: 20000088 Result: Down-regulated in Transcription
  misc_feature: MA Experiment 20000088 PARAMETER Experiment Name: At_100uM_ABA_Mutants_cDNA_P Parameter: Plant Line Value: Landsberg
  misc_feature: MA Experiment 20000088 PARAMETER Experiment Name: At_100uM_ABA_Mutants_cDNA_P Parameter: Timepoint (hr) Value: 6
  misc_feature: MA Experiment 20000088 PARAMETER Experiment Name: At_100uM_ABA_Mutants_cDNA_P Parameter: Tissue Value: Aerial
  misc_feature: MA Experiment 20000088 PARAMETER Experiment Name: At_100uM_ABA_Mutants_cDNA_P Parameter: Treatment Value: 100uM ABA vs. No Treatment
  misc_feature: MA Experiment ID: 20000117 Result: Down-regulated in Transcription
  misc_feature: MA Experiment 20000117 PARAMETER Experiment Name: At_100uM_ABA_Mutants_cDNA_P Parameter: Plant Line Value: Columbia
  misc_feature: MA Experiment 20000117 PARAMETER Experiment Name: At_100uM_ABA_Mutants_cDNA_P Parameter: Timepoint (hr) Value: 6
  misc_feature: MA Experiment 20000117 PARAMETER Experiment Name: At_100uM_ABA_Mutants_cDNA_P Parameter: Tissue Value: Aerial
  misc_feature: MA Experiment 20000117 PARAMETER Experiment Name: At_100uM_ABA_Mutants_cDNA_P Parameter: Treatment Value: 100uM ABA vs. No Treatment
  misc_feature: MA Experiment ID: 20000185 Result: Down-regulated in Transcription
  misc_feature: MA Experiment 20000185 PARAMETER Experiment Name: At_Roots__P Parameter: Age (day) Value: 7 vs. 21
  misc_feature: MA Experiment 20000185 PARAMETER Experiment Name: At_Roots__P Parameter: Organism Value: A. thaliana
  misc_feature: MA Experiment 20000185 PARAMETER Experiment Name: At_Roots__P Parameter: Tissue Value: Roots vs. Whole Plant
  misc_feature: MA Experiment ID: 20000234 Result: Up-regulated in Transcription
  misc_feature: MA Experiment 20000234 PARAMETER Experiment Name: At_Siliques_P Parameter: Age (day) Value: 21
  misc_feature: MA Experiment 20000234 PARAMETER Experiment Name: At_Siliques_P Parameter: Organism Value: A. thaliana
  misc_feature: MA Experiment 20000234 PARAMETER Experiment Name: At_Siliques_P Parameter: Plant Line Value: WS
  misc_feature: MA Experiment 20000234 PARAMETER Experiment Name: At_Siliques_P Parameter: Tissue Value: Less Than 5mm Siliques vs. Whole Plant
  misc_feature: MA Experiment ID: 20000235 Result: Up-regulated in Transcription
  misc_feature: MA Experiment 20000235 PARAMETER Experiment Name: At_Siliques_P Parameter: Age (day) Value: 21
  misc_feature: MA Experiment 20000235 PARAMETER Experiment Name: At_Siliques_P Parameter: Organism Value: A. thaliana
  misc_feature: MA Experiment 20000235 PARAMETER Experiment Name: At_Siliques_P Parameter: Plant Line Value: WS
  misc_feature: MA Experiment 20000235 PARAMETER Experiment Name: At_Siliques_P Parameter: Tissue Value: 5-10mm Siliques vs. Whole Plant
  misc_feature: MA Experiment ID: 20000437 Result: Down-regulated in Transcription
  misc_feature: MA Experiment 20000437 PARAMETER Experiment Name: At_Drought_P Parameter: Age (day) Value: 8
  misc_feature: MA Experiment 20000437 PARAMETER Experiment Name: At_Drought_P Parameter: Organism Value: A. thaliana
  misc_feature: MA Experiment 20000437 PARAMETER Experiment Name: At_Drought_P Parameter: Plant Line Value: WS
  misc_feature: MA Experiment 20000437 PARAMETER Experiment Name: At_Drought_P Parameter: Timepoint (hr) Value: 24
  misc_feature: MA Experiment 20000437 PARAMETER Experiment Name: At_Drought_P Parameter: Tissue Value: Whole Plant
  misc_feature: MA Experiment 20000437 PARAMETER Experiment Name: At_Drought_P Parameter: Treatment Value: Drought vs. No Drought
  misc_feature: MA Experiment ID: 20000439 Result: Down-regulated in Transcription
  misc_feature: MA Experiment 20000439 PARAMETER Experiment Name: At_Roots__P Parameter: Age (day) Value: 14 vs. 21
  misc_feature: MA Experiment 20000439 PARAMETER Experiment Name: At_Roots__P Parameter: Organism Value: A. thaliana
  misc_feature: MA Experiment 20000439 PARAMETER Experiment Name: At_Roots__P Parameter: Tissue Value: Roots vs. Whole Plant
  misc_feature: MA Experiment ID: 20000794 Result: Down-regulated in Transcription
  misc_feature: MA Experiment 20000794 PARAMETER Experiment Name: At_Petals_P Parameter: Age (day) Value: 23-25 days
  misc_feature: MA Experiment 20000794 PARAMETER Experiment Name: At_Petals_P Parameter: Plant Line Value: WS
  misc_feature: MA Experiment 20000794 PARAMETER Experiment Name: At_Petals_P Parameter: Tissue Value: Petals vs. Whole plant
  misc_feature: MA Experiment ID: 20001450 Result: Down-regulated in Transcription
  misc_feature: MA Experiment 20001450 PARAMETER Experiment Name: At_Far-red-induction_P Parameter: Age (day) Value: 7
  misc_feature: MA Experiment 20001450 PARAMETER Experiment Name: At_Far-red-induction_P Parameter: Light Value: Far-red vs. White
  misc_feature: MA Experiment 20001450 PARAMETER Experiment Name: At_Far-red-induction_P Parameter: Organism Value: A. thaliana
  misc_feature: MA Experiment 20001450 PARAMETER Experiment Name: At_Far-red-induction_P Parameter: Plant Line Value: Columbia
  misc_feature: MA Experiment 20001450 PARAMETER Experiment Name: At_Far-red-induction_P Parameter: Timepoint (hr) Value: 8
  misc_feature: MA Experiment 20001450 PARAMETER Experiment Name: At_Far-red-induction_P Parameter: Tissue Value: Whole Plant
  misc_feature: MA Experiment ID: 20001560 Result: Up-regulated in Transcription
  misc_feature: MA Experiment 20001560 PARAMETER Experiment Name: At_Drought_Soil_Dry_P Parameter: Age (day) Value: 28
  misc_feature: MA Experiment 20001560 PARAMETER Experiment Name: At_Drought_Soil_Dry_P Parameter: Organism Value: A. thaliana
  misc_feature: MA Experiment 20001560 PARAMETER Experiment Name: At_Drought_Soil_Dry_P Parameter: Plant Line Value: WS
  misc_feature: MA Experiment 20001560 PARAMETER Experiment Name: At_Drought_Soil_Dry_P Parameter: Post Timepoint (hr) Value: None
  misc_feature: MA Experiment 20001560 PARAMETER Experiment Name: At_Drought_Soil_Dry_P Parameter: Post-Treatment Value: None
  misc_feature: MA Experiment 20001560 PARAMETER Experiment Name: At_Drought_Soil_Dry_P Parameter: Timepoint (day) Value: 14
  misc_feature: MA Experiment 20001560 PARAMETER Experiment Name: At_Drought_Soil_Dry_P Parameter: Treatment Value: Drought vs. No Drought
  misc_feature: MA Experiment ID: 20001757 Result: Up-regulated in Transcription
  misc_feature: MA Experiment 20001757 PARAMETER Experiment Name: At_50mM_NH4NO3_L-to-H_P Parameter: Timepoint (hr) Value: 6
  misc_feature: MA Experiment 20001757 PARAMETER Experiment Name: At_50mM_NH4NO3_L-to-H_P Parameter: Tissue Value: Leaf
  misc_feature: MA Experiment 20001757 PARAMETER Experiment Name: At_50mM_NH4NO3_L-to-H_P Parameter: Treatment Value: 50mM NH4NO3 vs 100mM Mannitol
  misc_feature: MA Experiment ID: 20001905 Result: Down-regulated in Transcription
  misc_feature: MA Experiment 20001905 PARAMETER Experiment Name: At_Drought_Reproduction_P Parameter: Age (day) Value: 40
  misc_feature: MA Experiment 20001905 PARAMETER Experiment Name: At_Drought_Reproduction_P Parameter: Organism Value: A. thaliana
  misc_feature: MA Experiment 20001905 PARAMETER Experiment Name: At_Drought_Reproduction_P Parameter: Plant Line Value: WS
  misc_feature: MA Experiment 20001905 PARAMETER Experiment Name: At_Drought_Reproduction_P Parameter: Timepoint (day) Value: 10
  misc_feature: MA Experiment 20001905 PARAMETER Experiment Name: At_Drought_Reproduction_P Parameter: Tissue Value: Rosettes
  misc_feature: MA Experiment 20001905 PARAMETER Experiment Name: At_Drought_Reproduction_P Parameter: Treatment Value: Drought vs. No Drought
  misc_feature: MA Experiment ID: 20001906 Result: Down-regulated in Transcription
  misc_feature: MA Experiment 20001906 PARAMETER Experiment Name: At_Drought_Reproduction_P Parameter: Age (day) Value: 35
  misc_feature: MA Experiment 20001906 PARAMETER Experiment Name: At_Drought_Reproduction_P Parameter: Organism Value: A. thaliana
  misc_feature: MA Experiment 20001906 PARAMETER Experiment Name: At_Drought_Reproduction_P Parameter: Plant Line Value: WS
  misc_feature: MA Experiment 20001906 PARAMETER Experiment Name: At_Drought_Reproduction_P Parameter: Timepoint (day) Value: 5
  misc_feature: MA Experiment 20001906 PARAMETER Experiment Name: At_Drought_Reproduction_P Parameter: Tissue Value: Siliques
  misc_feature: MA Experiment 20001906 PARAMETER Experiment Name: At_Drought_Reproduction_P Parameter: Treatment Value: Drought vs. No Drought
  misc_feature: MA Experiment ID: 20001908 Result: Down-regulated in Transcription
  misc_feature: MA Experiment 20001908 PARAMETER Experiment Name: At_Drought_Reproduction_P Parameter: Age (day) Value: 40
  misc_feature: MA Experiment 20001908 PARAMETER Experiment Name: At_Drought_Reproduction_P Parameter: Organism Value: A. thaliana
  misc_feature: MA Experiment 20001908 PARAMETER Experiment Name: At_Drought_Reproduction_P Parameter: Plant Line Value: WS
  misc_feature: MA Experiment 20001908 PARAMETER Experiment Name: At_Drought_Reproduction_P Parameter: Timepoint (day) Value: 10
  misc_feature: MA Experiment 20001908 PARAMETER Experiment Name: At_Drought_Reproduction_P Parameter: Tissue Value: Siliques
  misc_feature: MA Experiment 20001908 PARAMETER Experiment Name: At_Drought_Reproduction_P Parameter: Treatment Value: Drought vs. No Drought
aaaaactgtgcgctgttgttatctctgctttgaactgaatcagcgttggctatggcttcttcgacagctttgtctctctcatggagctcctctccttgttggtctcacagcttcaatggcggtactaatgaaaccctaaaagtatctgagcgaaggttcaattttgaagttgtttcccagaagaaagctaagaaacttcgcaaggtaattttgaaagaggatgtgacggatttgggtaagcaagggcagttacttgatgtgaaagctggatttttcagaaacttcctcttgcctactggaaaagctcagcttatgactccacttcttctcaaggaattgaagatggaagacgaacggatagaggcagagaagcaaagggtgaaagaagaggcgcaacaactggcgatggtatttcaaactgttggtgcttttaaggttaaacgcaaaggcggtaaaggcaaactgatatttggatctgtcacagctcaagacctcgtcgacatcatcaaatcgcagctccaaaaggacatatacaaacgccttgtctctctcccggaaatccgttaaaccggagaatacatagccgaactcaagcttcaccccgatgtcactgctcgagttaagatcaatgttttcgctaactaaaccttcaacgattcaagactcctactgcatcccaaggaacgtatagagagggaaaagagagtagcctcttgtggtgaggattgaaggttgtgaagtttttcctttagattgtttgatgcatttgtatttttgctatttttggaatctggaaacgctaaaaagtataatattctcttccaacttatgatatttacttgaagttatattgtattcatttgtctgttc

SEQ ID NO: 29264 - protein, 171 aa, Arabidopsis thaliana
  peptide (1)..(171): Ceres Seq. ID no. 12776995
  misc_feature (111)..(171): Pfam Name: Ribosomal protein L9, C-terminal domain Pfam Description: Ribosomal protein L9, C-terminal domain
  misc_feature (51)..(171): Homolog of NCBI NO: 17228075 NR Description: 50S ribosomal protein L9 [Nostoc sp. PCC 7120]
  misc_feature (46)..(171): Homolog of NCBI NO: 16330765 NR Description: 50S ribosomal protein L9 [Synechocystis sp. PCC
  misc_feature (46)..(171): Homolog of NCBI NO: 7676164 NR Description: 50S RIBOSOMAL PROTEIN L9
  misc_feature (46)..(171): Homolog of NCBI NO: 33864439 NR Description: 50S ribosomal protein L9 [Prochlorococcus marinus
  misc_feature (46)..(171): Homolog of NCBI NO: 33241283 NR Description: Ribosomal protein L9
  misc_feature (46)..(171): Homolog of NCBI NO: 33862229 NR Description: 50S ribosomal protein L9
  misc_feature (40)..(171): Homolog of NCBI NO: 22204126 NR Description: putative plastid ribosomal protein CL9 [Triticum
  misc_feature (1)..(171): Homolog of NCBI NO: 71256 NR Description: ribosomal protein L9 precursor, chloroplast -
  misc_feature (1)..(171): Homolog of NCBI NO: 1173069 NR Description: 50S RIBOSOMAL PROTEIN L9, CHLOROPLAST PRECURSOR
  misc_feature (1)..(171): Homolog of NCBI NO: 15230544 NR Description: RP19 gene for chloroplast ribosomal protein CL9
MASSTALSLSWSSSPCWSHSFNGGTNETLKVSERRFNFEVVSQKKAKKLRKVILKEDVTDLGKQGQLLDVKAGFFRNFLLPTGKAQLMTPLLLKELKMEDERIEAEKQRVKEEAQQLAMVFQTVGAFKVKRKGGKGKLIFGSVTAQDLVDIIKSQLQKDIYKRLVSLPEIR

SEQ ID NO: 29265 - DNA, 493 bp, Arabidopsis thaliana
  misc_feature (1)..(493): Ceres Seq. ID no. 13489281
  misc_feature: MA Experiment ID: 108433 Result: Down-regulated in Transcription
  misc_feature: MA Experiment 108433 PARAMETER Experiment Name: At_rhl_Mutant2_cDNA_P Parameter: Age (day) Value: 7
  misc_feature: MA Experiment 108433 PARAMETER Experiment Name: At_rhl_Mutant2_cDNA_P Parameter: Organism Value: A. thaliana
  misc_feature: MA Experiment 108433 PARAMETER Experiment Name: At_rhl_Mutant2_cDNA_P Parameter: Plant Line Value: rhl Mutant vs. wt landsburg
  misc_feature: MA Experiment 108433 PARAMETER Experiment Name: At_rhl_Mutant2_cDNA_P Parameter: Tissue Value: Roots
  misc_feature: MA Experiment ID: 108434 Result: Up-regulated in Transcription
  misc_feature: MA Experiment 108434 PARAMETER Experiment Name: At_Root_Tips_cDNA_P Parameter: Tissue Value: Root Tips
  misc_feature: MA Experiment ID: 108488 Result: Down-regulated in Transcription
  misc_feature: MA Experiment ID: 108569 Result: Down-regulated in Transcription
  misc_feature: MA Experiment 108569 PARAMETER Experiment Name: At_0.001%_MeJA__cDNA_P Parameter: Timepoint (hr) Value: 6
  misc_feature: MA Experiment 108569 PARAMETER Experiment Name: At_0.001%_MeJA__cDNA_P Parameter: Tissue Value: Aerial
  misc_feature: MA Experiment 108569 PARAMETER Experiment Name: At_0.001%_MeJA__cDNA_P Parameter: Treatment Value: 0.001% MeJA vs. No Treatment
  misc_feature: MA Experiment ID: 108573 Result: Down-regulated in Transcription
  misc_feature: MA Experiment 108573 PARAMETER Experiment Name: At_Drought_cDNA_P Parameter: Timepoint (hr) Value: 6
  misc_feature: MA Experiment 108573 PARAMETER Experiment Name: At_Drought_cDNA_P Parameter: Tissue Value: Aerial
  misc_feature: MA Experiment 108573 PARAMETER Experiment Name: At_Drought_cDNA_P Parameter: Treatment Value: Drought vs. No Drought
  misc_feature: MA Experiment ID: 108595 Result: Up-regulated in Transcription
  misc_feature: MA Experiment 108595 PARAMETER Experiment Name: At_Ler-pi_Ovule_cDNA_P Parameter: Plant Line Value: null
  misc_feature: MA Experiment ID: 20000093 Result: Down-regulated in Transcription
  misc_feature: MA Experiment 20000093 PARAMETER Experiment Name: At_42deg_Heat_cDNA_P Parameter: Temperature (deg C) Value: 42 vs. 22
  misc_feature: MA Experiment 20000093 PARAMETER Experiment Name: At_42deg_Heat_cDNA_P Parameter: Timepoint (hr) Value: 0.5
  misc_feature: MA Experiment 20000093 PARAMETER Experiment Name: At_42deg_Heat_cDNA_P Parameter: Tissue Value: Aerial
  misc_feature: MA Experiment ID: 20000112 Result: Down-regulated in Transcription
  misc_feature: MA Experiment 20000112 PARAMETER Experiment Name: At_42deg_Heat_cDNA_P Parameter: Temperature (deg C) Value: 42 vs. 22
  misc_feature: MA Experiment 20000112 PARAMETER Experiment Name: At_42deg_Heat_cDNA_P Parameter: Timepoint (hr) Value: 2
  misc_feature: MA Experiment 20000112 PARAMETER Experiment Name: At_42deg_Heat_cDNA_P Parameter: Tissue Value: Aerial
  misc_feature: MA Experiment ID: 20000171 Result: Down-regulated in Transcription
  misc_feature: MA Experiment 20000171 PARAMETER Experiment Name: At_42deg_Heat_P Parameter: Age (day) Value: 14
  misc_feature: MA Experiment 20000171 PARAMETER Experiment Name: At_42deg_Heat_P Parameter: Organism Value: A. thaliana
  misc_feature: MA Experiment 20000171 PARAMETER Experiment Name: At_42deg_Heat_P Parameter: Plant Line Value: WS
  misc_feature: MA Experiment 20000171 PARAMETER Experiment Name: At_42deg_Heat_P Parameter: Temperature (deg C) Value: 42 vs. 22
  misc_feature: MA Experiment 20000171 PARAMETER Experiment Name: At_42deg_Heat_P Parameter: Timepoint (hr) Value: 1
  misc_feature: MA Experiment 20000171 PARAMETER Experiment Name: At_42deg_Heat_P Parameter: Tissue Value: Aerial
  misc_feature: MA Experiment ID: 20000173 Result: Down-regulated in Transcription
  misc_feature: MA Experiment 20000173 PARAMETER Experiment Name: At_42deg_Heat_P Parameter: Age (day) Value: 14
  misc_feature: MA Experiment 20000173 PARAMETER Experiment Name: At_42deg_Heat_P Parameter: Organism Value: A. thaliana
  misc_feature: MA Experiment 20000173 PARAMETER Experiment Name: At_42deg_Heat_P Parameter: Plant Line Value: WS
  misc_feature: MA Experiment 20000173 PARAMETER Experiment Name: At_42deg_Heat_P Parameter: Temperature (deg C) Value: 42 vs. 22
  misc_feature: MA Experiment 20000173 PARAMETER Experiment Name: At_42deg_Heat_P Parameter: Timepoint (hr) Value: 6
  misc_feature: MA Experiment 20000173 PARAMETER Experiment Name: At_42deg_Heat_P Parameter: Tissue Value: Aerial
  misc_feature: MA Experiment ID: 20000437 Result: Down-regulated in Transcription
  misc_feature: MA Experiment 20000437 PARAMETER Experiment Name: At_Drought_P Parameter: Age (day) Value: 8
  misc_feature: MA Experiment 20000437 PARAMETER Experiment Name: At_Drought_P Parameter: Organism Value: A. thaliana
  misc_feature: MA Experiment 20000437 PARAMETER Experiment Name: At_Drought_P Parameter: Plant Line Value: WS
  misc_feature: MA Experiment 20000437 PARAMETER Experiment Name: At_Drought_P Parameter: Timepoint (hr) Value: 24
  misc_feature: MA Experiment 20000437 PARAMETER Experiment Name: At_Drought_P Parameter: Tissue Value: Whole Plant
  misc_feature: MA Experiment 20000437 PARAMETER Experiment Name: At_Drought_P Parameter: Treatment Value: Drought vs. No Drought
  misc_feature: MA Experiment ID: 20000451 Result: Up-regulated in Transcription
  misc_feature: MA Experiment 20000451 PARAMETER Experiment Name: At_CS6879_Shoots-Roots_P Parameter: Age (day) Value: 14
  misc_feature: MA Experiment 20000451 PARAMETER Experiment Name: At_CS6879_Shoots-Roots_P Parameter: Organism Value: A. thaliana
  misc_feature: MA Experiment 20000451 PARAMETER Experiment Name: At_CS6879_Shoots-Roots_P Parameter: Plant Line Value: CS6879 vs. WS
  misc_feature: MA Experiment 20000451 PARAMETER Experiment Name: At_CS6879_Shoots-Roots_P Parameter: Tissue Value: Roots
  misc_feature: MA Experiment ID: 20000452 Result: Up-regulated in Transcription
  misc_feature: MA Experiment 20000452 PARAMETER Experiment Name: At_CS6879_Shoots-Roots_P Parameter: Age (day) Value: 14
  misc_feature: MA Experiment 20000452 PARAMETER Experiment Name: At_CS6879_Shoots-Roots_P Parameter: Organism Value: A. thaliana
  misc_feature: MA Experiment 20000452 PARAMETER Experiment Name: At_CS6879_Shoots-Roots_P Parameter: Plant Line Value: CS6879 vs. WS
  misc_feature: MA Experiment 20000452 PARAMETER Experiment Name: At_CS6879_Shoots-Roots_P Parameter: Tissue Value: Shoots
aaaaaccattcggcaaaatcaaataatctttttcttagttcgaatttaatttcccaagagaaaaatgtcaggccgaggaaagggaggaaaaggattaggaaagggaggagccaagagacatcggaaagtactcagagacaacatccaagggattaccaaacctgcgattcgtcgtctcgcgagaagaggaggcgtgaagcgtatcagtggtttgatctatgaagagactcgcggcgttctcaagatctttctcgagaacgtgattcgtgacgccgttacttacacggagcacgctcgccggaaaactgttacggcgatggacgtcgtttacgctctcaagagacaaggacgaactttgtatggattcggcggctaaatcgttcggattgcaatttcggattttgtaaactcttcaatttcagcatctagggatttcagatttgtaatttctcagttaaacgatgaatgaattgaaaaaaaaagaattgtctcc

SEQ ID NO: 29266 - protein, 103 aa, Arabidopsis thaliana; identical to SEQ ID NO: 7737
  peptide (1)..(103): Ceres Seq. ID no. 13489282
  misc_feature (1)..(103): Homolog of NCBI NO: 462242 NR Description: Histone H4
  misc_feature (1)..(103): Homolog of NCBI NO: 37590121 NR Description: Hist1h4h protein [Mus musculus]
  misc_feature (1)..(103): Homolog of NCBI NO: 34858262 NR Description: similar to germinal histone H4 gene [Rattus
  misc_feature (1)..(103): Homolog of NCBI NO: 27692935 NR Description: Hist1h4i protein [Mus musculus]
  misc_feature (1)..(103): Homolog of NCBI NO: 4504301 NR Description: H4 histone family, member A [Homo sapiens]
  misc_feature (1)..(103): Homolog of NCBI NO: 1806283 NR Description: Histone H4 homologue [Sesbania rostrata]
  misc_feature (1)..(103): Homolog of NCBI NO: 462243 NR Description: Histone H4
  misc_feature (1)..(103): Homolog of NCBI NO: 27692960 NR Description: Similar to germinal histone H4 gene [Mus musculus]
  misc_feature (1)..(103): Homolog of NCBI NO: 15226944 NR Description: histone H4 [Arabidopsis thaliana]
  misc_feature (1)..(103): Homolog of NCBI NO: 34876368 NR Description: similar to germinal histone H4 gene [Rattus

SEQ ID NO: 29267 - protein, 73 aa, Arabidopsis thaliana
  peptide (1)..(73): Ceres Seq. ID no. 13489283
KNHSAKSNNLFLSSNLISQEKNVRPRKGRKRIRKGRSQETSESTQRQHPRDYQTCDSSSREKRRREAYQWFDL

SEQ ID NO: 29268 - DNA, 805 bp, Arabidopsis thaliana
  misc_feature (1)..(805): Ceres Seq. ID no. 12466452
  misc_feature: MA Experiment ID: 108461 Result: Up-regulated in Transcription
  misc_feature: MA Experiment 108461 PARAMETER Experiment Name: At_Germinating_Seeds_cDNA_P Parameter: Age (day) Value: 1 vs. 0
  misc_feature: MA Experiment 108461 PARAMETER Experiment Name: At_Germinating_Seeds_cDNA_P Parameter: Tissue Value: Germinating Seeds
  misc_feature: MA Experiment ID: 108462 Result: Up-regulated in Transcription
  misc_feature: MA Experiment 108462 PARAMETER Experiment Name: At_Germinating_Seeds_cDNA_P Parameter: Age (day) Value: 2 vs. 0
  misc_feature: MA Experiment 108462 PARAMETER Experiment Name: At_Germinating_Seeds_cDNA_P Parameter: Tissue Value: Germinating Seeds
  misc_feature: MA Experiment ID: 108463 Result: Up-regulated in Transcription
  misc_feature: MA Experiment 108463 PARAMETER Experiment Name: At_Germinating_Seeds_cDNA_P Parameter: Age (day) Value: 3 vs. 0
  misc_feature: MA Experiment 108463 PARAMETER Experiment Name: At_Germinating_Seeds_cDNA_P Parameter: Tissue Value: Germinating Seeds
  misc_feature: MA Experiment ID: 108464 Result: Up-regulated in Transcription
  misc_feature: MA Experiment 108464 PARAMETER Experiment Name: At_Germinating_Seeds_cDNA_P Parameter: Age (day) Value: 4 vs. 0
  misc_feature: MA Experiment 108464 PARAMETER Experiment Name: At_Germinating_Seeds_cDNA_P Parameter: Tissue Value: Germinating Seeds
  misc_feature: MA Experiment ID: 108474 Result: Down-regulated in Transcription
  misc_feature: MA Experiment 108474 PARAMETER Experiment Name: At_Drought_Flowers_cDNA_P Parameter: Timepoint (hr) Value: null
  misc_feature: MA Experiment 108474 PARAMETER Experiment Name: At_Drought_Flowers_cDNA_P Parameter: Treatment Value: Drought vs. No Drought
  misc_feature: MA Experiment ID: 108488 Result: Up-regulated in Transcription
  misc_feature: MA Experiment ID: 20000093 Result: Down-regulated in Transcription
  misc_feature: MA Experiment 20000093 PARAMETER Experiment Name: At_42deg_Heat_cDNA_P Parameter: Temperature (deg C) Value: 42 vs. 22
  misc_feature: MA Experiment 20000093 PARAMETER Experiment Name: At_42deg_Heat_cDNA_P Parameter: Timepoint (hr) Value: 0.5
  misc_feature: MA Experiment 20000093 PARAMETER Experiment Name: At_42deg_Heat_cDNA_P Parameter: Tissue Value: Aerial
  misc_feature: MA Experiment ID: 20000111 Result: Down-regulated in Transcription
  misc_feature: MA Experiment 20000111 PARAMETER Experiment Name: At_42deg_Heat_cDNA_P Parameter: Temperature (deg C) Value: 42 vs. 22
  misc_feature: MA Experiment 20000111 PARAMETER Experiment Name: At_42deg_Heat_cDNA_P Parameter: Timepoint (hr) Value: 6
  misc_feature: MA Experiment 20000111 PARAMETER Experiment Name: At_42deg_Heat_cDNA_P Parameter: Tissue Value: Aerial
  misc_feature: MA Experiment ID: 20000112 Result: Down-regulated in Transcription
  misc_feature: MA Experiment 20000112 PARAMETER Experiment Name: At_42deg_Heat_cDNA_P Parameter: Temperature (deg C) Value: 42 vs. 22
  misc_feature: MA Experiment 20000112 PARAMETER Experiment Name: At_42deg_Heat_cDNA_P Parameter: Timepoint (hr) Value: 2
  misc_feature: MA Experiment 20000112 PARAMETER Experiment Name: At_42deg_Heat_cDNA_P Parameter: Tissue Value: Aerial
  misc_feature: MA Experiment ID: 20000113 Result: Down-regulated in Transcription
  misc_feature: MA Experiment 20000113 PARAMETER Experiment Name: At_42deg_Heat_cDNA_P Parameter: Temperature (deg C) Value: 42 vs. 22
  misc_feature: MA Experiment 20000113 PARAMETER Experiment Name: At_42deg_Heat_cDNA_P Parameter: Timepoint (hr) Value: 8
  misc_feature: MA Experiment 20000113 PARAMETER Experiment Name: At_42deg_Heat_cDNA_P Parameter: Tissue Value: Aerial
  misc_feature: MA Experiment ID: 20000144 Result: Down-regulated in Transcription
  misc_feature: MA Experiment 20000144 PARAMETER Experiment Name: At_42deg_Heat_cDNA_P Parameter: Temperature (deg C) Value: 42 vs. 22
  misc_feature: MA Experiment 20000144 PARAMETER Experiment Name: At_42deg_Heat_cDNA_P Parameter: Timepoint (hr) Value: 1
  misc_feature: MA Experiment 20000144 PARAMETER Experiment Name: At_42deg_Heat_cDNA_P Parameter: Tissue Value: Aerial
  misc_feature: MA Experiment ID: 20000171 Result: Down-regulated in Transcription
  misc_feature: MA Experiment 20000171 PARAMETER Experiment Name: At_42deg_Heat_P Parameter: Age (day) Value: 14
  misc_feature: MA Experiment 20000171 PARAMETER Experiment Name: At_42deg_Heat_P Parameter: Organism Value: A. thaliana
  misc_feature: MA Experiment 20000171 PARAMETER Experiment Name: At_42deg_Heat_P Parameter: Plant Line Value: WS
  misc_feature: MA Experiment 20000171 PARAMETER Experiment Name: At_42deg_Heat_P Parameter: Temperature (deg C) Value: 42 vs. 22
  misc_feature: MA Experiment 20000171 PARAMETER Experiment Name: At_42deg_Heat_P Parameter: Timepoint (hr) Value: 1
  misc_feature: MA Experiment 20000171 PARAMETER Experiment Name: At_42deg_Heat_P Parameter: Tissue Value: Aerial
  misc_feature: MA Experiment ID: 20000173 Result: Down-regulated in Transcription
  misc_feature: MA Experiment 20000173 PARAMETER Experiment Name: At_42deg_Heat_P Parameter: Age (day) Value: 14
  misc_feature: MA Experiment 20000173 PARAMETER Experiment Name: At_42deg_Heat_P Parameter: Organism Value: A. thaliana
  misc_feature: MA Experiment 20000173 PARAMETER Experiment Name: At_42deg_Heat_P Parameter: Plant Line Value: WS
  misc_feature: MA Experiment 20000173 PARAMETER Experiment Name: At_42deg_Heat_P Parameter: Temperature (deg C) Value: 42 vs. 22
  misc_feature: MA Experiment 20000173 PARAMETER Experiment Name: At_42deg_Heat_P Parameter: Timepoint (hr) Value: 6
  misc_feature: MA Experiment 20000173 PARAMETER Experiment Name: At_42deg_Heat_P Parameter: Tissue Value: Aerial
  misc_feature: MA Experiment ID: 20000180 Result: Up-regulated in Transcription
  misc_feature: MA Experiment 20000180 PARAMETER Experiment Name: At_Germinating_Seeds_P Parameter: Age (hr) Value: 24 vs. 0
  misc_feature: MA Experiment 20000180 PARAMETER Experiment Name: At_Germinating_Seeds_P Parameter: Tissue Value: Germinating Seeds
  misc_feature: MA Experiment ID: 20000185 Result: Down-regulated in Transcription
  misc_feature: MA Experiment 20000185 PARAMETER Experiment Name: At_Roots__P Parameter: Age (day) Value: 7 vs. 21
  misc_feature: MA Experiment 20000185 PARAMETER Experiment Name: At_Roots__P Parameter: Organism Value: A. thaliana
  misc_feature: MA Experiment 20000185 PARAMETER Experiment Name: At_Roots__P Parameter: Tissue Value: Roots vs. Whole Plant
  misc_feature: MA Experiment ID: 20000234 Result: Up-regulated in Transcription
  misc_feature: MA Experiment 20000234 PARAMETER Experiment Name: At_Siliques_P Parameter: Age (day) Value: 21
  misc_feature: MA Experiment 20000234 PARAMETER Experiment Name: At_Siliques_P Parameter: Organism Value: A. thaliana
  misc_feature: MA Experiment 20000234 PARAMETER Experiment Name: At_Siliques_P Parameter: Plant Line Value: WS
  misc_feature: MA Experiment 20000234 PARAMETER Experiment Name: At_Siliques_P Parameter: Tissue Value: Less Than 5mm Siliques vs. Whole Plant
  misc_feature: MA Experiment ID: 20000264 Result: Up-regulated in Transcription
  misc_feature: MA Experiment 20000264 PARAMETER Experiment Name: At_Open_Flower_P Parameter: Age (day) Value: 21
  misc_feature: MA Experiment 20000264 PARAMETER Experiment Name: At_Open_Flower_P Parameter: Plant Line Value: WS
  misc_feature: MA Experiment 20000264 PARAMETER Experiment Name: At_Open_Flower_P Parameter: Tissue Value: Open Flower vs. Whole Plant
  misc_feature: MA Experiment ID: 20000265 Result: Up-regulated in Transcription
  misc_feature: MA Experiment 20000265 PARAMETER Experiment Name: At_Open_Flower_P Parameter: Age (day) Value: 21
  misc_feature: MA Experiment 20000265 PARAMETER Experiment Name: At_Open_Flower_P Parameter: Plant Line Value: WS
  misc_feature: MA Experiment 20000265 PARAMETER Experiment Name: At_Open_Flower_P Parameter: Tissue Value: Closed Flower vs. Whole Plant
  misc_feature: MA Experiment ID: 20000286 Result: Up-regulated in Transcription
  misc_feature: MA Experiment 20000286 PARAMETER Experiment Name: At_Open_Flower_P Parameter: Age (day) Value: 21
  misc_feature: MA Experiment 20000286 PARAMETER Experiment Name: At_Open_Flower_P Parameter: Plant Line Value: WS
  misc_feature: MA Experiment 20000286 PARAMETER Experiment Name: At_Open_Flower_P Parameter: Tissue Value: Half Open vs. Whole Plant
  misc_feature: MA Experiment ID: 20000436 Result: Down-regulated in Transcription
  misc_feature: MA Experiment 20000436 PARAMETER Experiment Name: At_Drought_P Parameter: Age (day) Value: 7
  misc_feature: MA Experiment 20000436 PARAMETER Experiment Name: At_Drought_P Parameter: Organism Value: A. thaliana
  misc_feature: MA Experiment 20000436 PARAMETER Experiment Name: At_Drought_P Parameter: Plant Line Value: WS
  misc_feature: MA Experiment 20000436 PARAMETER Experiment Name: At_Drought_P Parameter: Timepoint (hr) Value: 12
  misc_feature: MA Experiment 20000436 PARAMETER Experiment Name: At_Drought_P Parameter: Tissue Value: Whole Plant
  misc_feature: MA Experiment 20000436 PARAMETER Experiment Name: At_Drought_P Parameter: Treatment Value: Drought vs. No Drought
  misc_feature: MA Experiment ID: 20000437 Result: Down-regulated in Transcription
  misc_feature: MA Experiment 20000437 PARAMETER Experiment Name: At_Drought_P Parameter: Age (day) Value: 8
  misc_feature: MA Experiment 20000437 PARAMETER Experiment Name: At_Drought_P Parameter: Organism Value: A. thaliana
  misc_feature: MA Experiment 20000437 PARAMETER Experiment Name: At_Drought_P Parameter: Plant Line Value: WS
  misc_feature: MA Experiment 20000437 PARAMETER Experiment Name: At_Drought_P Parameter: Timepoint (hr) Value: 24
  misc_feature: MA Experiment 20000437 PARAMETER Experiment Name: At_Drought_P Parameter: Tissue Value: Whole Plant
  misc_feature: MA Experiment 20000437 PARAMETER Experiment Name: At_Drought_P Parameter: Treatment Value: Drought vs. No Drought
  misc_feature: MA Experiment ID: 20000438 Result: Up-regulated in Transcription
  misc_feature: MA Experiment 20000438 PARAMETER Experiment Name: At_Shoots__P Parameter: Age (day) Value: 14
  misc_feature: MA Experiment 20000438 PARAMETER Experiment Name: At_Shoots__P Parameter: Tissue Value: Shoots vs. Whole Plant
  misc_feature: MA Experiment ID: 20000439 Result: Down-regulated in Transcription
  misc_feature: MA Experiment 20000439 PARAMETER Experiment Name: At_Roots__P Parameter: Age (day) Value: 14 vs. 21
  misc_feature: MA Experiment 20000439 PARAMETER Experiment Name: At_Roots__P Parameter: Organism Value: A. thaliana
  misc_feature: MA Experiment 20000439 PARAMETER Experiment Name: At_Roots__P Parameter: Tissue Value: Roots vs. Whole Plant
  misc_feature: MA Experiment ID: 20000441 Result: Down-regulated in Transcription
  misc_feature: MA Experiment 20000441 PARAMETER Experiment Name: At_1uM_BR-BRZ__P Parameter: Tissue Value: Shoot Apices
  misc_feature: MA Experiment 20000441 PARAMETER Experiment Name: At_1uM_BR-BRZ__P Parameter: Treatment Value: 1uM BR vs. No Treatment
  misc_feature: MA Experiment ID: 20000451 Result: Up-regulated in Transcription
  misc_feature: MA Experiment 20000451 PARAMETER Experiment Name: At_CS6879_Shoots-Roots_P Parameter: Age (day) Value: 14
  misc_feature: MA Experiment 20000451 PARAMETER Experiment Name: At_CS6879_Shoots-Roots_P Parameter: Organism Value: A. thaliana
  misc_feature: MA Experiment 20000451 PARAMETER Experiment Name: At_CS6879_Shoots-Roots_P Parameter: Plant Line Value: CS6879 vs. WS
  misc_feature: MA Experiment 20000451 PARAMETER Experiment Name: At_CS6879_Shoots-Roots_P Parameter: Tissue Value: Roots
  misc_feature: MA Experiment ID: 20000573 Result: Down-regulated in Transcription
  misc_feature: MA Experiment 20000573 PARAMETER Experiment Name: At_100uM_ABA_Mutants__P Parameter: Organism Value: A. thaliana
  misc_feature: MA Experiment 20000573 PARAMETER Experiment Name: At_100uM_ABA_Mutants__P Parameter: Plant Line Value: CS22 vs. Ler wt
  misc_feature: MA Experiment 20000573 PARAMETER Experiment Name: At_100uM_ABA_Mutants__P Parameter: Timepoint (hr) Value: N/A
  misc_feature: MA Experiment 20000573 PARAMETER Experiment Name: At_100uM_ABA_Mutants__P Parameter: Tissue Value: Whole Plant
  misc_feature: MA Experiment 20000573 PARAMETER Experiment Name: At_100uM_ABA_Mutants__P Parameter: Treatment Value: None
  misc_feature: MA Experiment ID: 20000794 Result: Up-regulated in Transcription
  misc_feature: MA Experiment 20000794 PARAMETER Experiment Name: At_Petals_P Parameter: Age (day) Value: 23-25 days
  misc_feature: MA Experiment 20000794 PARAMETER Experiment Name: At_Petals_P Parameter: Plant Line Value: WS
  misc_feature: MA Experiment 20000794 PARAMETER Experiment Name: At_Petals_P Parameter: Tissue Value: Petals vs. Whole plant
  misc_feature: MA Experiment ID: 20001248 Result: Down-regulated in Transcription
  misc_feature: MA Experiment 20001248 PARAMETER Experiment Name: At_Far-red-induction_P Parameter: Age (day) Value: 7
  misc_feature: MA Experiment 20001248 PARAMETER Experiment Name: At_Far-red-induction_P Parameter: Light Value: Far-red vs. White
  misc_feature: MA Experiment 20001248 PARAMETER Experiment Name: At_Far-red-induction_P Parameter: Organism Value: A. thaliana
  misc_feature: MA Experiment 20001248 PARAMETER Experiment Name: At_Far-red-induction_P Parameter: Plant Line Value: Columbia
  misc_feature: MA Experiment 20001248 PARAMETER Experiment Name: At_Far-red-induction_P Parameter: Timepoint (hr) Value: 4
  misc_feature: MA Experiment 20001248 PARAMETER Experiment Name: At_Far-red-induction_P Parameter: Tissue Value: Whole Plant
  misc_feature: MA Experiment ID: 20001450 Result: Down-regulated in Transcription
  misc_feature: MA Experiment 20001450 PARAMETER Experiment Name: At_Far-red-induction_P Parameter: Age (day) Value: 7
  misc_feature: MA Experiment 20001450 PARAMETER Experiment Name: At_Far-red-induction_P Parameter: Light Value: Far-red vs. White
  misc_feature: MA Experiment 20001450 PARAMETER Experiment Name: At_Far-red-induction_P Parameter: Organism Value: A. thaliana
  misc_feature: MA Experiment 20001450 PARAMETER Experiment Name: At_Far-red-induction_P Parameter: Plant Line Value: Columbia
  misc_feature: MA Experiment 20001450 PARAMETER Experiment Name: At_Far-red-induction_P Parameter: Timepoint (hr) Value: 8
  misc_feature: MA Experiment 20001450 PARAMETER Experiment Name: At_Far-red-induction_P Parameter: Tissue Value: Whole Plant
  misc_feature: MA Experiment ID: 20001558 Result: Up-regulated in Transcription
  misc_feature: MA Experiment 20001558 PARAMETER Experiment Name: At_Drought_Soil_Dry_P Parameter: Age (day) Value: 27
  misc_feature: MA Experiment 20001558 PARAMETER Experiment Name: At_Drought_Soil_Dry_P Parameter: Organism Value: A. thaliana
  misc_feature: MA Experiment 20001558 PARAMETER Experiment Name: At_Drought_Soil_Dry_P Parameter: Plant Line Value: WS
  misc_feature: MA Experiment 20001558 PARAMETER Experiment Name: At_Drought_Soil_Dry_P Parameter: Post Timepoint (hr) Value: 6
  misc_feature: MA Experiment 20001558 PARAMETER Experiment Name: At_Drought_Soil_Dry_P Parameter: Post-Treatment Value: Re-Water vs. No Drought
  misc_feature: MA Experiment 20001558 PARAMETER Experiment Name: At_Drought_Soil_Dry_P Parameter: Timepoint (day) Value: 13
  misc_feature: MA Experiment 20001558 PARAMETER Experiment Name: At_Drought_Soil_Dry_P Parameter: Treatment Value: Drought vs. No Drought
  misc_feature: MA Experiment ID: 20001560 Result: Up-regulated in Transcription
  misc_feature: MA Experiment 20001560 PARAMETER Experiment Name: At_Drought_Soil_Dry_P Parameter: Age (day) Value: 28
  misc_feature: MA Experiment 20001560 PARAMETER Experiment Name: At_Drought_Soil_Dry_P Parameter: Organism Value: A. thaliana
  misc_feature: MA Experiment 20001560 PARAMETER Experiment Name: At_Drought_Soil_Dry_P Parameter: Plant Line Value: WS
  misc_feature: MA Experiment 20001560 PARAMETER Experiment Name: At_Drought_Soil_Dry_P Parameter: Post Timepoint (hr) Value: None
  misc_feature: MA Experiment 20001560 PARAMETER Experiment Name: At_Drought_Soil_Dry_P Parameter: Post-Treatment Value: None
  misc_feature: MA Experiment 20001560 PARAMETER Experiment Name: At_Drought_Soil_Dry_P Parameter: Timepoint (day) Value: 14
  misc_feature: MA Experiment 20001560 PARAMETER Experiment Name: At_Drought_Soil_Dry_P Parameter: Treatment Value: Drought vs. No Drought
aggacacgtttctatctagagagaacacaacacatcgaaccatggagaaatcaacaagaaccctattcataaccatcgtgataacctccatgttgctagggtttggaaactctgatcttgctcaggacagagaggagtgtacgaaccagctcatagaactatccacgtgtattccgtacgttggaggagacgccaaggctccaacaaaagattgttgtgcagggtttggccaagttataagaaagagtgagaagtgtgtttgcatattggtcagagacaaagatgatcctcaacttggtatcaagattaacgcaaccctagccgctcatcttccctccgcttgtcatatcacggctcctaacatcactgactgtatttcgattctgcatctacctcgtaactcaacattggctaaagagtttgagaacttaggaaggattgaagacaactacaactccacatctcctacacaaattcataaagatgggacaggaggaggaaaagccgaaccagtgaagagtaatggatggaaggagaagagttggttgggtgttgagcttttaatatatttgctagtttctctcatcttcttttaattacttcctttctttaatgttcctttgctttattattacaataacttataagatatctatttatatatgagacacatgcatgtgtttgcgatctatatgcatgtaaatgagtcactggttaatttttaatcacgaagcgtacattttaatttcgttgttgccaattgatcttgtacgttagtgaattttatggattatcgacttactat

SEQ ID NO: 29269 - protein, 197 aa, Arabidopsis thaliana
  peptide (1)..(197): Ceres Seq. ID no. 12466453
  misc_feature (46)..(124): Pfam Name: Protease inhibitor/seed storage/LTP family Pfam Description: Protease inhibitor/seed storage/LTP family
  misc_feature (19)..(124): Homolog of NCBI NO: 18407534 NR Description: expressed protein
  misc_feature (25)..(126): Homolog of NCBI NO: 25553602 NR Description: OJ1656_E11.34 [Oryza sativa (japonica
  misc_feature (19)..(175): Homolog of NCBI NO: 21592774 NR Description: unknown [Arabidopsis thaliana]
  misc_feature (21)..(141): Homolog of NCBI NO: 21555220 NR Description: unknown [Arabidopsis thaliana]
  misc_feature (16)..(141): Homolog of NCBI NO: 15231070 NR Description: putative protein
  misc_feature (11)..(185): Homolog of NCBI NO: 34394084 NR Description: lipid transfer protein-like
  misc_feature (23)..(197): Homolog of NCBI NO: 15224862 NR Description: unknown protein; protein id: At2g44290.1
  misc_feature (23)..(197): Homolog of NCBI NO: 15224863 NR Description: unknown protein; protein id: At2g44300.1
  misc_feature (30)..(197): Homolog of NCBI NO: 21537387 NR Description: unknown [Arabidopsis thaliana]
  misc_feature (14)..(197): Homolog of NCBI NO: 18405294 NR Description: expressed protein
DTFLSRENTTHRTMEKSTRTLFITIVITSMLLGFGNSDLAQDREECTNQLIELSTCIPYVGGDAKAPTKDCCAGFGQVIRKSEKCVCILVRDKDDPQLGIKINATLAAHLPSACHITAPNITDCISILHLPRNSTLAKEFENLGRIEDNYNSTSPTQIHKDGTGGGKAEPVKSNGWKEKSWLGVELLIYLLVSLIFF

SEQ ID NO: 29270 - protein, 184 aa, Arabidopsis thaliana
  peptide (1)..(184): Ceres Seq. ID no. 12466454
  misc_feature (33)..(111): Pfam Name: Protease inhibitor/seed storage/LTP family Pfam Description: Protease inhibitor/seed storage/LTP family
  misc_feature (6)..(111): Homolog of NCBI NO: 18407534 NR Description: expressed protein
  misc_feature (12)..(113): Homolog of NCBI NO: 25553602 NR Description: OJ1656_E11.34 [Oryza sativa (japonica
  misc_feature (6)..(162): Homolog of NCBI NO: 21592774 NR Description: unknown [Arabidopsis thaliana]
  misc_feature (8)..(128): Homolog of NCBI NO: 21555220 NR Description: unknown [Arabidopsis thaliana]
  misc_feature (3)..(128): Homolog of NCBI NO: 15231070 NR Description: putative protein
  misc_feature (1)..(172): Homolog of NCBI NO: 34394084 NR Description: lipid transfer protein-like
  misc_feature (10)..(184): Homolog of NCBI NO: 15224862 NR Description: unknown protein; protein id: At2g44290.1
  misc_feature (10)..(184): Homolog of NCBI NO: 15224863 NR Description: unknown protein; protein id: At2g44300.1
  misc_feature (17)..(184): Homolog of NCBI NO: 21537387 NR Description: unknown [Arabidopsis thaliana]
  misc_feature (1)..(184): Homolog of NCBI NO: 18405294 NR Description: expressed protein
MEKSTRTLFITIVITSMLLGFGNSDLAQDREECTNQLIELSTCIPYVGGDAKAPTKDCCAGFGQVIRKSEKCVCILVRDKDDPQLGIKINATLAAHLPSACHITAPNITDCISILHLPRNSTLAKEFENLGRIEDNYNSTSPTQIHKDGTGGGKAEPVKSNGWKEKSWLGVELLIYLLVSLIFF

SEQ ID NO: 29271 - protein, 168 aa, Arabidopsis thaliana
  peptide (1)..(168): Ceres Seq. ID no. 12466455
  misc_feature (17)..(95): Pfam Name: Protease inhibitor/seed storage/LTP family Pfam Description: Protease inhibitor/seed storage/LTP family
  misc_feature (1)..(95): Homolog of NCBI NO: 18407534 NR Description: expressed protein
  misc_feature (1)..(97): Homolog of NCBI NO: 25553602 NR Description: OJ1656_E11.34 [Oryza sativa (japonica
  misc_feature (1)..(146): Homolog of NCBI NO: 21592774 NR Description: unknown [Arabidopsis thaliana]
  misc_feature (1)..(112): Homolog of NCBI NO: 21555220 NR Description: unknown [Arabidopsis thaliana]
  misc_feature (1)..(112): Homolog of NCBI NO: 15231070 NR Description: putative protein
  misc_feature (1)..(156): Homolog of NCBI NO: 34394084 NR Description: lipid transfer protein-like
  misc_feature (1)..(168): Homolog of NCBI NO: 15224862 NR Description: unknown protein; protein id: At2g44290.1
  misc_feature (1)..(168): Homolog of NCBI NO: 15224863 NR Description: unknown protein; protein id: At2g44300.1
  misc_feature (1)..(168): Homolog of NCBI NO: 21537387 NR Description: unknown [Arabidopsis thaliana]
  misc_feature (1)..(168): Homolog of NCBI NO: 18405294 NR Description: expressed protein
MLLGFGNSDLAQDREECTNQLIELSTCIPYVGGDAKAPTKDCCAGFGQVIRKSEKCVCILVRDKDDPQLGIKINATLAAHLPSACHITAPNITDCISILHLPRNSTLAKEFENLGRIEDNYNSTSPTQIHKDGTGGGKAEPVKSNGWKEKSWLGVELLIYLLVSLIFF

SEQ ID NO: 29272 - DNA, 703 bp, Arabidopsis thaliana
  misc_feature (1)..(703): Ceres Seq. ID no. 12393111
  misc_feature: MA Experiment ID: 108461 Result: Up-regulated in Transcription
  misc_feature: MA Experiment 108461 PARAMETER Experiment Name: At_Germinating_Seeds_cDNA_P Parameter: Age (day) Value: 1 vs. 0
  misc_feature: MA Experiment 108461 PARAMETER Experiment Name: At_Germinating_Seeds_cDNA_P Parameter: Tissue Value: Germinating Seeds
  misc_feature: MA Experiment ID: 108474 Result: Down-regulated in Transcription
  misc_feature: MA Experiment 108474 PARAMETER Experiment Name: At_Drought_Flowers_cDNA_P Parameter: Timepoint (hr) Value: null
  misc_feature: MA Experiment 108474 PARAMETER Experiment Name: At_Drought_Flowers_cDNA_P Parameter: Treatment Value: Drought vs. No Drought
  misc_feature: MA Experiment ID: 108489 Result: Up-regulated in Transcription
  misc_feature: MA Experiment ID: 20000111 Result: Up-regulated in Transcription
  misc_feature: MA Experiment 20000111 PARAMETER Experiment Name: At_42deg_Heat_cDNA_P Parameter: Temperature (deg C) Value: 42 vs. 22
  misc_feature: MA Experiment 20000111 PARAMETER Experiment Name: At_42deg_Heat_cDNA_P Parameter: Timepoint (hr) Value: 6
  misc_feature: MA Experiment 20000111 PARAMETER Experiment Name: At_42deg_Heat_cDNA_P Parameter: Tissue Value: Aerial
  misc_feature: MA Experiment ID: 20000113 Result: Up-regulated in Transcription
  misc_feature: MA Experiment 20000113 PARAMETER Experiment Name: At_42deg_Heat_cDNA_P Parameter: Temperature (deg C) Value: 42 vs. 22
  misc_feature: MA Experiment 20000113 PARAMETER Experiment Name: At_42deg_Heat_cDNA_P Parameter: Timepoint (hr) Value: 8
  misc_feature: MA Experiment 20000113 PARAMETER Experiment Name: At_42deg_Heat_cDNA_P Parameter: Tissue Value: Aerial
  misc_feature: MA Experiment ID: 20000144 Result: Up-regulated in Transcription
  misc_feature: MA Experiment 20000144 PARAMETER Experiment Name: At_42deg_Heat_cDNA_P Parameter: Temperature (deg C) Value: 42 vs. 22
  misc_feature: MA Experiment 20000144 PARAMETER Experiment Name: At_42deg_Heat_cDNA_P Parameter: Timepoint (hr) Value: 1
  misc_feature: MA Experiment 20000144 PARAMETER Experiment Name: At_42deg_Heat_cDNA_P Parameter: Tissue Value: Aerial
  misc_feature: MA Experiment ID: 20000265 Result: Up-regulated in Transcription
  misc_feature: MA Experiment 20000265 PARAMETER Experiment Name: At_Open_Flower_P Parameter: Age (day) Value: 21
  misc_feature: MA Experiment 20000265 PARAMETER Experiment Name: At_Open_Flower_P Parameter: Plant Line Value: WS
  misc_feature: MA Experiment 20000265 PARAMETER Experiment Name: At_Open_Flower_P Parameter: Tissue Value: Closed Flower vs. Whole Plant
  misc_feature: MA Experiment ID: 20000286 Result: Up-regulated in Transcription
  misc_feature: MA Experiment 20000286 PARAMETER Experiment Name: At_Open_Flower_P Parameter: Age (day) Value: 21
  misc_feature: MA Experiment 20000286 PARAMETER Experiment Name: At_Open_Flower_P Parameter: Plant Line Value: WS
  misc_feature: MA Experiment 20000286 PARAMETER Experiment Name: At_Open_Flower_P Parameter: Tissue Value: Half Open vs. Whole Plant
  misc_feature: MA Experiment ID: 20001910 Result: Up-regulated in Transcription
  misc_feature: MA Experiment 20001910 PARAMETER Experiment Name: At_Drought_Reproduction_P Parameter: Age (day) Value: 37
  misc_feature: MA Experiment 20001910 PARAMETER Experiment Name: At_Drought_Reproduction_P Parameter: Organism Value: A. thaliana
  misc_feature: MA Experiment 20001910 PARAMETER Experiment Name: At_Drought_Reproduction_P Parameter: Plant Line Value: WS
  misc_feature: MA Experiment 20001910 PARAMETER Experiment Name: At_Drought_Reproduction_P Parameter: Timepoint (day) Value: 7
  misc_feature: MA Experiment 20001910 PARAMETER Experiment Name: At_Drought_Reproduction_P Parameter: Tissue Value: Flowers
  misc_feature: MA Experiment 20001910 PARAMETER Experiment Name: At_Drought_Reproduction_P Parameter: Treatment Value: Drought vs. No Drought
ataaccggggcacttaacgtatagatcataaacaaagaagaagaaaaaaaataagaaaagaagaagaagatgtcgtggcaaacttacgttgatgagcatttgatgtgtgatgttggcgatggtcaaggacaccaccttactgctgccgctatcgttggtcatgacggtagcgtttgggctcagagcgccaacttccctcagttcaagggacaggagttcagtgatattatgaaagatttcgacgaaccgggtcacttggcacccacgggattattcatggcaggagcaaagtacatggtgatccaaggtgagcccggggctgtaatccgtggcaagaagggagcaggaggcataacgataaagaaaacaggacagtcatgtgtgtttgggatctatgaagagccagtgacaccaggacagtgcaacatggtcgtcgagaggttgggtgattacctcctcgaacagggtctctagaatcttcttacaatgttccaccacctacatttttttataaggccattgtttctcctatttttttcctttgggtgatttgcatctctttctctaattgatattataagttttgggctaatggaccttcctggtttctccccatagcaaacttttaagaaagctgaagcctaaaaggcttttactctctttgccttggtttcttatttatatgcatgttttagttgttttc

SEQ ID NO: 29273 - protein, 134 aa, Arabidopsis thaliana
  peptide (1)..(134): Ceres Seq. ID no. 12393112
  misc_feature (2)..(129): Pfam Name: Profilin Pfam Description: Profilin
  misc_feature (1)..(133): Homolog of NCBI NO: 2129962 NR Description: profilin - common tobacco
  misc_feature (1)..(134): Homolog of NCBI NO: 464471 NR Description: PROFILIN 1 (POLLEN ALLERGEN PHL P 11) (PHL P XI)
  misc_feature (1)..(133): Homolog of NCBI NO: 6469497 NR Description: profilin [Nicotiana tabacum]
  misc_feature (1)..(134): Homolog of NCBI NO: 1942360 NR Description: Birch Pollen Profilin
  misc_feature (1)..(134): Homolog of NCBI NO: 3914432 NR Description: PROFILIN 2/4 (POLLEN ALLERGEN PHL P 11) (PHL P
  misc_feature (1)..(134): Homolog of NCBI NO: 3914446 NR Description: Profilin (Pollen allergen Mer a 1)
  misc_feature (1)..(134): Homolog of NCBI NO: 15224839 NR Description: profilin 4; protein id: At2g19770.1, supported by
  misc_feature (1)..(134): Homolog of NCBI NO: 14423854 NR Description: Profilin
  misc_feature (1)..(134): Homolog of NCBI NO: 28393116 NR Description: putative profilin 3 [Arabidopsis thaliana]
  misc_feature (1)..(134): Homolog of NCBI NO: 15233536 NR Description: profilin 3; protein id: At4g29340.1, supported by
MSWQTYVDEHLMCDVGDGQGHHLTAAAIVGHDGSVWAQSANFPQFKGQEFSDIMKDFDEPGHLAPTGLFMAGAKYMVIQGEPGAVIRGKKGAGGITIKKTGQSCVFGIYEEPVTPGQCNMVVERLGDYLLEQGL

SEQ ID NO: 29274 - protein, 123 aa, Arabidopsis thaliana
  peptide (1)..(123): Ceres Seq. ID no. 12393113
  misc_feature (1)..(118): Pfam Name: Profilin Pfam Description: Profilin
  misc_feature (1)..(122): Homolog of NCBI NO: 2129962 NR Description: profilin - common tobacco
  misc_feature (1)..(123): Homolog of NCBI NO: 464471 NR Description: PROFILIN 1 (POLLEN ALLERGEN PHL P 11) (PHL P XI)
  misc_feature (1)..(122): Homolog of NCBI NO: 6469497 NR Description: profilin [Nicotiana tabacum]
  misc_feature (1)..(123): Homolog of NCBI NO: 1942360 NR Description: Birch Pollen Profilin
  misc_feature (1)..(123): Homolog of NCBI NO: 3914432 NR Description: PROFILIN 2/4 (POLLEN ALLERGEN PHL P 11) (PHL P
  misc_feature (1)..(123): Homolog of NCBI NO: 3914446 NR Description: Profilin (Pollen allergen Mer a 1)
  misc_feature (1)..(123): Homolog of NCBI NO: 15224839 NR Description: profilin 4; protein id: At2g19770.1, supported by
  misc_feature (1)..(123): Homolog of NCBI NO: 14423854 NR Description: Profilin
  misc_feature (1)..(123): Homolog of NCBI NO: 28393116 NR Description: putative profilin 3 [Arabidopsis thaliana]
  misc_feature (1)..(123): Homolog of NCBI NO: 15233536 NR Description: profilin 3; protein id: At4g29340.1, supported by
MCDVGDGQGHHLTAAAIVGHDGSVWAQSANFPQFKGQEFSDIMKDFDEPGHLAPTGLFMAGAKYMVIQGEPGAVIRGKKGAGGITIKKTGQSCVFGIYEEPVTPGQCNMVVERLGDYLLEQGL

SEQ ID NO: 29275 - protein, 81 aa, Arabidopsis thaliana
  peptide (1)..(81): Ceres Seq. ID no. 12393114
  misc_feature (1)..(76): Pfam Name: Profilin Pfam Description: Profilin
  misc_feature (1)..(80): Homolog of NCBI NO: 2129962 NR Description: profilin - common tobacco
  misc_feature (1)..(81): Homolog of NCBI NO: 464471 NR Description: PROFILIN 1 (POLLEN ALLERGEN PHL P 11) (PHL P XI)
  misc_feature (1)..(80): Homolog of NCBI NO: 6469497 NR Description: profilin [Nicotiana tabacum]
  misc_feature (1)..(81): Homolog of NCBI NO: 1942360 NR Description: Birch Pollen Profilin
  misc_feature (1)..(81): Homolog of NCBI NO: 3914432 NR Description: PROFILIN 2/4 (POLLEN ALLERGEN PHL P 11) (PHL P
  misc_feature (1)..(81): Homolog of NCBI NO: 3914446 NR Description: Profilin (Pollen allergen Mer a 1)
  misc_feature (1)..(81): Homolog of NCBI NO: 15224839 NR Description: profilin 4; protein id: At2g19770.1, supported by
  misc_feature (1)..(81): Homolog of NCBI NO: 14423854 NR Description: Profilin
  misc_feature (1)..(81): Homolog of NCBI NO: 28393116 NR Description: putative profilin 3 [Arabidopsis thaliana]
  misc_feature (1)..(81): Homolog of NCBI NO: 15233536 NR Description: profilin 3; protein id: At4g29340.1, supported by
MKDFDEPGHLAPTGLFMAGAKYMVIQGEPGAVIRGKKGAGGITIKKTGQSCVFGIYEEPVTPGQCNMVVERLGDYLLEQGL

SEQ ID NO: 29276 - DNA, 684 bp, Arabidopsis thaliana
  misc_feature (1)..(684): Ceres Seq. ID no. 13593010
  misc_feature: MA Experiment ID: 108434 Result: Down-regulated in Transcription
  misc_feature: MA Experiment 108434 PARAMETER Experiment Name: At_Root_Tips_cDNA_P Parameter: Tissue Value: Root Tips
  misc_feature: MA Experiment ID: 108488 Result: Down-regulated in Transcription
  misc_feature: MA Experiment ID: 108573 Result: Up-regulated in Transcription
  misc_feature: MA Experiment 108573 PARAMETER Experiment Name: At_Drought_cDNA_P Parameter: Timepoint (hr) Value: 6
  misc_feature: MA Experiment 108573 PARAMETER Experiment Name: At_Drought_cDNA_P Parameter: Tissue Value: Aerial
  misc_feature: MA Experiment 108573 PARAMETER Experiment Name: At_Drought_cDNA_P Parameter: Treatment Value: Drought vs. No Drought
  misc_feature: MA Experiment ID: 108579 Result: Up-regulated in Transcription
  misc_feature: MA Experiment 108579 PARAMETER Experiment Name: At_4deg_Cold_cDNA_P Parameter: Temperature (deg C) Value: 4 vs. 22
  misc_feature: MA Experiment 108579 PARAMETER Experiment Name: At_4deg_Cold_cDNA_P Parameter: Timepoint (hr) Value: 6
  misc_feature: MA Experiment 108579 PARAMETER Experiment Name: At_4deg_Cold_cDNA_P Parameter: Tissue Value: Aerial
  misc_feature: MA Experiment ID: 108585 Result: Up-regulated in Transcription
  misc_feature: MA Experiment 108585 PARAMETER Experiment Name: At_5mM_NaNP_cDNA_P Parameter: Timepoint (hr) Value: 6
  misc_feature: MA Experiment 108585 PARAMETER Experiment Name: At_5mM_NaNP_cDNA_P Parameter: Tissue Value: Aerial
  misc_feature: MA Experiment 108585 PARAMETER Experiment Name: At_5mM_NaNP_cDNA_P Parameter: Treatment Value: null
  misc_feature: MA Experiment ID: 20000224 Result: Down-regulated in Transcription
  misc_feature: MA Experiment ID: 20000307 Result: Up-regulated in Transcription
  misc_feature: MA Experiment 20000307 PARAMETER Experiment Name: At_Germinating_Seeds_Sub_P Parameter: Age (hr) Value: 24 vs. 0
  misc_feature: MA Experiment 20000307 PARAMETER Experiment Name: At_Germinating_Seeds_Sub_P Parameter: Organism Value: A. thaliana
  misc_feature: MA Experiment 20000307 PARAMETER Experiment Name: At_Germinating_Seeds_Sub_P Parameter: Plant Line Value: WS
  misc_feature: MA Experiment 20000307 PARAMETER Experiment Name: At_Germinating_Seeds_Sub_P Parameter: Tissue Value: Germinating Seeds
  misc_feature: MA Experiment ID: 20000314 Result: Down-regulated in Transcription
  misc_feature: MA Experiment 20000314 PARAMETER Experiment Name: At_14day_Shoots-Roots_Sub_P Parameter: Age (day) Value: 14
  misc_feature: MA Experiment 20000314 PARAMETER Experiment Name: At_14day_Shoots-Roots_Sub_P Parameter: Organism Value: A. thaliana
  misc_feature: MA Experiment 20000314 PARAMETER Experiment Name: At_14day_Shoots-Roots_Sub_P Parameter: Plant Line Value: WS
  misc_feature: MA Experiment 20000314 PARAMETER Experiment Name: At_14day_Shoots-Roots_Sub_P Parameter: Tissue Value: Roots vs. Whole Plant
  misc_feature: MA Experiment ID: 20000329 Result: Up-regulated in Transcription
  misc_feature: MA Experiment 20000329 PARAMETER Experiment Name: At_4deg_Cold_Sub_P Parameter: Age (day) Value: 14
  misc_feature: MA Experiment 20000329 PARAMETER Experiment Name: At_4deg_Cold_Sub_P Parameter: Organism Value: A. thaliana
  misc_feature: MA Experiment 20000329 PARAMETER Experiment Name: At_4deg_Cold_Sub_P Parameter: Plant Line Value: WS
  misc_feature: MA Experiment 20000329 PARAMETER Experiment Name: At_4deg_Cold_Sub_P Parameter: Temperature (deg C) Value: 4 vs. 22
  misc_feature: MA Experiment 20000329 PARAMETER Experiment Name: At_4deg_Cold_Sub_P Parameter: Timepoint (hr) Value: 6
  misc_feature: MA Experiment 20000329 PARAMETER Experiment Name: At_4deg_Cold_Sub_P Parameter: Tissue Value: Aerial
gcgttatacttaaaacactctcctcttcttttccttgtccttctctatcgcttctataaactttttcgatctaaggttcgtgatctccttcttctctacgaagtttacactttttcttcaaaggaaacaatgagccagtacaatcaacctcccgttggtgttcctcctcctcaaggttatccaccggagggatatccaaaagatgcttatccaccacaaggatatcctcctcagggatatcctcagcaaggctatccacctcagggatatcctcaacaaggttatcctcagcaaggatatcctccaccgtacgcgcctcaatatcctccaccaccgcagcatcagcaacaacagagcagtcctggctttctagaaggatgtcttgctgctctgtgttgttgctgtctcttggatgcttgcttctgattggagtctctctctctctgcataaagcttcgggatttatttgtaagagggttttggttaaacaaaaaccttaattgatttgtggggcattaaaaatgaatctctcgatgattctctttcgttttatgtgtaatgttcttcggttcataacattttaactattgtctatcgacgttctgccttagtttgtatttgattatgggaatgtaaattggttgggagacactattctatgccatagtttattgcttggatctt

SEQ ID NO: 29277 - protein, 141 aa, Arabidopsis thaliana
  peptide (1)..(141): Ceres Seq. ID no. 13593011
  misc_feature (66)..(140): Homolog of NCBI NO: 8515092 NR Description: adhesive/proline-rich protein homolog [Pinus
  misc_feature (44)..(126): Homolog of NCBI NO: 34901106 NR Description: contains ESTs
  misc_feature (44)..(141): Homolog of NCBI NO: 21618167 NR Description: adhesive/proline-rich protein homolog
  misc_feature (44)..(141): Homolog of NCBI NO: 18425209 NR Description: expressed protein [Arabidopsis thaliana]
  misc_feature (41)..(141): Homolog of NCBI NO: 15229624 NR Description: proline-rich protein family [Arabidopsis
  misc_feature (44)..(141): Homolog of NCBI NO: 1808688 NR Description: hypothetical protein [Sporobolus stapfianus]
  misc_feature (44)..(141): Homolog of NCBI NO: 34393718 NR Description: adhesive/proline-rich protein homolog-like
  misc_feature (44)..(141): Homolog of NCBI NO: 21554421 NR Description: unknown [Arabidopsis thaliana]
  misc_feature (44)..(141): Homolog of NCBI NO: 40538901 NR Description: expressed protein [Oryza sativa (japonica
  misc_feature (44)..(141): Homolog of NCBI NO: 15227350 NR Description: proline-rich protein family [Arabidopsis
ALYLKHSPLLFLVLLYRFYKLFRSKVRDLLLLYEVYTFSSKETMSQYNQPPVGVPPPQGYPPEGYPKDAYPPQGYPPQGYPQQGYPPQGYPQQGYPQQGYPPPYAPQYPPPPQHQQQQSSPGFLEGCLAALCCCCLLDACF

SEQ ID NO: 29278 - protein, 98 aa, Arabidopsis thaliana
  peptide (1)..(98): Ceres Seq. ID no. 13593012
  misc_feature (23)..(97): Homolog of NCBI NO: 8515092 NR Description: adhesive/proline-rich protein homolog [Pinus
  misc_feature (1)..(83): Homolog of NCBI NO: 34901106 NR Description: contains ESTs
  misc_feature (1)..(98): Homolog of NCBI NO: 21618167 NR Description: adhesive/proline-rich protein homolog
  misc_feature (1)..(98): Homolog of NCBI NO: 18425209 NR Description: expressed protein [Arabidopsis thaliana]
  misc_feature (1)..(98): Homolog of NCBI NO: 15229624 NR Description: proline-rich protein family [Arabidopsis
  misc_feature (1)..(98): Homolog of NCBI NO: 1808688 NR Description: hypothetical protein [Sporobolus stapfianus]
  misc_feature (1)..(98): Homolog of NCBI NO: 34393718 NR Description: adhesive/proline-rich protein homolog-like
  misc_feature (1)..(98): Homolog of NCBI NO: 21554421 NR Description: unknown [Arabidopsis thaliana]
  misc_feature (1)..(98): Homolog of NCBI NO: 40538901 NR Description: expressed protein [Oryza sativa (japonica
  misc_feature (1)..(98): Homolog of NCBI NO: 15227350 NR Description: proline-rich protein family [Arabidopsis
MSQYNQPPVGVPPPQGYPPEGYPKDAYPPQGYPPQGYPQQGYPPQGYPQQGYPQQGYPPPYAPQYPPPPQHQQQQSSPGFLEGCLAALCCCCLLDACF

SEQ ID NO: 29279 - DNA, 841 bp, Arabidopsis thaliana
  misc_feature (1)..(841): Ceres Seq. ID no. 12379214
  misc_feature: MA Experiment ID: 108435 Result: Down-regulated in Transcription
  misc_feature: MA Experiment 108435 PARAMETER Experiment Name: At_stm_Mutants_cDNA_P Parameter: Plant Line Value: wt Landsburg vs stm
  misc_feature: MA Experiment 108435 PARAMETER Experiment Name: At_stm_Mutants_cDNA_P Parameter: Tissue Value: Shoot Apical Meristem Region
  misc_feature: MA Experiment ID: 108461 Result: Up-regulated in Transcription
  misc_feature: MA Experiment 108461 PARAMETER Experiment Name: At_Germinating_Seeds_cDNA_P Parameter: Age (day) Value: 1 vs. 0
  misc_feature: MA Experiment 108461 PARAMETER Experiment Name: At_Germinating_Seeds_cDNA_P Parameter: Tissue Value: Germinating Seeds
  misc_feature: MA Experiment ID: 108462 Result: Up-regulated in Transcription
  misc_feature: MA Experiment 108462 PARAMETER Experiment Name: At_Germinating_Seeds_cDNA_P Parameter: Age (day) Value: 2 vs. 0
  misc_feature: MA Experiment 108462 PARAMETER Experiment Name: At_Germinating_Seeds_cDNA_P Parameter: Tissue Value: Germinating Seeds
  misc_feature: MA Experiment ID: 108463 Result: Up-regulated in Transcription
  misc_feature: MA Experiment 108463 PARAMETER Experiment Name: At_Germinating_Seeds_cDNA_P Parameter: Age (day) Value: 3 vs. 0
  misc_feature: MA Experiment 108463 PARAMETER Experiment Name: At_Germinating_Seeds_cDNA_P Parameter: Tissue Value: Germinating Seeds
  misc_feature: MA Experiment ID: 108464 Result: Up-regulated in Transcription
  misc_feature: MA Experiment 108464 PARAMETER Experiment Name: At_Germinating_Seeds_cDNA_P Parameter: Age (day) Value: 4 vs. 0
  misc_feature: MA Experiment 108464 PARAMETER Experiment Name: At_Germinating_Seeds_cDNA_P Parameter: Tissue Value: Germinating Seeds
  misc_feature: MA Experiment ID: 108469 Result: Down-regulated in Transcription
  misc_feature: MA Experiment ID: 108561 Result: Down-regulated in Transcription
  misc_feature: MA Experiment 108561 PARAMETER Experiment Name: At_100uM_ABA_cDNA_P Parameter: Timepoint (hr) Value: 6
  misc_feature: MA Experiment 108561 PARAMETER Experiment Name: At_100uM_ABA_cDNA_P Parameter: Tissue Value: Aerial
  misc_feature: MA Experiment 108561 PARAMETER Experiment Name: At_100uM_ABA_cDNA_P Parameter: Treatment Value: 100uM ABA vs. No Treatment
  misc_feature: MA Experiment ID: 108573 Result: Down-regulated in Transcription
  misc_feature: MA Experiment 108573 PARAMETER Experiment Name: At_Drought_cDNA_P Parameter: Timepoint (hr) Value: 6
  misc_feature: MA Experiment 108573 PARAMETER Experiment Name: At_Drought_cDNA_P Parameter: Tissue Value: Aerial
  misc_feature: MA Experiment 108573 PARAMETER Experiment Name: At_Drought_cDNA_P Parameter: Treatment Value: Drought vs. No Drought
  misc_feature: MA Experiment ID: 108579 Result: Up-regulated in Transcription
  misc_feature: MA Experiment 108579 PARAMETER Experiment Name: At_4deg_Cold_cDNA_P Parameter: Temperature (deg C) Value: 4 vs. 22
  misc_feature: MA Experiment 108579 PARAMETER Experiment Name: At_4deg_Cold_cDNA_P Parameter: Timepoint (hr) Value: 6
  misc_feature: MA Experiment 108579 PARAMETER Experiment Name: At_4deg_Cold_cDNA_P Parameter: Tissue Value: Aerial
  misc_feature: MA Experiment ID: 108585 Result: Down-regulated in Transcription
  misc_feature: MA Experiment 108585 PARAMETER Experiment Name: At_5mM_NaNP_cDNA_P Parameter: Timepoint (hr) Value: 6
  misc_feature: MA Experiment 108585 PARAMETER Experiment Name: At_5mM_NaNP_cDNA_P Parameter: Tissue Value: Aerial
  misc_feature: MA Experiment 108585 PARAMETER Experiment Name: At_5mM_NaNP_cDNA_P Parameter: Treatment Value: null
  misc_feature: MA Experiment ID: 108595 Result: Down-regulated in Transcription
  misc_feature: MA Experiment 108595 PARAMETER Experiment Name: At_Ler-pi_Ovule_cDNA_P Parameter: Plant Line Value: null
  misc_feature: MA Experiment ID: 108605 Result: Down-regulated in Transcription
  misc_feature: MA Experiment 108605 PARAMETER Experiment Name: At_100uM_ABA_cDNA_P Parameter: Timepoint (hr) Value: 6
  misc_feature: MA Experiment 108605 PARAMETER Experiment Name: At_100uM_ABA_cDNA_P Parameter: Tissue Value: Aerial
  misc_feature: MA Experiment 108605 PARAMETER Experiment Name: At_100uM_ABA_cDNA_P Parameter: Treatment Value: 100uM ABA vs. No Treatment
  misc_feature: MA Experiment ID: 108607 Result: Down-regulated in Transcription
  misc_feature: MA Experiment 108607 PARAMETER Experiment Name: At_100uM_ABA_cDNA_P Parameter: Timepoint (hr) Value: 4
  misc_feature: MA Experiment 108607 PARAMETER Experiment Name: At_100uM_ABA_cDNA_P Parameter: Tissue Value: Aerial
  misc_feature: MA Experiment 108607 PARAMETER Experiment Name: At_100uM_ABA_cDNA_P Parameter: Treatment Value: 100uM ABA vs. No Treatment
  misc_feature: MA Experiment ID: 20000069 Result: Down-regulated in Transcription
  misc_feature: MA Experiment 20000069 PARAMETER Experiment Name: At_100uM_ABA_Mutants_cDNA_P Parameter: Plant Line Value: CS23
  misc_feature: MA Experiment 20000069 PARAMETER Experiment Name: At_100uM_ABA_Mutants_cDNA_P Parameter: Timepoint (hr) Value: 6
  misc_feature: MA Experiment 20000069 PARAMETER Experiment Name: At_100uM_ABA_Mutants_cDNA_P Parameter: Tissue Value: Aerial
  misc_feature: MA Experiment 20000069 PARAMETER Experiment Name: At_100uM_ABA_Mutants_cDNA_P Parameter: Treatment Value: 100uM ABA vs. No Treatment
  misc_feature: MA Experiment ID: 20000070 Result: Down-regulated in Transcription
  misc_feature: MA Experiment 20000070 PARAMETER Experiment Name: At_100uM_ABA_Mutants_cDNA_P Parameter: Plant Line Value: CS24
  misc_feature: MA Experiment 20000070 PARAMETER Experiment Name: At_100uM_ABA_Mutants_cDNA_P Parameter: Timepoint (hr) Value: 6
  misc_feature: MA Experiment 20000070 PARAMETER Experiment Name: At_100uM_ABA_Mutants_cDNA_P Parameter: Tissue Value: Aerial
  misc_feature: MA Experiment 20000070 PARAMETER Experiment Name: At_100uM_ABA_Mutants_cDNA_P Parameter: Treatment Value: 100uM ABA vs. No Treatment
  misc_feature: MA Experiment ID: 20000071 Result: Down-regulated in Transcription
  misc_feature: MA Experiment 20000071 PARAMETER Experiment Name: At_100uM_ABA_Mutants_cDNA_P Parameter: Plant Line Value: CS8104
  misc_feature: MA Experiment 20000071 PARAMETER Experiment Name: At_100uM_ABA_Mutants_cDNA_P Parameter: Timepoint (hr) Value: 6
  misc_feature: MA Experiment 20000071 PARAMETER Experiment Name: At_100uM_ABA_Mutants_cDNA_P Parameter: Tissue Value: Aerial
  misc_feature: MA Experiment 20000071 PARAMETER Experiment Name: At_100uM_ABA_Mutants_cDNA_P Parameter: Treatment Value: 100uM ABA vs. No Treatment
  misc_feature: MA Experiment ID: 20000086 Result: Down-regulated in Transcription
  misc_feature: MA Experiment 20000086 PARAMETER Experiment Name: At_100uM_ABA_Mutants_cDNA_P Parameter: Plant Line Value: CS22
  misc_feature: MA Experiment 20000086 PARAMETER Experiment Name: At_100uM_ABA_Mutants_cDNA_P Parameter: Timepoint (hr) Value: 6
  misc_feature: MA Experiment 20000086 PARAMETER Experiment Name: At_100uM_ABA_Mutants_cDNA_P Parameter: Tissue Value: Aerial
  misc_feature: MA Experiment 20000086 PARAMETER Experiment Name: At_100uM_ABA_Mutants_cDNA_P Parameter: Treatment Value: 100uM ABA vs. No Treatment
  misc_feature: MA Experiment ID: 20000087 Result: Down-regulated in Transcription
  misc_feature: MA Experiment 20000087 PARAMETER Experiment Name: At_100uM_ABA_Mutants_cDNA_P Parameter: Plant Line Value: WS
  misc_feature: MA Experiment 20000087 PARAMETER Experiment Name: At_100uM_ABA_Mutants_cDNA_P Parameter: Timepoint (hr) Value: 6
  misc_feature: MA Experiment 20000087 PARAMETER Experiment Name: At_100uM_ABA_Mutants_cDNA_P Parameter: Tissue Value: Aerial
  misc_feature: MA Experiment 20000087 PARAMETER Experiment Name: At_100uM_ABA_Mutants_cDNA_P Parameter: Treatment Value: 100uM ABA vs. No Treatment
  misc_feature: MA Experiment ID: 20000088 Result: Down-regulated in Transcription
  misc_feature: MA Experiment 20000088 PARAMETER Experiment Name: At_100uM_ABA_Mutants_cDNA_P Parameter: Plant Line Value: Landsberg
  misc_feature: MA Experiment 20000088 PARAMETER Experiment Name: At_100uM_ABA_Mutants_cDNA_P Parameter: Timepoint (hr) Value: 6
  misc_feature: MA Experiment 20000088 PARAMETER Experiment Name: At_100uM_ABA_Mutants_cDNA_P Parameter: Tissue Value: Aerial
  misc_feature: MA Experiment 20000088 PARAMETER Experiment Name: At_100uM_ABA_Mutants_cDNA_P Parameter: Treatment Value: 100uM ABA vs. No Treatment
  misc_feature: MA Experiment ID: 20000090 Result: Down-regulated in Transcription
  misc_feature: MA Experiment ID: 20000117 Result: Down-regulated in Transcription
  misc_feature: MA Experiment 20000117 PARAMETER Experiment Name: At_100uM_ABA_Mutants_cDNA_P Parameter: Plant Line Value: Columbia
  misc_feature: MA Experiment 20000117 PARAMETER Experiment Name: At_100uM_ABA_Mutants_cDNA_P Parameter: Timepoint (hr) Value: 6
  misc_feature: MA Experiment 20000117 PARAMETER Experiment Name: At_100uM_ABA_Mutants_cDNA_P Parameter: Tissue Value: Aerial
  misc_feature: MA Experiment 20000117 PARAMETER Experiment Name: At_100uM_ABA_Mutants_cDNA_P Parameter: Treatment Value: 100uM ABA vs. No Treatment
  misc_feature: MA Experiment ID: 20000169 Result: Down-regulated in Transcription
  misc_feature: MA Experiment 20000169 PARAMETER Experiment Name: At_100uM_ABA_P Parameter: Age (day) Value: 14
  misc_feature: MA Experiment 20000169 PARAMETER Experiment Name: At_100uM_ABA_P Parameter: Organism Value: A. thaliana
  misc_feature: MA Experiment 20000169 PARAMETER Experiment Name: At_100uM_ABA_P Parameter: Plant Line Value: WS
  misc_feature: MA Experiment 20000169 PARAMETER Experiment Name: At_100uM_ABA_P Parameter: Timepoint (hr) Value: 6
  misc_feature: MA Experiment 20000169 PARAMETER Experiment Name: At_100uM_ABA_P Parameter: Tissue Value: Aerial
  misc_feature: MA Experiment 20000169 PARAMETER Experiment Name: At_100uM_ABA_P Parameter: Treatment Value: 100uM ABA vs. No Treatment
  misc_feature: MA Experiment ID: 20000182 Result: Down-regulated in Transcription
  misc_feature: MA Experiment 20000182 PARAMETER Experiment Name: At_2mM_SA_P Parameter: Age (day) Value: 14
  misc_feature: MA Experiment 20000182 PARAMETER Experiment Name: At_2mM_SA_P Parameter: Organism Value: A. thaliana
  misc_feature: MA Experiment 20000182 PARAMETER Experiment Name: At_2mM_SA_P Parameter: Plant Line Value: WS
  misc_feature: MA Experiment 20000182 PARAMETER Experiment Name: At_2mM_SA_P Parameter: Timepoint (hr) Value: 6
  misc_feature: MA Experiment 20000182 PARAMETER Experiment Name: At_2mM_SA_P Parameter: Tissue Value: Aerial
  misc_feature: MA Experiment 20000182 PARAMETER Experiment Name: At_2mM_SA_P Parameter: Treatment Value: 2mM SA vs. No Treatment
  misc_feature: MA Experiment ID: 20000185 Result: Down-regulated in Transcription
  misc_feature: MA Experiment 20000185 PARAMETER Experiment Name: At_Roots__P Parameter: Age (day) Value: 7 vs. 21
  misc_feature: MA Experiment 20000185 PARAMETER Experiment Name: At_Roots__P Parameter: Organism Value: A. thaliana
  misc_feature: MA Experiment 20000185 PARAMETER Experiment Name: At_Roots__P Parameter: Tissue Value: Roots vs. Whole Plant
  misc_feature: MA Experiment ID: 20000224 Result: Up-regulated in Transcription
  misc_feature: MA Experiment ID: 20000436 Result: Down-regulated in Transcription
  misc_feature: MA Experiment 20000436 PARAMETER Experiment Name: At_Drought_P Parameter: Age (day) Value: 7
  misc_feature: MA Experiment 20000436 PARAMETER Experiment Name: At_Drought_P Parameter: Organism Value: A. thaliana
  misc_feature: MA Experiment 20000436 PARAMETER Experiment Name: At_Drought_P Parameter: Plant Line Value: WS
  misc_feature: MA Experiment 20000436 PARAMETER Experiment Name: At_Drought_P Parameter: Timepoint (hr) Value: 12
  misc_feature: MA Experiment 20000436 PARAMETER Experiment Name: At_Drought_P Parameter: Tissue Value: Whole Plant
  misc_feature: MA Experiment 20000436 PARAMETER Experiment Name: At_Drought_P Parameter: Treatment Value: Drought vs. No Drought
  misc_feature: MA Experiment ID: 20000437 Result: Down-regulated in Transcription
  misc_feature: MA Experiment 20000437 PARAMETER Experiment Name: At_Drought_P Parameter: Age (day) Value: 8
  misc_feature: MA Experiment 20000437 PARAMETER Experiment Name: At_Drought_P Parameter: Organism Value: A. thaliana
  misc_feature: MA Experiment 20000437 PARAMETER Experiment Name: At_Drought_P Parameter: Plant Line Value: WS
  misc_feature: MA Experiment 20000437 PARAMETER Experiment Name: At_Drought_P Parameter: Timepoint (hr) Value: 24
  misc_feature: MA Experiment 20000437 PARAMETER Experiment Name: At_Drought_P Parameter: Tissue Value: Whole Plant
  misc_feature: MA Experiment 20000437 PARAMETER Experiment Name: At_Drought_P Parameter: Treatment Value: Drought vs. No Drought
  misc_feature: MA Experiment ID: 20000439 Result: Down-regulated in Transcription
  misc_feature: MA Experiment 20000439 PARAMETER Experiment Name: At_Roots__P Parameter: Age (day) Value: 14 vs. 21
  misc_feature: MA Experiment 20000439 PARAMETER Experiment Name: At_Roots__P Parameter: Organism Value: A. thaliana
  misc_feature: MA Experiment 20000439 PARAMETER Experiment Name: At_Roots__P Parameter: Tissue Value: Roots vs. Whole Plant
  misc_feature: MA Experiment ID: 20000495 Result: Down-regulated in Transcription
  misc_feature: MA Experiment 20000495 PARAMETER Experiment Name: At_Guard_Cells_P Parameter: Harvest Date Value: 8/2/2002
  misc_feature: MA Experiment 20000495 PARAMETER Experiment Name: At_Guard_Cells_P Parameter: Organism Value: A. thaliana
  misc_feature: MA Experiment 20000495 PARAMETER Experiment Name: At_Guard_Cells_P Parameter: Tissue Value: Guard Cells vs. Leaves
  misc_feature: MA Experiment ID: 20000527 Result: Up-regulated in Transcription
  misc_feature: MA Experiment 20000527 PARAMETER Experiment Name: At_10percent_PEG_P Parameter: Age (day) Value: 20
  misc_feature: MA Experiment 20000527 PARAMETER Experiment Name: At_10percent_PEG_P Parameter: Organism Value: A. thaliana
  misc_feature: MA Experiment 20000527 PARAMETER Experiment Name: At_10percent_PEG_P Parameter: Plant Line Value: WS
  misc_feature: MA Experiment 20000527 PARAMETER Experiment Name: At_10percent_PEG_P Parameter: Timepoint (day) Value: 20
  misc_feature: MA Experiment 20000527 PARAMETER Experiment Name: At_10percent_PEG_P Parameter: Tissue Value: Whole Plant
  misc_feature: MA Experiment 20000527 PARAMETER Experiment Name: At_10percent_PEG_P Parameter: Treatment Value: 10percent PEG vs. No Treatment
  misc_feature: MA Experiment ID: 20000794 Result: Down-regulated in Transcription
  misc_feature: MA Experiment 20000794 PARAMETER Experiment Name: At_Petals_P Parameter: Age (day) Value: 23-25 days
  misc_feature: MA Experiment 20000794 PARAMETER Experiment Name: At_Petals_P Parameter: Plant Line Value: WS
  misc_feature: MA Experiment 20000794 PARAMETER Experiment Name: At_Petals_P Parameter: Tissue Value: Petals vs. Whole plant
  misc_feature: MA Experiment ID: 20001247 Result: Down-regulated in Transcription
  misc_feature: MA Experiment 20001247 PARAMETER Experiment Name: At_Far-red-induction_P Parameter: Age (day) Value: 7
  misc_feature: MA Experiment 20001247 PARAMETER Experiment Name: At_Far-red-induction_P Parameter: Light Value: Far-red vs. White
  misc_feature: MA Experiment 20001247 PARAMETER Experiment Name: At_Far-red-induction_P Parameter: Organism Value: A. thaliana
  misc_feature: MA Experiment 20001247 PARAMETER Experiment Name: At_Far-red-induction_P Parameter: Plant Line Value: Columbia
  misc_feature: MA Experiment 20001247 PARAMETER Experiment Name: At_Far-red-induction_P Parameter: Timepoint (hr) Value: 1
  misc_feature: MA Experiment 20001247 PARAMETER Experiment Name: At_Far-red-induction_P Parameter: Tissue Value: Whole Plant
  misc_feature: MA Experiment ID: 20001248 Result: Down-regulated in Transcription
  misc_feature: MA Experiment 20001248 PARAMETER Experiment Name: At_Far-red-induction_P Parameter: Age (day) Value: 7
  misc_feature: MA Experiment 20001248 PARAMETER Experiment Name: At_Far-red-induction_P Parameter: Light Value: Far-red vs. White
  misc_feature: MA Experiment 20001248 PARAMETER Experiment Name: At_Far-red-induction_P Parameter: Organism Value: A. thaliana
  misc_feature: MA Experiment 20001248 PARAMETER Experiment Name: At_Far-red-induction_P Parameter: Plant Line Value: Columbia
  misc_feature: MA Experiment 20001248 PARAMETER Experiment Name: At_Far-red-induction_P Parameter: Timepoint (hr) Value: 4
  misc_feature: MA Experiment 20001248 PARAMETER Experiment Name: At_Far-red-induction_P Parameter: Tissue Value: Whole Plant
  misc_feature: MA Experiment ID: 20001450 Result: Down-regulated in Transcription
  misc_feature: MA Experiment 20001450 PARAMETER Experiment Name: At_Far-red-induction_P Parameter: Age (day) Value: 7
  misc_feature: MA Experiment 20001450 PARAMETER Experiment Name: At_Far-red-induction_P Parameter: Light Value: Far-red vs. White
  misc_feature: MA Experiment 20001450 PARAMETER Experiment Name: At_Far-red-induction_P Parameter: Organism Value: A. thaliana
  misc_feature: MA Experiment 20001450 PARAMETER Experiment Name: At_Far-red-induction_P Parameter: Plant Line Value: Columbia
  misc_feature: MA Experiment 20001450 PARAMETER Experiment Name: At_Far-red-induction_P Parameter: Timepoint (hr) Value: 8
  misc_feature: MA Experiment 20001450 PARAMETER Experiment Name: At_Far-red-induction_P Parameter: Tissue Value: Whole Plant
  misc_feature: MA Experiment ID: 20001905 Result: Down-regulated in Transcription
  misc_feature: MA Experiment 20001905 PARAMETER Experiment Name: At_Drought_Reproduction_P Parameter: Age (day) Value: 40
  misc_feature: MA Experiment 20001905 PARAMETER Experiment Name: At_Drought_Reproduction_P Parameter: Organism Value: A. thaliana
  misc_feature: MA Experiment 20001905 PARAMETER Experiment Name: At_Drought_Reproduction_P Parameter: Plant Line Value: WS
  misc_feature: MA Experiment 20001905 PARAMETER Experiment Name: At_Drought_Reproduction_P Parameter: Timepoint (day) Value: 10
  misc_feature: MA Experiment 20001905 PARAMETER Experiment Name: At_Drought_Reproduction_P Parameter: Tissue Value: Rosettes
  misc_feature: MA Experiment 20001905 PARAMETER Experiment Name: At_Drought_Reproduction_P Parameter: Treatment Value: Drought vs. No Drought
  misc_feature: MA Experiment ID: 20001906 Result: Down-regulated in Transcription
  misc_feature: MA Experiment 20001906 PARAMETER Experiment Name: At_Drought_Reproduction_P Parameter: Age (day) Value: 35
  misc_feature: MA Experiment 20001906 PARAMETER Experiment Name: At_Drought_Reproduction_P Parameter: Organism Value: A. thaliana
  misc_feature: MA Experiment 20001906 PARAMETER Experiment Name: At_Drought_Reproduction_P Parameter: Plant Line Value: WS
  misc_feature: MA Experiment 20001906 PARAMETER Experiment Name: At_Drought_Reproduction_P Parameter: Timepoint (day) Value: 5
  misc_feature: MA Experiment 20001906 PARAMETER Experiment Name: At_Drought_Reproduction_P Parameter: Tissue Value: Siliques
  misc_feature: MA Experiment 20001906 PARAMETER Experiment Name: At_Drought_Reproduction_P Parameter: Treatment Value: Drought vs. No Drought
  misc_feature: MA Experiment ID: 20001908 Result: Down-regulated in Transcription
  misc_feature: MA Experiment 20001908 PARAMETER Experiment Name: At_Drought_Reproduction_P Parameter: Age (day) Value: 40
  misc_feature: MA Experiment 20001908 PARAMETER Experiment Name: At_Drought_Reproduction_P Parameter: Organism Value: A. thaliana
  misc_feature: MA Experiment 20001908 PARAMETER Experiment Name: At_Drought_Reproduction_P Parameter: Plant Line Value: WS
  misc_feature: MA Experiment 20001908 PARAMETER Experiment Name: At_Drought_Reproduction_P Parameter: Timepoint (day) Value: 10
  misc_feature: MA Experiment 20001908 PARAMETER Experiment Name: At_Drought_Reproduction_P Parameter: Tissue Value: Siliques
  misc_feature: MA Experiment 20001908 PARAMETER Experiment Name: At_Drought_Reproduction_P Parameter: Treatment Value: Drought vs. No Drought
acaagaacagaggctgacacctaaagcttactctctaactgcaatggctcacttcatagacctcaacagtctcaccaacactttaccgtctcttccgaaactacccgagagtcgtaaaaccgggaaatccagcgggtttgcttgcaggagaactgaagaatttcaagaaccggattcggtacagatcacaagacggatgacattaggatttgctgtctcaataggtcttaccggaattctcggcgaaaataatgtttccttggcacaagacaatgggttttggattgatggtcctcttccaattcctcctatttacaacaatatcgtgaatgagaagacgggaacgagaacattcataaagaaaggagtgtatgtagcggatatcgggacgaaaggaagaatgtatagagttaaaaagaatgcttttgatctcttggcaatggaggatttgatcggaccagatactttaaactatgtgaaaaagtacttgaggcttaaatccacatttttgttttacgatttcgacaatctcatctctgctgctgcctctgaagacaagcaacctctcactgatttagccaacagattgttcgacaatttcgaaaagcttgaagatgcagctaagacgaagaacttagcagagacggaatcgtgttataaagatacaaagtttcttcttcaagaggtaatgaccagaatggcatgatcctggttcggtttataccggtttacttgctattgatgatcctacatggttgataactctgtggtcataaattgtaatctttgcggaaaaatattgagatctagtaatcaaaaaaaaaaatgtaatgtatagacc

SEQ ID NO: 29280 - protein, 234 aa, Arabidopsis thaliana
  peptide (1)..(234): Ceres Seq. ID no. 12379215
  misc_feature (30)..(234): Pfam Name: Oxygen evolving enhancer protein 3 (PsbQ) Pfam Description: Oxygen evolving enhancer protein 3 (PsbQ)
  misc_feature (61)..(233): Homolog of NCBI NO: 131397 NR Description: Oxygen-evolving enhancer protein 3, chloroplast (OEE3) (16 kDa subunit of oxygen evolving system of photosystem
  misc_feature (33)..(233): Homolog of NCBI NO: 34393258 NR Description: putative Oxygen-evolving enhancer protein 3-1,
  misc_feature (115)..(233): Homolog of NCBI NO: 11134066 NR Description: Oxygen-evolving enhancer protein 3-2, chloroplast (OEE3) (16 kDa subunit of oxygen evolving system of photosystem (OEC 16 kDa subunit) (Ferredoxin-NADP reductase binding protein)
  misc_feature (40)..(233): Homolog of NCBI NO: 11134057 NR Description: Oxygen-evolving enhancer protein 3-1, chloroplast (OEE3) (16 kDa subunit of oxygen evolving system of photosystem
  misc_feature (119)..(229): Homolog of NCBI NO: 8131595 NR Description: oxygen evolving enhancer protein 3 [Bruguiera
  misc_feature (44)..(233): Homolog of NCBI NO: 15234637 NR Description: oxygen-evolving complex protein 16, chloroplast
  misc_feature (37)..(233): Homolog of NCBI NO: 15233587 NR Description: oxygen-evolving complex protein 16, chloroplast
  misc_feature (90)..(234): Homolog of NCBI NO: 34915502 NR Description: hypothetical protein~similar to Arabidopsis
  misc_feature (15)..(234): Homolog of NCBI NO: 21537394 NR Description: unknown [Arabidopsis thaliana]
  misc_feature (15)..(234): Homolog of NCBI NO: 18395819 NR Description: PsbQ domain protein family, putative
QEQRLTPKAYSLTAMAHFIDLNSLTNTLPSLPKLPESRKTGKSSGFACRRTEEFQEPDSVQITRRMTLGFAVSIGLTGILGENNVSLAQDNGFWIDGPLPIPPIYNNIVNEKTGTRTFIKKGVYVADIGTKGRMYRVKKNAFDLLAMEDLIGPDTLNYVKKYLRLKSTFLFYDFDNLISAAASEDKQPLTDLANRLFDNFEKLEDAAKTKNLAETESCYKDTKFLLQEVMTRMA

SEQ ID NO: 29281 - protein, 220 aa, Arabidopsis thaliana
  peptide (1)..(220): Ceres Seq. ID no. 12379216
  misc_feature (16)..(220): Pfam Name: Oxygen evolving enhancer protein 3 (PsbQ) Pfam Description: Oxygen evolving enhancer protein 3 (PsbQ)
  misc_feature (47)..(219): Homolog of NCBI NO: 131397 NR Description: Oxygen-evolving enhancer protein 3, chloroplast (OEE3) (16 kDa subunit of oxygen evolving system of photosystem
  misc_feature (19)..(219): Homolog of NCBI NO: 34393258 NR Description: putative Oxygen-evolving enhancer protein 3-1,
  misc_feature (101)..(219): Homolog of NCBI NO: 11134066 NR Description: Oxygen-evolving enhancer protein 3-2, chloroplast (OEE3) (16 kDa subunit of oxygen evolving system of photosystem (OEC 16 kDa subunit) (Ferredoxin-NADP reductase binding protein)
  misc_feature (26)..(219): Homolog of NCBI NO: 11134057 NR Description: Oxygen-evolving enhancer protein 3-1, chloroplast (OEE3) (16 kDa subunit of oxygen evolving system of photosystem
  misc_feature (105)..(215): Homolog of NCBI NO: 8131595 NR Description: oxygen evolving enhancer protein 3 [Bruguiera
  misc_feature (30)..(219): Homolog of NCBI NO: 15234637 NR Description: oxygen-evolving complex protein 16, chloroplast
  misc_feature (23)..(219): Homolog of NCBI NO: 15233587 NR Description: oxygen-evolving complex protein 16, chloroplast
  misc_feature (76)..(220): Homolog of NCBI NO: 34915502 NR Description: hypothetical protein~similar to Arabidopsis
  misc_feature (1)..(220): Homolog of NCBI NO: 21537394 NR Description: unknown [Arabidopsis thaliana]
  misc_feature (1)..(220): Homolog of NCBI NO: 18395819 NR Description: PsbQ domain protein family, putative
MAHFIDLNSLTNTLPSLPKLPESRKTGKSSGFACRRTEEFQEPDSVQITRRMTLGFAVSIGLTGILGENNVSLAQDNGFWIDGPLPIPPIYNNIVNEKTGTRTFIKKGVYVADIGTKGRMYRVKKNAFDLLAMEDLIGPDTLNYVKKYLRLKSTFLFYDFDNLISAAASEDKQPLTDLANRLFDNFEKLEDAAKTKNLAETESCYKDTKFLLQEVMTRMA

SEQ ID NO: 29282 - protein, 169 aa, Arabidopsis thaliana
  peptide (1)..(169): Ceres Seq. ID no. 12379217
  misc_feature (1)..(169): Pfam Name: Oxygen evolving enhancer protein 3 (PsbQ) Pfam Description: Oxygen evolving enhancer protein 3 (PsbQ)
  misc_feature (1)..(168): Homolog of NCBI NO: 131397 NR Description: Oxygen-evolving enhancer protein 3, chloroplast (OEE3) (16 kDa subunit of oxygen evolving system of photosystem
  misc_feature (1)..(168): Homolog of NCBI NO: 34393258 NR Description: putative Oxygen-evolving enhancer protein 3-1,
  misc_feature (50)..(168): Homolog of NCBI NO: 11134066 NR Description: Oxygen-evolving enhancer protein 3-2, chloroplast (OEE3) (16 kDa subunit of oxygen evolving system of photosystem (OEC 16 kDa subunit) (Ferredoxin-NADP reductase binding protein)
  misc_feature (1)..(168): Homolog of NCBI NO: 11134057 NR Description: Oxygen-evolving enhancer protein 3-1, chloroplast (OEE3) (16 kDa subunit of oxygen evolving system of photosystem
  misc_feature (54)..(164): Homolog of NCBI NO: 8131595 NR Description: oxygen evolving enhancer protein 3 [Bruguiera
  misc_feature (1)..(168): Homolog of NCBI NO: 15234637 NR Description: oxygen-evolving complex protein 16, chloroplast
  misc_feature (1)..(168): Homolog of NCBI NO: 15233587 NR Description: oxygen-evolving complex protein 16, chloroplast
  misc_feature (25)..(169): Homolog of NCBI NO: 34915502 NR Description: hypothetical protein~similar to Arabidopsis
  misc_feature (1)..(169): Homolog of NCBI NO: 21537394 NR Description: unknown [Arabidopsis thaliana]
  misc_feature (1)..(169): Homolog of NCBI NO: 18395819 NR Description: PsbQ domain protein family, putative
MTLGFAVSIGLTGILGENNVSLAQDNGFWIDGPLPIPPIYNNIVNEKTGTRTFIKKGVYVADIGTKGRMYRVKKNAFDLLAMEDLIGPDTLNYVKKYLRLKSTFLFYDFDNLISAAASEDKQPLTDLANRLFDNFEKLEDAAKTKNLAETESCYKDTKFLLQEVMTRMA

SEQ ID NO: 29283 - DNA, 708 bp, Arabidopsis thaliana
  misc_feature (1)..(708): Ceres Seq. ID no. 12331871
  misc_feature: MA Experiment ID: 108433 Result: Up-regulated in Transcription
  misc_feature: MA Experiment 108433 PARAMETER Experiment Name: At_rhl_Mutant2_cDNA_P Parameter: Age (day) Value: 7
  misc_feature: MA Experiment 108433 PARAMETER Experiment Name: At_rhl_Mutant2_cDNA_P Parameter: Organism Value: A. thaliana
  misc_feature: MA Experiment 108433 PARAMETER Experiment Name: At_rhl_Mutant2_cDNA_P Parameter: Plant Line Value: rhl Mutant vs. wt landsburg
  misc_feature: MA Experiment 108433 PARAMETER Experiment Name: At_rhl_Mutant2_cDNA_P Parameter: Tissue Value: Roots
  misc_feature: MA Experiment ID: 108435 Result: Down-regulated in Transcription
  misc_feature: MA Experiment 108435 PARAMETER Experiment Name: At_stm_Mutants_cDNA_P Parameter: Plant Line Value: wt Landsburg vs stm
  misc_feature: MA Experiment 108435 PARAMETER Experiment Name: At_stm_Mutants_cDNA_P Parameter: Tissue Value: Shoot Apical Meristem Region
  misc_feature: MA Experiment ID: 108461 Result: Up-regulated in Transcription
  misc_feature: MA Experiment 108461 PARAMETER Experiment Name: At_Germinating_Seeds_cDNA_P Parameter: Age (day) Value: 1 vs. 0
  misc_feature: MA Experiment 108461 PARAMETER Experiment Name: At_Germinating_Seeds_cDNA_P Parameter: Tissue Value: Germinating Seeds
  misc_feature: MA Experiment ID: 108462 Result: Up-regulated in Transcription
  misc_feature: MA Experiment 108462 PARAMETER Experiment Name: At_Germinating_Seeds_cDNA_P Parameter: Age (day) Value: 2 vs. 0
  misc_feature: MA Experiment 108462 PARAMETER Experiment Name: At_Germinating_Seeds_cDNA_P Parameter: Tissue Value: Germinating Seeds
  misc_feature: MA Experiment ID: 108463 Result: Up-regulated in Transcription
  misc_feature: MA Experiment 108463 PARAMETER Experiment Name: At_Germinating_Seeds_cDNA_P Parameter: Age (day) Value: 3 vs. 0
  misc_feature: MA Experiment 108463 PARAMETER Experiment Name: At_Germinating_Seeds_cDNA_P Parameter: Tissue Value: Germinating Seeds
  misc_feature: MA Experiment ID: 108473 Result: Up-regulated in Transcription
  misc_feature: MA Experiment 108473 PARAMETER Experiment Name: At_Drought_Flowers_cDNA_P Parameter: Timepoint (hr) Value: 7 d
  misc_feature: MA Experiment 108473 PARAMETER Experiment Name: At_Drought_Flowers_cDNA_P Parameter: Tissue Value: Flower
  misc_feature: MA Experiment 108473 PARAMETER Experiment Name: At_Drought_Flowers_cDNA_P Parameter: Treatment Value: Drought vs. No Drought
  misc_feature: MA Experiment ID: 108474 Result: Up-regulated in Transcription
  misc_feature: MA Experiment 108474 PARAMETER Experiment Name: At_Drought_Flowers_cDNA_P Parameter: Timepoint (hr) Value: null
  misc_feature: MA Experiment 108474 PARAMETER Experiment Name: At_Drought_Flowers_cDNA_P Parameter: Treatment Value: Drought vs. No Drought
  misc_feature: MA Experiment ID: 108501 Result: Down-regulated in Transcription
  misc_feature: MA Experiment 108501 PARAMETER Experiment Name: At_ap2_floral_buds_cDNA_P Parameter: Plant Line Value: ap2 (Ler.)
  misc_feature: MA Experiment 108501 PARAMETER Experiment Name: At_ap2_floral_buds_cDNA_P Parameter: Tissue Value: Closed Flower
  misc_feature: MA Experiment ID: 108573 Result: Up-regulated in Transcription
  misc_feature: MA Experiment 108573 PARAMETER Experiment Name: At_Drought_cDNA_P Parameter: Timepoint (hr) Value: 6
  misc_feature: MA Experiment 108573 PARAMETER Experiment Name: At_Drought_cDNA_P Parameter: Tissue Value: Aerial
  misc_feature: MA Experiment 108573 PARAMETER Experiment Name: At_Drought_cDNA_P Parameter: Treatment Value: Drought vs. No Drought
  misc_feature: MA Experiment ID: 108574 Result: Down-regulated in Transcription
  misc_feature: MA Experiment 108574 PARAMETER Experiment Name: At_Wounding__cDNA_P Parameter: Timepoint (hr) Value: 1
  misc_feature: MA Experiment 108574 PARAMETER Experiment Name: At_Wounding__cDNA_P Parameter: Tissue Value: Aerial
  misc_feature: MA Experiment 108574 PARAMETER Experiment Name: At_Wounding__cDNA_P Parameter: Treatment Value: Wounding vs. No Wounding
  misc_feature: MA Experiment ID: 108579 Result: Down-regulated in Transcription
  misc_feature: MA Experiment 108579 PARAMETER Experiment Name: At_4deg_Cold_cDNA_P Parameter: Temperature (deg C) Value: 4 vs. 22
  misc_feature: MA Experiment 108579 PARAMETER Experiment Name: At_4deg_Cold_cDNA_P Parameter: Timepoint (hr) Value: 6
  misc_feature: MA Experiment 108579 PARAMETER Experiment Name: At_4deg_Cold_cDNA_P Parameter: Tissue Value: Aerial
  misc_feature: MA Experiment ID: 108585 Result: Up-regulated in Transcription
  misc_feature: MA Experiment 108585 PARAMETER Experiment Name: At_5mM_NaNP_cDNA_P Parameter: Timepoint (hr) Value: 6
  misc_feature: MA Experiment 108585 PARAMETER Experiment Name: At_5mM_NaNP_cDNA_P Parameter: Tissue Value: Aerial
  misc_feature: MA Experiment 108585 PARAMETER Experiment Name: At_5mM_NaNP_cDNA_P Parameter: Treatment Value: null
  misc_feature: MA Experiment ID: 108594 Result: Up-regulated in Transcription
  misc_feature: MA Experiment 108594 PARAMETER Experiment Name: At_Ler-rhl_Root_cDNA_P Parameter: Plant Line Value: null
  misc_feature: MA Experiment ID: 108595 Result: Down-regulated in Transcription
  misc_feature: MA Experiment 108595 PARAMETER Experiment Name: At_Ler-pi_Ovule_cDNA_P Parameter: Plant Line Value: null
  misc_feature: MA Experiment ID: 20000069 Result: Up-regulated in Transcription
  misc_feature: MA Experiment 20000069 PARAMETER Experiment Name: At_100uM_ABA_Mutants_cDNA_P Parameter: Plant Line Value: CS23
  misc_feature: MA Experiment 20000069 PARAMETER Experiment Name: At_100uM_ABA_Mutants_cDNA_P Parameter: Timepoint (hr) Value: 6
  misc_feature: MA Experiment 20000069 PARAMETER Experiment Name: At_100uM_ABA_Mutants_cDNA_P Parameter: Tissue Value: Aerial
  misc_feature: MA Experiment 20000069 PARAMETER Experiment Name: At_100uM_ABA_Mutants_cDNA_P Parameter: Treatment Value: 100uM ABA vs. No Treatment
  misc_feature: MA Experiment ID: 20000070 Result: Up-regulated in Transcription
  misc_feature: MA Experiment 20000070 PARAMETER Experiment Name: At_100uM_ABA_Mutants_cDNA_P Parameter: Plant Line Value: CS24
  misc_feature: MA Experiment 20000070 PARAMETER Experiment Name: At_100uM_ABA_Mutants_cDNA_P Parameter: Timepoint (hr) Value: 6
  misc_feature: MA Experiment 20000070 PARAMETER Experiment Name: At_100uM_ABA_Mutants_cDNA_P Parameter: Tissue Value: Aerial
  misc_feature: MA Experiment 20000070 PARAMETER Experiment Name: At_100uM_ABA_Mutants_cDNA_P Parameter: Treatment Value: 100uM ABA vs. No Treatment
  misc_feature: MA Experiment ID: 20000071 Result: Up-regulated in Transcription
  misc_feature: MA Experiment 20000071 PARAMETER Experiment Name: At_100uM_ABA_Mutants_cDNA_P Parameter: Plant Line Value: CS8104
  misc_feature: MA Experiment 20000071 PARAMETER Experiment Name: At_100uM_ABA_Mutants_cDNA_P Parameter: Timepoint (hr) Value: 6
  misc_feature: MA Experiment 20000071 PARAMETER Experiment Name: At_100uM_ABA_Mutants_cDNA_P Parameter: Tissue Value: Aerial
  misc_feature: MA Experiment 20000071 PARAMETER Experiment Name: At_100uM_ABA_Mutants_cDNA_P Parameter: Treatment Value: 100uM ABA vs. No Treatment
  misc_feature: MA Experiment ID: 20000086 Result: Up-regulated in Transcription
  misc_feature: MA Experiment 20000086 PARAMETER Experiment Name: At_100uM_ABA_Mutants_cDNA_P Parameter: Plant Line Value: CS22
  misc_feature: MA Experiment 20000086 PARAMETER Experiment Name: At_100uM_ABA_Mutants_cDNA_P Parameter: Timepoint (hr) Value: 6
  misc_feature: MA Experiment 20000086 PARAMETER Experiment Name: At_100uM_ABA_Mutants_cDNA_P Parameter: Tissue Value: Aerial
  misc_feature: MA Experiment 20000086 PARAMETER Experiment Name: At_100uM_ABA_Mutants_cDNA_P Parameter: Treatment Value: 100uM ABA vs. No Treatment
  misc_feature: MA Experiment ID: 20000089 Result: Up-regulated in Transcription
  misc_feature: MA Experiment ID: 20000111 Result: Down-regulated in Transcription
  misc_feature: MA Experiment 20000111 PARAMETER Experiment Name: At_42deg_Heat_cDNA_P Parameter: Temperature (deg C) Value: 42 vs. 22
  misc_feature: MA Experiment 20000111 PARAMETER Experiment Name: At_42deg_Heat_cDNA_P Parameter: Timepoint (hr) Value: 6
  misc_feature: MA Experiment 20000111 PARAMETER Experiment Name: At_42deg_Heat_cDNA_P Parameter: Tissue Value: Aerial
  misc_feature: MA Experiment ID: 20000113 Result: Down-regulated in Transcription
  misc_feature: MA Experiment 20000113 PARAMETER Experiment Name: At_42deg_Heat_cDNA_P Parameter: Temperature (deg C) Value: 42 vs. 22
  misc_feature: MA Experiment 20000113 PARAMETER Experiment Name: At_42deg_Heat_cDNA_P Parameter: Timepoint (hr) Value: 8
  misc_feature: MA Experiment 20000113 PARAMETER Experiment Name: At_42deg_Heat_cDNA_P Parameter: Tissue Value: Aerial
  misc_feature: MA Experiment ID: 20000117 Result: Up-regulated in Transcription
  misc_feature: MA Experiment 20000117 PARAMETER Experiment Name: At_100uM_ABA_Mutants_cDNA_P Parameter: Plant Line Value: Columbia
  misc_feature: MA Experiment 20000117 PARAMETER Experiment Name: At_100uM_ABA_Mutants_cDNA_P Parameter: Timepoint (hr) Value: 6
  misc_feature: MA Experiment 20000117 PARAMETER Experiment Name: At_100uM_ABA_Mutants_cDNA_P Parameter: Tissue Value: Aerial
  misc_feature: MA Experiment 20000117 PARAMETER Experiment Name: At_100uM_ABA_Mutants_cDNA_P Parameter: Treatment Value: 100uM ABA vs. No Treatment
  misc_feature: MA Experiment ID: 20000173 Result: Down-regulated in Transcription
  misc_feature: MA Experiment 20000173 PARAMETER Experiment Name: At_42deg_Heat_P Parameter: Age (day) Value: 14
  misc_feature: MA Experiment 20000173 PARAMETER Experiment Name: At_42deg_Heat_P Parameter: Organism Value: A. thaliana
  misc_feature: MA Experiment 20000173 PARAMETER Experiment Name: At_42deg_Heat_P Parameter: Plant Line Value: WS
  misc_feature: MA Experiment 20000173 PARAMETER Experiment Name: At_42deg_Heat_P Parameter: Temperature (deg C) Value: 42 vs. 22
  misc_feature: MA Experiment 20000173 PARAMETER Experiment Name: At_42deg_Heat_P Parameter: Timepoint (hr) Value: 6
  misc_feature: MA Experiment 20000173 PARAMETER Experiment Name: At_42deg_Heat_P Parameter: Tissue Value: Aerial
  misc_feature: MA Experiment ID: 20000179 Result: Up-regulated in Transcription
  misc_feature: MA Experiment 20000179 PARAMETER Experiment Name: At_Germinating_Seeds_P Parameter: Age (hr) Value: 6 vs. 0
  misc_feature: MA Experiment 20000179 PARAMETER Experiment Name: At_Germinating_Seeds_P Parameter: Tissue Value: Germinating Seeds
  misc_feature: MA Experiment ID: 20000180 Result: Up-regulated in Transcription
  misc_feature: MA Experiment 20000180 PARAMETER Experiment Name: At_Germinating_Seeds_P Parameter: Age (hr) Value: 24 vs. 0
  misc_feature: MA Experiment 20000180 PARAMETER Experiment Name: At_Germinating_Seeds_P Parameter: Tissue Value: Germinating Seeds
  misc_feature: MA Experiment ID: 20000184 Result: Down-regulated in Transcription
  misc_feature: MA Experiment 20000184 PARAMETER Experiment Name: At_Shoots__P Parameter: Age (day) Value: 7
  misc_feature: MA Experiment 20000184 PARAMETER Experiment Name: At_Shoots__P Parameter: Tissue Value: Shoots vs. Whole Plant
  misc_feature: MA Experiment ID: 20000185 Result: Down-regulated in Transcription
  misc_feature: MA Experiment 20000185 PARAMETER Experiment Name: At_Roots__P Parameter: Age (day) Value: 7 vs. 21
  misc_feature: MA Experiment 20000185 PARAMETER Experiment Name: At_Roots__P Parameter: Organism Value: A. thaliana
  misc_feature: MA Experiment 20000185 PARAMETER Experiment Name: At_Roots__P Parameter: Tissue Value: Roots vs. Whole Plant
  misc_feature: MA Experiment ID: 20000224 Result: Down-regulated in Transcription
  misc_feature: MA Experiment ID: 20000227 Result: Down-regulated in Transcription
  misc_feature: MA Experiment 20000227 PARAMETER Experiment Name: At_Root-Tips-vs-Tops_P Parameter: Tissue Value: Root Tips vs. Root Tops
  misc_feature: MA Experiment ID: 20000234 Result: Down-regulated in Transcription
  misc_feature: MA Experiment 20000234 PARAMETER Experiment Name: At_Siliques_P Parameter: Age (day) Value: 21
  misc_feature: MA Experiment 20000234 PARAMETER Experiment Name: At_Siliques_P Parameter: Organism Value: A. thaliana
  misc_feature: MA Experiment 20000234 PARAMETER Experiment Name: At_Siliques_P Parameter: Plant Line Value: WS
  misc_feature: MA Experiment 20000234 PARAMETER Experiment Name: At_Siliques_P Parameter: Tissue Value: Less Than 5mm Siliques vs. Whole Plant
  misc_feature: MA Experiment ID: 20000264 Result: Down-regulated in Transcription
  misc_feature: MA Experiment 20000264 PARAMETER Experiment Name: At_Open_Flower_P Parameter: Age (day) Value: 21
  misc_feature: MA Experiment 20000264 PARAMETER Experiment Name: At_Open_Flower_P Parameter: Plant Line Value: WS
  misc_feature: MA Experiment 20000264 PARAMETER Experiment Name: At_Open_Flower_P Parameter: Tissue Value: Open Flower vs. Whole Plant
  misc_feature: MA Experiment ID: 20000265 Result: Down-regulated in Transcription
  misc_feature: MA Experiment 20000265 PARAMETER Experiment Name: At_Open_Flower_P Parameter: Age (day) Value: 21
  misc_feature: MA Experiment 20000265 PARAMETER Experiment Name: At_Open_Flower_P Parameter: Plant Line Value: WS
  misc_feature: MA Experiment 20000265 PARAMETER Experiment Name: At_Open_Flower_P Parameter: Tissue Value: Closed Flower vs. Whole Plant
  misc_feature: MA Experiment ID: 20000268 Result: Down-regulated in Transcription
  misc_feature: MA Experiment 20000268 PARAMETER Experiment Name: At_100mM_NaCl__P Parameter: Age (day) Value: 14
  misc_feature: MA Experiment 20000268 PARAMETER Experiment Name: At_100mM_NaCl__P Parameter: Organism Value: A. thaliana
  misc_feature: MA Experiment 20000268 PARAMETER Experiment Name: At_100mM_NaCl__P Parameter: Plant Line Value: WS
  misc_feature: MA Experiment 20000268 PARAMETER Experiment Name: At_100mM_NaCl__P Parameter: Timepoint (hr) Value: 6
  misc_feature: MA Experiment 20000268 PARAMETER Experiment Name: At_100mM_NaCl__P Parameter: Tissue Value: Whole Plant
  misc_feature: MA Experiment 20000268 PARAMETER Experiment Name: At_100mM_NaCl__P Parameter: Treatment Value: 100mM NaCl vs. No Treatment
  misc_feature: MA Experiment ID: 20000286 Result: Down-regulated in Transcription
  misc_feature: MA Experiment 20000286 PARAMETER Experiment Name: At_Open_Flower_P Parameter: Age (day) Value: 21
  misc_feature: MA Experiment 20000286 PARAMETER Experiment Name: At_Open_Flower_P Parameter: Plant Line Value: WS
  misc_feature: MA Experiment 20000286 PARAMETER Experiment Name: At_Open_Flower_P Parameter: Tissue Value: Half Open vs. Whole Plant
  misc_feature: MA Experiment ID: 20000308 Result: Down-regulated in Transcription
  misc_feature: MA Experiment 20000308 PARAMETER Experiment Name: At_100mM_NaCl__P Parameter: Age (day) Value: 17
  misc_feature: MA Experiment 20000308 PARAMETER Experiment Name: At_100mM_NaCl__P Parameter: Organism Value: A. thaliana
  misc_feature: MA Experiment 20000308 PARAMETER Experiment Name: At_100mM_NaCl__P Parameter: Plant Line Value: WS
  misc_feature: MA Experiment 20000308 PARAMETER Experiment Name: At_100mM_NaCl__P Parameter: Timepoint (hr) Value: 72
  misc_feature: MA Experiment 20000308 PARAMETER Experiment Name: At_100mM_NaCl__P Parameter: Tissue Value: Whole Plant
  misc_feature: MA Experiment 20000308 PARAMETER Experiment Name: At_100mM_NaCl__P Parameter: Treatment Value: 100mM NaCl vs. No Treatment
  misc_feature: MA Experiment ID: 20000437 Result: Up-regulated in Transcription
  misc_feature: MA Experiment 20000437 PARAMETER Experiment Name: At_Drought_P Parameter: Age (day) Value: 8
  misc_feature: MA Experiment 20000437 PARAMETER Experiment Name: At_Drought_P Parameter: Organism Value: A. thaliana
  misc_feature: MA Experiment 20000437 PARAMETER Experiment Name: At_Drought_P Parameter: Plant Line Value: WS
  misc_feature: MA Experiment 20000437 PARAMETER Experiment Name: At_Drought_P Parameter: Timepoint (hr) Value: 24
  misc_feature: MA Experiment 20000437 PARAMETER Experiment Name: At_Drought_P Parameter: Tissue Value: Whole Plant
  misc_feature: MA Experiment 20000437 PARAMETER Experiment Name: At_Drought_P Parameter: Treatment Value: Drought vs. No Drought
  misc_feature: MA Experiment ID: 20000439 Result: Down-regulated in Transcription
  misc_feature: MA Experiment 20000439 PARAMETER Experiment Name: At_Roots__P Parameter: Age (day) Value: 14 vs. 21
  misc_feature: MA Experiment 20000439 PARAMETER Experiment Name: At_Roots__P Parameter: Organism Value: A. thaliana
  misc_feature: MA Experiment 20000439 PARAMETER Experiment Name: At_Roots__P Parameter: Tissue Value: Roots vs. Whole Plant
  misc_feature: MA Experiment ID: 20000441 Result: Up-regulated in Transcription
  misc_feature: MA Experiment 20000441 PARAMETER Experiment Name: At_1uM_BR-BRZ__P Parameter: Tissue Value: Shoot Apices
  misc_feature: MA Experiment 20000441 PARAMETER Experiment Name: At_1uM_BR-BRZ__P Parameter: Treatment Value: 1uM BR vs. No Treatment
  misc_feature: MA Experiment ID: 20000443 Result: Up-regulated in Transcription
  misc_feature: MA Experiment 20000443 PARAMETER Experiment Name: At_1uM_BR-BRZ__P Parameter: Tissue Value: Shoot Apices
  misc_feature: MA Experiment 20000443 PARAMETER Experiment Name: At_1uM_BR-BRZ__P Parameter: Treatment Value: 1uM BRZ vs. No Treatment
  misc_feature: MA Experiment ID: 20000451 Result: Down-regulated in Transcription
  misc_feature: MA Experiment 20000451 PARAMETER Experiment Name: At_CS6879_Shoots-Roots_P Parameter: Age (day) Value: 14
  misc_feature: MA Experiment 20000451 PARAMETER Experiment Name: At_CS6879_Shoots-Roots_P Parameter: Organism Value: A. thaliana
  misc_feature: MA Experiment 20000451 PARAMETER Experiment Name: At_CS6879_Shoots-Roots_P Parameter: Plant Line Value: CS6879 vs. WS
  misc_feature: MA Experiment 20000451 PARAMETER Experiment Name: At_CS6879_Shoots-Roots_P Parameter: Tissue Value: Roots
  misc_feature: MA Experiment ID: 20000455 Result: Down-regulated in Transcription
  misc_feature: MA Experiment 20000455 PARAMETER Experiment Name: At_100uM_ABA_P Parameter: Age (day) Value: 16
  misc_feature: MA Experiment 20000455 PARAMETER Experiment Name: At_100uM_ABA_P Parameter: Organism Value: A. thaliana
  misc_feature: MA Experiment 20000455 PARAMETER Experiment Name: At_100uM_ABA_P Parameter: Plant Line Value: WS
  misc_feature: MA Experiment 20000455 PARAMETER Experiment Name: At_100uM_ABA_P Parameter: Timepoint (hr) Value: 48
  misc_feature: MA Experiment 20000455 PARAMETER Experiment Name: At_100uM_ABA_P Parameter: Tissue Value: Aerial
  misc_feature: MA Experiment 20000455 PARAMETER Experiment Name: At_100uM_ABA_P Parameter: Treatment Value: 100uM ABA vs. No Treatment
  misc_feature: MA Experiment ID: 20000456 Result: Down-regulated in Transcription
  misc_feature: MA Experiment 20000456 PARAMETER Experiment Name: At_100uM_BA_P Parameter: Age (day) Value: 14
  misc_feature: MA Experiment 20000456 PARAMETER Experiment Name: At_100uM_BA_P Parameter: Organism Value: A. thaliana
  misc_feature: MA Experiment 20000456 PARAMETER Experiment Name: At_100uM_BA_P Parameter: Plant Line Value: WS
  misc_feature: MA Experiment 20000456 PARAMETER Experiment Name: At_100uM_BA_P Parameter: Timepoint (hr) Value: 6
  misc_feature: MA Experiment 20000456 PARAMETER Experiment Name: At_100uM_BA_P Parameter: Tissue Value: Aerial
  misc_feature: MA Experiment 20000456 PARAMETER Experiment Name: At_100uM_BA_P Parameter: Treatment Value: 100uM BA vs. No Treatment
  misc_feature: MA Experiment ID: 20000527 Result: Up-regulated in Transcription
  misc_feature: MA Experiment 20000527 PARAMETER Experiment Name: At_10percent_PEG_P Parameter: Age (day) Value: 20
  misc_feature: MA Experiment 20000527 PARAMETER Experiment Name: At_10percent_PEG_P Parameter: Organism Value: A. thaliana
  misc_feature: MA Experiment 20000527 PARAMETER Experiment Name: At_10percent_PEG_P Parameter: Plant Line Value: WS
  misc_feature: MA Experiment 20000527 PARAMETER Experiment Name: At_10percent_PEG_P Parameter: Timepoint (day) Value: 20
  misc_feature: MA Experiment 20000527 PARAMETER Experiment Name: At_10percent_PEG_P Parameter: Tissue Value: Whole Plant
  misc_feature: MA Experiment 20000527 PARAMETER Experiment Name: At_10percent_PEG_P Parameter: Treatment Value: 10percent PEG vs. No Treatment
  misc_feature: MA Experiment ID: 20000573 Result: Up-regulated in Transcription
  misc_feature: MA Experiment 20000573 PARAMETER Experiment Name: At_100uM_ABA_Mutants__P Parameter: Organism Value: A. thaliana
  misc_feature: MA Experiment 20000573 PARAMETER Experiment Name: At_100uM_ABA_Mutants__P Parameter: Plant Line Value: CS22 vs. Ler wt
  misc_feature: MA Experiment 20000573 PARAMETER Experiment Name: At_100uM_ABA_Mutants__P Parameter: Timepoint (hr) Value: N/A
  misc_feature: MA Experiment 20000573 PARAMETER Experiment Name: At_100uM_ABA_Mutants__P Parameter: Tissue Value: Whole Plant
  misc_feature: MA Experiment 20000573 PARAMETER Experiment Name: At_100uM_ABA_Mutants__P Parameter: Treatment Value: None
  misc_feature: MA Experiment ID: 20000574 Result: Up-regulated in Transcription
  misc_feature: MA Experiment 20000574 PARAMETER Experiment Name: At_100uM_ABA_Mutants__P Parameter: Organism Value: A. thaliana
  misc_feature: MA Experiment 20000574 PARAMETER Experiment Name: At_100uM_ABA_Mutants__P Parameter: Plant Line Value: CS23 vs. Ler wt
  misc_feature: MA Experiment 20000574 PARAMETER Experiment Name: At_100uM_ABA_Mutants__P Parameter: Timepoint (hr) Value: N/A
  misc_feature: MA Experiment 20000574 PARAMETER Experiment Name: At_100uM_ABA_Mutants__P Parameter: Tissue Value: Whole Plant
  misc_feature: MA Experiment 20000574 PARAMETER Experiment Name: At_100uM_ABA_Mutants__P Parameter: Treatment Value: None
  misc_feature: MA Experiment ID: 20000794 Result: Down-regulated in Transcription
  misc_feature: MA Experiment 20000794 PARAMETER Experiment Name: At_Petals_P Parameter: Age (day) Value: 23-25 days
  misc_feature: MA Experiment 20000794 PARAMETER Experiment Name: At_Petals_P Parameter: Plant Line Value: WS
  misc_feature: MA Experiment 20000794 PARAMETER Experiment Name: At_Petals_P Parameter: Tissue Value: Petals vs. Whole plant
  misc_feature: MA Experiment ID: 20001247 Result: Up-regulated in Transcription
  misc_feature: MA Experiment 20001247 PARAMETER Experiment Name: At_Far-red-induction_P Parameter: Age (day) Value: 7
  misc_feature: MA Experiment 20001247 PARAMETER Experiment Name: At_Far-red-induction_P Parameter: Light Value: Far-red vs. White
  misc_feature: MA Experiment 20001247 PARAMETER Experiment Name: At_Far-red-induction_P Parameter: Organism Value: A. thaliana
  misc_feature: MA Experiment 20001247 PARAMETER Experiment Name: At_Far-red-induction_P Parameter: Plant Line Value: Columbia
  misc_feature: MA Experiment 20001247 PARAMETER Experiment Name: At_Far-red-induction_P Parameter: Timepoint (hr) Value: 1
  misc_feature: MA Experiment 20001247 PARAMETER Experiment Name: At_Far-red-induction_P Parameter: Tissue Value: Whole Plant
  misc_feature: MA Experiment ID: 20001248 Result: Up-regulated in Transcription
  misc_feature: MA Experiment 20001248 PARAMETER Experiment Name: At_Far-red-induction_P Parameter: Age (day) Value: 7
  misc_feature: MA Experiment 20001248 PARAMETER Experiment Name: At_Far-red-induction_P Parameter: Light Value: Far-red vs. White
  misc_feature: MA Experiment 20001248 PARAMETER Experiment Name: At_Far-red-induction_P Parameter: Organism Value: A. thaliana
  misc_feature: MA Experiment 20001248 PARAMETER Experiment Name: At_Far-red-induction_P Parameter: Plant Line Value: Columbia
  misc_feature: MA Experiment 20001248 PARAMETER Experiment Name: At_Far-red-induction_P Parameter: Timepoint (hr) Value: 4
  misc_feature: MA Experiment 20001248 PARAMETER Experiment Name: At_Far-red-induction_P Parameter: Tissue Value: Whole Plant
  misc_feature: MA Experiment ID: 20001450 Result: Up-regulated in Transcription
  misc_feature: MA Experiment 20001450 PARAMETER Experiment Name: At_Far-red-induction_P Parameter: Age (day) Value: 7
  misc_feature: MA Experiment 20001450 PARAMETER Experiment Name: At_Far-red-induction_P Parameter: Light Value: Far-red vs. White
  misc_feature: MA Experiment 20001450 PARAMETER Experiment Name: At_Far-red-induction_P Parameter: Organism Value: A. thaliana
  misc_feature: MA Experiment 20001450 PARAMETER Experiment Name: At_Far-red-induction_P Parameter: Plant Line Value: Columbia
  misc_feature: MA Experiment 20001450 PARAMETER Experiment Name: At_Far-red-induction_P Parameter: Timepoint (hr) Value: 8
  misc_feature: MA Experiment 20001450 PARAMETER Experiment Name: At_Far-red-induction_P Parameter: Tissue Value: Whole Plant
  misc_feature: MA Experiment ID: 20001451 Result: Up-regulated in Transcription
  misc_feature: MA Experiment 20001451 PARAMETER Experiment Name: At_Far-red-induction_P Parameter: Age (day) Value: 7
  misc_feature: MA Experiment 20001451 PARAMETER Experiment Name: At_Far-red-induction_P Parameter: Light Value: Far-red vs. White
  misc_feature: MA Experiment 20001451 PARAMETER Experiment Name: At_Far-red-induction_P Parameter: Organism Value: A. thaliana
  misc_feature: MA Experiment 20001451 PARAMETER Experiment Name: At_Far-red-induction_P Parameter: Plant Line Value: Columbia
  misc_feature: MA Experiment 20001451 PARAMETER Experiment Name: At_Far-red-induction_P Parameter: Timepoint (hr) Value: 24
  misc_feature: MA Experiment 20001451 PARAMETER Experiment Name: At_Far-red-induction_P Parameter: Tissue Value: Whole Plant
  misc_feature: MA Experiment ID: 20001554 Result: Down-regulated in Transcription
  misc_feature: MA Experiment 20001554 PARAMETER Experiment Name: At_Drought_Soil_Dry_P Parameter: Age (day) Value: 21
  misc_feature: MA Experiment 20001554 PARAMETER Experiment Name: At_Drought_Soil_Dry_P Parameter: Organism Value: A. thaliana
  misc_feature: MA Experiment 20001554 PARAMETER Experiment Name: At_Drought_Soil_Dry_P Parameter: Plant Line Value: WS
  misc_feature: MA Experiment 20001554 PARAMETER Experiment Name: At_Drought_Soil_Dry_P Parameter: Post Timepoint (hr) Value: None
  misc_feature: MA Experiment 20001554 PARAMETER Experiment Name: At_Drought_Soil_Dry_P Parameter: Post-Treatment Value: None
  misc_feature: MA Experiment 20001554 PARAMETER Experiment Name: At_Drought_Soil_Dry_P Parameter: Timepoint (day) Value: 7
  misc_feature: MA Experiment 20001554 PARAMETER Experiment Name: At_Drought_Soil_Dry_P Parameter: Treatment Value: Drought vs. No Drought
  misc_feature: MA Experiment ID: 20001555 Result: Down-regulated in Transcription
  misc_feature: MA Experiment 20001555 PARAMETER Experiment Name: At_Drought_Soil_Dry_P Parameter: Age (day) Value: 24
  misc_feature: MA Experiment 20001555 PARAMETER Experiment Name: At_Drought_Soil_Dry_P Parameter: Organism Value: A. thaliana
  misc_feature: MA Experiment 20001555 PARAMETER Experiment Name: At_Drought_Soil_Dry_P Parameter: Plant Line Value: WS
  misc_feature: MA Experiment 20001555 PARAMETER Experiment Name: At_Drought_Soil_Dry_P Parameter: Post Timepoint (hr) Value: None
  misc_feature: MA Experiment 20001555 PARAMETER Experiment Name: At_Drought_Soil_Dry_P Parameter: Post-Treatment Value: None
  misc_feature: MA Experiment 20001555 PARAMETER Experiment Name: At_Drought_Soil_Dry_P Parameter: Timepoint (day) Value: 10
  misc_feature: MA Experiment 20001555 PARAMETER Experiment Name: At_Drought_Soil_Dry_P Parameter: Treatment Value: Drought vs. No Drought
  misc_feature: MA Experiment ID: 20001556 Result: Down-regulated in Transcription
  misc_feature: MA Experiment 20001556 PARAMETER Experiment Name: At_Drought_Soil_Dry_P Parameter: Age (day) Value: 26
  misc_feature: MA Experiment 20001556 PARAMETER Experiment Name: At_Drought_Soil_Dry_P Parameter: Organism Value: A. thaliana
  misc_feature: MA Experiment 20001556 PARAMETER Experiment Name: At_Drought_Soil_Dry_P Parameter: Plant Line Value: WS
  misc_feature: MA Experiment 20001556 PARAMETER Experiment Name: At_Drought_Soil_Dry_P Parameter: Post Timepoint (hr) Value: None
  misc_feature: MA Experiment 20001556 PARAMETER Experiment Name: At_Drought_Soil_Dry_P Parameter: Post-Treatment Value: None
  misc_feature: MA Experiment 20001556 PARAMETER Experiment Name: At_Drought_Soil_Dry_P Parameter: Timepoint (day) Value: 12
  misc_feature: MA Experiment 20001556 PARAMETER Experiment Name: At_Drought_Soil_Dry_P Parameter: Treatment Value: Drought vs. No Drought
  misc_feature: MA Experiment ID: 20001557 Result: Down-regulated in Transcription
  misc_feature: MA Experiment 20001557 PARAMETER Experiment Name: At_Drought_Soil_Dry_P Parameter: Age (day) Value: 27
  misc_feature: MA Experiment 20001557 PARAMETER Experiment Name: At_Drought_Soil_Dry_P Parameter: Organism Value: A. thaliana
  misc_feature: MA Experiment 20001557 PARAMETER Experiment Name: At_Drought_Soil_Dry_P Parameter: Plant Line Value: WS
  misc_feature: MA Experiment 20001557 PARAMETER Experiment Name: At_Drought_Soil_Dry_P Parameter: Post Timepoint (hr) Value: 3
  misc_feature: MA Experiment 20001557 PARAMETER Experiment Name: At_Drought_Soil_Dry_P Parameter: Post-Treatment Value: Re-Water vs. No Drought
  misc_feature: MA Experiment 20001557 PARAMETER Experiment Name: At_Drought_Soil_Dry_P Parameter: Timepoint (day) Value: 13
  misc_feature: MA Experiment 20001557 PARAMETER Experiment Name: At_Drought_Soil_Dry_P Parameter: Treatment Value: Drought vs. No Drought
  misc_feature: MA Experiment ID: 20001558 Result: Down-regulated in Transcription
  misc_feature: MA Experiment 20001558 PARAMETER Experiment Name: At_Drought_Soil_Dry_P Parameter: Age (day) Value: 27
  misc_feature: MA Experiment 20001558 PARAMETER Experiment Name: At_Drought_Soil_Dry_P Parameter: Organism Value: A. thaliana
  misc_feature: MA Experiment 20001558 PARAMETER Experiment Name: At_Drought_Soil_Dry_P Parameter: Plant Line Value: WS
  misc_feature: MA Experiment 20001558 PARAMETER Experiment Name: At_Drought_Soil_Dry_P Parameter: Post Timepoint (hr) Value: 6
  misc_feature: MA Experiment 20001558 PARAMETER Experiment Name: At_Drought_Soil_Dry_P Parameter: Post-Treatment Value: Re-Water vs. No Drought
  misc_feature: MA Experiment 20001558 PARAMETER Experiment Name: At_Drought_Soil_Dry_P Parameter: Timepoint (day) Value: 13
  misc_feature: MA Experiment 20001558 PARAMETER Experiment Name: At_Drought_Soil_Dry_P Parameter: Treatment Value: Drought vs. No Drought
  misc_feature: MA Experiment ID: 20001559 Result: Down-regulated in Transcription
  misc_feature: MA Experiment 20001559 PARAMETER Experiment Name: At_Drought_Soil_Dry_P Parameter: Age (day) Value: 28
  misc_feature: MA Experiment 20001559 PARAMETER Experiment Name: At_Drought_Soil_Dry_P Parameter: Organism Value: A. thaliana
  misc_feature: MA Experiment 20001559 PARAMETER Experiment Name: At_Drought_Soil_Dry_P Parameter: Plant Line Value: WS
  misc_feature: MA Experiment 20001559 PARAMETER Experiment Name: At_Drought_Soil_Dry_P Parameter: Post Timepoint (hr) Value: 29
  misc_feature: MA Experiment 20001559 PARAMETER Experiment Name: At_Drought_Soil_Dry_P Parameter: Post-Treatment Value: Re-Water vs. No Drought
  misc_feature: MA Experiment 20001559 PARAMETER Experiment Name: At_Drought_Soil_Dry_P Parameter: Timepoint (day) Value: 14
  misc_feature: MA Experiment 20001559 PARAMETER Experiment Name: At_Drought_Soil_Dry_P Parameter: Treatment Value: Drought vs. No Drought
  misc_feature: MA Experiment ID: 20001560 Result: Down-regulated in Transcription
  misc_feature: MA Experiment 20001560 PARAMETER Experiment Name: At_Drought_Soil_Dry_P Parameter: Age (day) Value: 28
  misc_feature: MA Experiment 20001560 PARAMETER Experiment Name: At_Drought_Soil_Dry_P Parameter: Organism Value: A. thaliana
  misc_feature: MA Experiment 20001560 PARAMETER Experiment Name: At_Drought_Soil_Dry_P Parameter: Plant Line Value: WS
  misc_feature: MA Experiment 20001560 PARAMETER Experiment Name: At_Drought_Soil_Dry_P Parameter: Post Timepoint (hr) Value: None
  misc_feature: MA Experiment 20001560 PARAMETER Experiment Name: At_Drought_Soil_Dry_P Parameter: Post-Treatment Value: None
  misc_feature: MA Experiment 20001560 PARAMETER Experiment Name: At_Drought_Soil_Dry_P Parameter: Timepoint (day) Value: 14
  misc_feature: MA Experiment 20001560 PARAMETER Experiment Name: At_Drought_Soil_Dry_P Parameter: Treatment Value: Drought vs. No Drought
  misc_feature: MA Experiment ID: 20001755 Result: Down-regulated in Transcription
  misc_feature: MA Experiment 20001755 PARAMETER Experiment Name: At_50mM_NH4NO3_L-to-H_P Parameter: Timepoint (hr) Value: 2
  misc_feature: MA Experiment 20001755 PARAMETER Experiment Name: At_50mM_NH4NO3_L-to-H_P Parameter: Tissue Value: Leaf
  misc_feature: MA Experiment 20001755 PARAMETER Experiment Name: At_50mM_NH4NO3_L-to-H_P Parameter: Treatment Value: 50mM NH4NO3 vs 100mM Mannitol
  misc_feature: MA Experiment ID: 20001760 Result: Down-regulated in Transcription
  misc_feature: MA Experiment 20001760 PARAMETER Experiment Name: At_50mM_NH4NO3_L-to-H_P Parameter: Timepoint (hr) Value: 2
  misc_feature: MA Experiment 20001760 PARAMETER Experiment Name: At_50mM_NH4NO3_L-to-H_P Parameter: Tissue Value: Siliques
  misc_feature: MA Experiment 20001760 PARAMETER Experiment Name: At_50mM_NH4NO3_L-to-H_P Parameter: Treatment Value: 50mM NH4NO3 vs 100mM Mannitol
  misc_feature: MA Experiment ID: 20001904 Result: Down-regulated in Transcription
  misc_feature: MA Experiment 20001904 PARAMETER Experiment Name: At_Drought_Reproduction_P Parameter: Age (day) Value: 37
  misc_feature: MA Experiment 20001904 PARAMETER Experiment Name: At_Drought_Reproduction_P Parameter: Organism Value: A. thaliana
  misc_feature: MA Experiment 20001904 PARAMETER Experiment Name: At_Drought_Reproduction_P Parameter: Plant Line Value: WS
  misc_feature: MA Experiment 20001904 PARAMETER Experiment Name: At_Drought_Reproduction_P Parameter: Timepoint (day) Value: 7
  misc_feature: MA Experiment 20001904 PARAMETER Experiment Name: At_Drought_Reproduction_P Parameter: Tissue Value: Rosettes
  misc_feature: MA Experiment 20001904 PARAMETER Experiment Name: At_Drought_Reproduction_P Parameter: Treatment Value: Drought vs. No Drought
  misc_feature: MA Experiment ID: 20001905 Result: Down-regulated in Transcription
  misc_feature: MA Experiment 20001905 PARAMETER Experiment Name: At_Drought_Reproduction_P Parameter: Age (day) Value: 40
  misc_feature: MA Experiment 20001905 PARAMETER Experiment Name: At_Drought_Reproduction_P Parameter: Organism Value: A. thaliana
  misc_feature: MA Experiment 20001905 PARAMETER Experiment Name: At_Drought_Reproduction_P Parameter: Plant Line Value: WS
  misc_feature: MA Experiment 20001905 PARAMETER Experiment Name: At_Drought_Reproduction_P Parameter: Timepoint (day) Value: 10
  misc_feature: MA Experiment 20001905 PARAMETER Experiment Name: At_Drought_Reproduction_P Parameter: Tissue Value: Rosettes
  misc_feature: MA Experiment 20001905 PARAMETER Experiment Name: At_Drought_Reproduction_P Parameter: Treatment Value: Drought vs. No Drought
  misc_feature: MA Experiment ID: 20001907 Result: Down-regulated in Transcription
  misc_feature: MA Experiment 20001907 PARAMETER Experiment Name: At_Drought_Reproduction_P Parameter: Age (day) Value: 37
  misc_feature: MA Experiment 20001907 PARAMETER Experiment Name: At_Drought_Reproduction_P Parameter: Organism Value: A. thaliana
  misc_feature: MA Experiment 20001907 PARAMETER Experiment Name: At_Drought_Reproduction_P Parameter: Plant Line Value: WS
  misc_feature: MA Experiment 20001907 PARAMETER Experiment Name: At_Drought_Reproduction_P Parameter: Timepoint (day) Value: 7
  misc_feature: MA Experiment 20001907 PARAMETER Experiment Name: At_Drought_Reproduction_P Parameter: Tissue Value: Siliques
  misc_feature: MA Experiment 20001907 PARAMETER Experiment Name: At_Drought_Reproduction_P Parameter: Treatment Value: Drought vs. No Drought
  misc_feature: MA Experiment ID: 20001909 Result: Up-regulated in Transcription
  misc_feature: MA Experiment 20001909 PARAMETER Experiment Name: At_Drought_Reproduction_P Parameter: Age (day) Value: 35
  misc_feature: MA Experiment 20001909 PARAMETER Experiment Name: At_Drought_Reproduction_P Parameter: Organism Value: A. thaliana
  misc_feature: MA Experiment 20001909 PARAMETER Experiment Name: At_Drought_Reproduction_P Parameter: Plant Line Value: WS
  misc_feature: MA Experiment 20001909 PARAMETER Experiment Name: At_Drought_Reproduction_P Parameter: Timepoint (day) Value: 5
  misc_feature: MA Experiment 20001909 PARAMETER Experiment Name: At_Drought_Reproduction_P Parameter: Tissue Value: Flowers
  misc_feature: MA Experiment 20001909 PARAMETER Experiment Name: At_Drought_Reproduction_P Parameter: Treatment Value: Drought vs. No Drought
  misc_feature: MA Experiment ID: 20001911 Result: Up-regulated in Transcription
  misc_feature: MA Experiment 20001911 PARAMETER Experiment Name: At_Drought_Reproduction_P Parameter: Age (day) Value: 40
  misc_feature: MA Experiment 20001911 PARAMETER Experiment Name: At_Drought_Reproduction_P Parameter: Organism Value: A. thaliana
  misc_feature: MA Experiment 20001911 PARAMETER Experiment Name: At_Drought_Reproduction_P Parameter: Plant Line Value: WS
  misc_feature: MA Experiment 20001911 PARAMETER Experiment Name: At_Drought_Reproduction_P Parameter: Timepoint (day) Value: 10
  misc_feature: MA Experiment 20001911 PARAMETER Experiment Name: At_Drought_Reproduction_P Parameter: Tissue Value: Flowers
  misc_feature: MA Experiment 20001911 PARAMETER Experiment Name: At_Drought_Reproduction_P Parameter: Treatment Value: Drought vs. No Drought
atctaagtagcatcaaagcattctaaaagaagtttcaaagaagaagtgaaaatggaaaccactgcttttaacacaacatcacgaattggaaactggtcatcggctatttctccacctctacaaacatgtggatctttcaagtgccaattaccaacacgaagaggtgttattgtagctgatcttcgaaactcaaacttccgatggaggaaagcaacgacaacaagcagaggaaatgttgcagcagaggcagttaaaattcctacgtcagtaccagtaagagtggcgcgtgagctagctcaagcaggataccgctatctcgacgtgaggacaccagacgaattcagcatcggacatccgactagagccatcaacgtaccttacatgtacagagtcggatcaggaatggttaagaacccgagttttctaagacaggtctcgtcccacttcaggaaacacgatgaaatcataatcggttgtgagagcggtcaaatgtcatttatggcctcaactgatcttctcactgctggcttcacggcgatcacagacattgctggaggatacgtcgcttggacagagaatgagctgccggtagaagagtgaaaacaatcatagccatatcacctcctgtaattatcaataaattctgtagatgttctcaacgcaagtatcaatcatcattattattctctaaaacatagtttaactgtc

SEQ ID NO: 29284 - protein, 182 aa, Arabidopsis thaliana
  peptide (1)..(182): Ceres Seq. ID no. 12331872
  misc_feature (73)..(176): Pfam Name: Rhodanese-like domain Pfam Description: Rhodanese-like domain
  misc_feature (72)..(180): Homolog of NCBI NO: 18425042 NR Description: senescence-associated protein
  misc_feature (64)..(176): Homolog of NCBI NO: 2129628 NR Description: ketoconazole resistance protein - Arabidopsis
  misc_feature (64)..(181): Homolog of NCBI NO: 30698182 NR Description: senescence-associated protein [Arabidopsis
  misc_feature (53)..(181): Homolog of NCBI NO: 7340289 NR Description: OP1 [Cucumis sativus]
  misc_feature (13)..(181): Homolog of NCBI NO: 7594903 NR Description: Ntdin [Nicotiana tabacum]
  misc_feature (1)..(182): Homolog of NCBI NO: 118636 NR Description: Senescence-associated protein DIN1
  misc_feature (1)..(182): Homolog of NCBI NO: 7488606 NR Description: senescence-associated protein din1,
  misc_feature (1)..(182): Homolog of NCBI NO: 1046268 NR Description: senescence-associated protein [Arabidopsis
  misc_feature (1)..(182): Homolog of NCBI NO: 21537402 NR Description: senescence-associated protein sen1 [Arabidopsis
  misc_feature (1)..(182): Homolog of NCBI NO: 15233328 NR Description: senescence-associated protein sen1
METTAFNTTSRIGNWSSAISPPLQTCGSFKCQLPTRRGVIVADLRNSNFRWRKATTTSRGNVAAEAVKIPTSVPVRVARELAQAGYRYLDVRTPDEFSIGHPTRAINVPYMYRVGSGMVKNPSFLRQVSSHFRKHDEIIIGCESGQMSFMASTDLLTAGFTAITDIAGGYVAWTENELPVEE

SEQ ID NO: 29285 - DNA, 819 bp, Arabidopsis thaliana
  misc_feature (1)..(819): Ceres Seq. ID no. 12393395
  misc_feature: MA Experiment ID: 108434 Result: Up-regulated in Transcription
  misc_feature: MA Experiment 108434 PARAMETER Experiment Name: At_Root_Tips_cDNA_P Parameter: Tissue Value: Root Tips
  misc_feature: MA Experiment ID: 108462 Result: Down-regulated in Transcription
  misc_feature: MA Experiment 108462 PARAMETER Experiment Name: At_Germinating_Seeds_cDNA_P Parameter: Age (day) Value: 2 vs. 0
  misc_feature: MA Experiment 108462 PARAMETER Experiment Name: At_Germinating_Seeds_cDNA_P Parameter: Tissue Value: Germinating Seeds
  misc_feature: MA Experiment ID: 108463 Result: Down-regulated in Transcription
  misc_feature: MA Experiment 108463 PARAMETER Experiment Name: At_Germinating_Seeds_cDNA_P Parameter: Age (day) Value: 3 vs. 0
  misc_feature: MA Experiment 108463 PARAMETER Experiment Name: At_Germinating_Seeds_cDNA_P Parameter: Tissue Value: Germinating Seeds
  misc_feature: MA Experiment ID: 108464 Result: Down-regulated in Transcription
  misc_feature: MA Experiment 108464 PARAMETER Experiment Name: At_Germinating_Seeds_cDNA_P Parameter: Age (day) Value: 4 vs. 0
  misc_feature: MA Experiment 108464 PARAMETER Experiment Name: At_Germinating_Seeds_cDNA_P Parameter: Tissue Value: Germinating Seeds
  misc_feature: MA Experiment ID: 108569 Result: Down-regulated in Transcription
  misc_feature: MA Experiment 108569 PARAMETER Experiment Name: At_0.001%_MeJA__cDNA_P Parameter: Timepoint (hr) Value: 6
  misc_feature: MA Experiment 108569 PARAMETER Experiment Name: At_0.001%_MeJA__cDNA_P Parameter: Tissue Value: Aerial
  misc_feature: MA Experiment 108569 PARAMETER Experiment Name: At_0.001%_MeJA__cDNA_P Parameter: Treatment Value: 0.001% MeJA vs. No Treatment
  misc_feature: MA Experiment ID: 20000180 Result: Down-regulated in Transcription
  misc_feature: MA Experiment 20000180 PARAMETER Experiment Name: At_Germinating_Seeds_P Parameter: Age (hr) Value: 24 vs. 0
  misc_feature: MA Experiment 20000180 PARAMETER Experiment Name: At_Germinating_Seeds_P Parameter: Tissue Value: Germinating Seeds
  misc_feature: MA Experiment ID: 20000184 Result: Down-regulated in Transcription
  misc_feature: MA Experiment 20000184 PARAMETER Experiment Name: At_Shoots__P Parameter: Age (day) Value: 7
  misc_feature: MA Experiment 20000184 PARAMETER Experiment Name: At_Shoots__P Parameter: Tissue Value: Shoots vs. Whole Plant
  misc_feature: MA Experiment ID: 20000227 Result: Down-regulated in Transcription
  misc_feature: MA Experiment 20000227 PARAMETER Experiment Name: At_Root-Tips-vs-Tops_P Parameter: Tissue Value: Root Tips vs. Root Tops
  misc_feature: MA Experiment ID: 20001557 Result: Up-regulated in Transcription
  misc_feature: MA Experiment 20001557 PARAMETER Experiment Name: At_Drought_Soil_Dry_P Parameter: Age (day) Value: 27
  misc_feature: MA Experiment 20001557 PARAMETER Experiment Name: At_Drought_Soil_Dry_P Parameter: Organism Value: A. thaliana
  misc_feature: MA Experiment 20001557 PARAMETER Experiment Name: At_Drought_Soil_Dry_P Parameter: Plant Line Value: WS
  misc_feature: MA Experiment 20001557 PARAMETER Experiment Name: At_Drought_Soil_Dry_P Parameter: Post Timepoint (hr) Value: 3
  misc_feature: MA Experiment 20001557 PARAMETER Experiment Name: At_Drought_Soil_Dry_P Parameter: Post-Treatment Value: Re-Water vs. No Drought
  misc_feature: MA Experiment 20001557 PARAMETER Experiment Name: At_Drought_Soil_Dry_P Parameter: Timepoint (day) Value: 13
  misc_feature: MA Experiment 20001557 PARAMETER Experiment Name: At_Drought_Soil_Dry_P Parameter: Treatment Value: Drought vs. No Drought
  misc_feature: MA Experiment ID: 20001558 Result: Up-regulated in Transcription
  misc_feature: MA Experiment 20001558 PARAMETER Experiment Name: At_Drought_Soil_Dry_P Parameter: Age (day) Value: 27
  misc_feature: MA Experiment 20001558 PARAMETER Experiment Name: At_Drought_Soil_Dry_P Parameter: Organism Value: A. thaliana
  misc_feature: MA Experiment 20001558 PARAMETER Experiment Name: At_Drought_Soil_Dry_P Parameter: Plant Line Value: WS
  misc_feature: MA Experiment 20001558 PARAMETER Experiment Name: At_Drought_Soil_Dry_P Parameter: Post Timepoint (hr) Value: 6
  misc_feature: MA Experiment 20001558 PARAMETER Experiment Name: At_Drought_Soil_Dry_P Parameter: Post-Treatment Value: Re-Water vs. No Drought
  misc_feature: MA Experiment 20001558 PARAMETER Experiment Name: At_Drought_Soil_Dry_P Parameter: Timepoint (day) Value: 13
  misc_feature: MA Experiment 20001558 PARAMETER Experiment Name: At_Drought_Soil_Dry_P Parameter: Treatment Value: Drought vs. No Drought
  misc_feature: MA Experiment ID: 20001757 Result: Up-regulated in Transcription
  misc_feature: MA Experiment 20001757 PARAMETER Experiment Name: At_50mM_NH4NO3_L-to-H_P Parameter: Timepoint (hr) Value: 6
  misc_feature: MA Experiment 20001757 PARAMETER Experiment Name: At_50mM_NH4NO3_L-to-H_P Parameter: Tissue Value: Leaf
  misc_feature: MA Experiment 20001757 PARAMETER Experiment Name: At_50mM_NH4NO3_L-to-H_P Parameter: Treatment Value: 50mM NH4NO3 vs 100mM Mannitol
aaaaaaaggagaaagcttgaaacgccgcttcttcttcttctctgtcgttctctctgtaaatcgcttcttcaatcatctctgtggatttgtctctattcataacttggtgaagaagatgttgacggaagaggagctcaaaagattgtacagaatccagaagacgttgatgcagatgttaagggatcgtggatattttatcgcggattctgaacttacgatgactaaacaacagtttattaggaaacatggtgataacatgaaaagagaggatcttgttactcttaaggctaagcgaaatgataatagtgatcagctctatatattcttccctgatgaggcgaaagttggtgtgaagacgatgaaaatgtacacgaacaggatgaaatcagagaatgtgttcagagctattttggttgtgcaacagaacttgaccccgtttgctcgaacttgcattagtgagatctcttctaagtttcatctggaagttttccaggaggcggaaatgctagtgaacattaaagaacatgttcttgttcctgagcatcaagttcttaccactgaagagaagaaaactttactggagagatacacagtgaaggagacacagcttccaaggatccaagtgactgatccaatcgcaagatactttggactaaaacgtgggcaagtcgtgaagatcattcgtccgagtgaaacggctggtcgttatgttacctatcgttatgttgtataagccaaagcaaaaggcttttgtggattgtaatgcgaattgaacgctgagagttgtgaaacataagagtaatgcttttgtactaaacc

SEQ ID NO: 29286 - protein, 243 aa, Arabidopsis thaliana
  peptide (1)..(243): Ceres Seq. ID no. 12393396
  misc_feature (39)..(128): Pfam Name: RNA polymerase Rpb5, N-terminal domain Pfam Description: RNA polymerase Rpb5, N-terminal domain
  misc_feature (42)..(242): Homolog of NCBI NO: 19922004 NR Description: CG11979-PA [Drosophila melanogaster]
  misc_feature (40)..(243): Homolog of NCBI NO: 39595790 NR Description: Hypothetical protein CBG12745 [Caenorhabditis
  misc_feature (40)..(243): Homolog of NCBI NO: 17507947 NR Description: RNA polymerase Rpb5, N-terminal domain and RNA
  misc_feature (42)..(242): Homolog of NCBI NO: 14589951 NR Description: DNA directed RNA polymerase II polypeptide E
  misc_feature (42)..(242): Homolog of NCBI NO: 2896797 NR Description: RPB5_Human [Homo sapiens]
  misc_feature (42)..(242): Homolog of NCBI NO: 28497750 NR Description: polymerase (RNA) II (DNA directed) polypeptide E
  misc_feature (42)..(242): Homolog of NCBI NO: 2135016 NR Description: DNA-directed RNA polymerase (EC 2.7.7.6) II 23K
  misc_feature (42)..(242): Homolog of NCBI NO: 1173134 NR Description: DNA-directed RNA polymerase II 23 kDa polypeptide
  misc_feature (39)..(243): Homolog of NCBI NO: 38344231 NR Description: OJ991113_30.8 [Oryza sativa (japonica
  misc_feature (39)..(243): Homolog of NCBI NO: 15228724 NR Description: RNA polymerase I, II and III 24.3 kDa subunit
KKGESLKRRFFFFSVVLSVNRFFNHLCGFVSIHNLVKKMLTEEELKRLYRIQKTLMQMLRDRGYFIADSELTMTKQQFIRKHGDNMKREDLVTLKAKRNDNSDQLYIFFPDEAKVGVKTMKMYTNRMKSENVFRAILVVQQNLTPFARTCISEISSKFHLEVFQEAEMLVNIKEHVLVPEHQVLTTEEKKTLLERYTVKETQLPRIQVTDPIARYFGLKRGQVVKIIRPSETAGRYVTYRYVV

SEQ ID NO: 29287 - protein, 205 aa, Arabidopsis thaliana
  peptide (1)..(205): Ceres Seq. ID no. 12393397
  misc_feature (1)..(90): Pfam Name: RNA polymerase Rpb5, N-terminal domain Pfam Description: RNA polymerase Rpb5, N-terminal domain
  misc_feature (4)..(204): Homolog of NCBI NO: 19922004 NR Description: CG11979-PA [Drosophila melanogaster]
  misc_feature (2)..(205): Homolog of NCBI NO: 39595790 NR Description: Hypothetical protein CBG12745 [Caenorhabditis
  misc_feature (2)..(205): Homolog of NCBI NO: 17507947 NR Description: RNA polymerase Rpb5, N-terminal domain and RNA
  misc_feature (4)..(204): Homolog of NCBI NO: 14589951 NR Description: DNA directed RNA polymerase II polypeptide E
  misc_feature (4)..(204): Homolog of NCBI NO: 2896797 NR Description: RPB5_Human [Homo sapiens]
  misc_feature (4)..(204): Homolog of NCBI NO: 28497750 NR Description: polymerase (RNA) II (DNA directed) polypeptide E
  misc_feature (4)..(204): Homolog of NCBI NO: 2135016 NR Description: DNA-directed RNA polymerase (EC 2.7.7.6) II 23K
  misc_feature (4)..(204): Homolog of NCBI NO: 1173134 NR Description: DNA-directed RNA polymerase II 23 kDa polypeptide
  misc_feature (1)..(205): Homolog of NCBI NO: 38344231 NR Description: OJ991113_30.8 [Oryza sativa (japonica
  misc_feature (1)..(205): Homolog of NCBI NO: 15228724 NR Description: RNA polymerase I, II and III 24.3 kDa subunit
MLTEEELKRLYRIQKTLMQMLRDRGYFIADSELTMTKQQFIRKHGDNMKREDLVTLKAKRNDNSDQLYIFFPDEAKVGVKTMKMYTNRMKSENVFRAILVVQQNLTPFARTCISEISSKFHLEVFQEAEMLVNIKEHVLVPEHQVLTTEEKKTLLERYTVKETQLPRIQVTDPIARYFGLKRGQVVKIIRPSETAGRYVTYRYVV

SEQ ID NO: 29288 - protein, 188 aa, Arabidopsis thaliana
  peptide (1)..(188): Ceres Seq. ID no. 12393398
  misc_feature (1)..(73): Pfam Name: RNA polymerase Rpb5, N-terminal domain Pfam Description: RNA polymerase Rpb5, N-terminal domain
  misc_feature (1)..(187): Homolog of NCBI NO: 19922004 NR Description: CG11979-PA [Drosophila melanogaster]
  misc_feature (1)..(188): Homolog of NCBI NO: 39595790 NR Description: Hypothetical protein CBG12745 [Caenorhabditis
  misc_feature (1)..(188): Homolog of NCBI NO: 17507947 NR Description: RNA polymerase Rpb5, N-terminal domain and RNA
  misc_feature (1)..(187): Homolog of NCBI NO: 14589951 NR Description: DNA directed RNA polymerase II polypeptide E
  misc_feature (1)..(187): Homolog of NCBI NO: 2896797 NR Description: RPB5_Human [Homo sapiens]
  misc_feature (1)..(187): Homolog of NCBI NO: 28497750 NR Description: polymerase (RNA) II (DNA directed) polypeptide E
  misc_feature (1)..(187): Homolog of NCBI NO: 2135016 NR Description: DNA-directed RNA polymerase (EC 2.7.7.6) II 23K
  misc_feature (1)..(187): Homolog of NCBI NO: 1173134 NR Description: DNA-directed RNA polymerase II 23 kDa polypeptide
  misc_feature (1)..(188): Homolog of NCBI NO: 38344231 NR Description: OJ991113_30.8 [Oryza sativa (japonica
  misc_feature (1)..(188): Homolog of NCBI NO: 15228724 NR Description: RNA polymerase I, II and III 24.3 kDa subunit
MQMLRDRGYFIADSELTMTKQQFIRKHGDNMKREDLVTLKAKRNDNSDQLYIFFPDEAKVGVKTMKMYTNRMKSENVFRAILVVQQNLTPFARTCISEISSKFHLEVFQEAEMLVNIKEHVLVPEHQVLTTEEKKTLLERYTVKETQLPRIQVTDPIARYFGLKRGQVVKIIRPSETAGRYVTYRYVV

SEQ ID NO: 29289 - DNA, 1146 bp, Arabidopsis thaliana
  misc_feature (1)..(1146): Ceres Seq. ID no. 12337382
  misc_feature: MA Experiment ID: 108434 Result: Up-regulated in Transcription
  misc_feature: MA Experiment 108434 PARAMETER Experiment Name: At_Root_Tips_cDNA_P Parameter: Tissue Value: Root Tips
  misc_feature: MA Experiment ID: 108461 Result: Up-regulated in Transcription
  misc_feature: MA Experiment 108461 PARAMETER Experiment Name: At_Germinating_Seeds_cDNA_P Parameter: Age (day) Value: 1 vs. 0
  misc_feature: MA Experiment 108461 PARAMETER Experiment Name: At_Germinating_Seeds_cDNA_P Parameter: Tissue Value: Germinating Seeds
  misc_feature: MA Experiment ID: 108462 Result: Up-regulated in Transcription
  misc_feature: MA Experiment 108462 PARAMETER Experiment Name: At_Germinating_Seeds_cDNA_P Parameter: Age (day) Value: 2 vs. 0
  misc_feature: MA Experiment 108462 PARAMETER Experiment Name: At_Germinating_Seeds_cDNA_P Parameter: Tissue Value: Germinating Seeds
  misc_feature: MA Experiment ID: 108464 Result: Up-regulated in Transcription
  misc_feature: MA Experiment 108464 PARAMETER Experiment Name: At_Germinating_Seeds_cDNA_P Parameter: Age (day) Value: 4 vs. 0
  misc_feature: MA Experiment 108464 PARAMETER Experiment Name: At_Germinating_Seeds_cDNA_P Parameter: Tissue Value: Germinating Seeds
  misc_feature: MA Experiment ID: 108579 Result: Up-regulated in Transcription
  misc_feature: MA Experiment 108579 PARAMETER Experiment Name: At_4deg_Cold_cDNA_P Parameter: Temperature (deg C) Value: 4 vs. 22
  misc_feature: MA Experiment 108579 PARAMETER Experiment Name: At_4deg_Cold_cDNA_P Parameter: Timepoint (hr) Value: 6
  misc_feature: MA Experiment 108579 PARAMETER Experiment Name: At_4deg_Cold_cDNA_P Parameter: Tissue Value: Aerial
  misc_feature: MA Experiment ID: 108585 Result: Up-regulated in Transcription
  misc_feature: MA Experiment 108585 PARAMETER Experiment Name: At_5mM_NaNP_cDNA_P Parameter: Timepoint (hr) Value: 6
  misc_feature: MA Experiment 108585 PARAMETER Experiment Name: At_5mM_NaNP_cDNA_P Parameter: Tissue Value: Aerial
  misc_feature: MA Experiment 108585 PARAMETER Experiment Name: At_5mM_NaNP_cDNA_P Parameter: Treatment Value: null
  misc_feature: MA Experiment ID: 108595 Result: Down-regulated in Transcription
  misc_feature: MA Experiment 108595 PARAMETER Experiment Name: At_Ler-pi_Ovule_cDNA_P Parameter: Plant Line Value: null
  misc_feature: MA Experiment ID: 20000069 Result: Down-regulated in Transcription
  misc_feature: MA Experiment 20000069 PARAMETER Experiment Name: At_100uM_ABA_Mutants_cDNA_P Parameter: Plant Line Value: CS23
  misc_feature: MA Experiment 20000069 PARAMETER Experiment Name: At_100uM_ABA_Mutants_cDNA_P Parameter: Timepoint (hr) Value: 6
  misc_feature: MA Experiment 20000069 PARAMETER Experiment Name: At_100uM_ABA_Mutants_cDNA_P Parameter: Tissue Value: Aerial
  misc_feature: MA Experiment 20000069 PARAMETER Experiment Name: At_100uM_ABA_Mutants_cDNA_P Parameter: Treatment Value: 100uM ABA vs. No Treatment
  misc_feature: MA Experiment ID: 20000070 Result: Down-regulated in Transcription
  misc_feature: MA Experiment 20000070 PARAMETER Experiment Name: At_100uM_ABA_Mutants_cDNA_P Parameter: Plant Line Value: CS24
  misc_feature: MA Experiment 20000070 PARAMETER Experiment Name: At_100uM_ABA_Mutants_cDNA_P Parameter: Timepoint (hr) Value: 6
  misc_feature: MA Experiment 20000070 PARAMETER Experiment Name: At_100uM_ABA_Mutants_cDNA_P Parameter: Tissue Value: Aerial
  misc_feature: MA Experiment 20000070 PARAMETER Experiment Name: At_100uM_ABA_Mutants_cDNA_P Parameter: Treatment Value: 100uM ABA vs. No Treatment
  misc_feature: MA Experiment ID: 20000071 Result: Down-regulated in Transcription
  misc_feature: MA Experiment 20000071 PARAMETER Experiment Name: At_100uM_ABA_Mutants_cDNA_P Parameter: Plant Line Value: CS8104
  misc_feature: MA Experiment 20000071 PARAMETER Experiment Name: At_100uM_ABA_Mutants_cDNA_P Parameter: Timepoint (hr) Value: 6
  misc_feature: MA Experiment 20000071 PARAMETER Experiment Name: At_100uM_ABA_Mutants_cDNA_P Parameter: Tissue Value: Aerial
  misc_feature: MA Experiment 20000071 PARAMETER Experiment Name: At_100uM_ABA_Mutants_cDNA_P Parameter: Treatment Value: 100uM ABA vs. No Treatment
  misc_feature: MA Experiment ID: 20000086 Result: Down-regulated in Transcription
  misc_feature: MA Experiment 20000086 PARAMETER Experiment Name: At_100uM_ABA_Mutants_cDNA_P Parameter: Plant Line Value: CS22
  misc_feature: MA Experiment 20000086 PARAMETER Experiment Name: At_100uM_ABA_Mutants_cDNA_P Parameter: Timepoint (hr) Value: 6
  misc_feature: MA Experiment 20000086 PARAMETER Experiment Name: At_100uM_ABA_Mutants_cDNA_P Parameter: Tissue Value: Aerial
  misc_feature: MA Experiment 20000086 PARAMETER Experiment Name: At_100uM_ABA_Mutants_cDNA_P Parameter: Treatment Value: 100uM ABA vs. No Treatment
  misc_feature: MA Experiment ID: 20000087 Result: Down-regulated in Transcription
  misc_feature: MA Experiment 20000087 PARAMETER Experiment Name: At_100uM_ABA_Mutants_cDNA_P Parameter: Plant Line Value: WS
  misc_feature: MA Experiment 20000087 PARAMETER Experiment Name: At_100uM_ABA_Mutants_cDNA_P Parameter: Timepoint (hr) Value: 6
  misc_feature: MA Experiment 20000087 PARAMETER Experiment Name: At_100uM_ABA_Mutants_cDNA_P Parameter: Tissue Value: Aerial
  misc_feature: MA Experiment 20000087 PARAMETER Experiment Name: At_100uM_ABA_Mutants_cDNA_P Parameter: Treatment Value: 100uM ABA vs. No Treatment
  misc_feature: MA Experiment ID: 20000088 Result: Down-regulated in Transcription
  misc_feature: MA Experiment 20000088 PARAMETER Experiment Name: At_100uM_ABA_Mutants_cDNA_P Parameter: Plant Line Value: Landsberg
  misc_feature: MA Experiment 20000088 PARAMETER Experiment Name: At_100uM_ABA_Mutants_cDNA_P Parameter: Timepoint (hr) Value: 6
  misc_feature: MA Experiment 20000088 PARAMETER Experiment Name: At_100uM_ABA_Mutants_cDNA_P Parameter: Tissue Value: Aerial
  misc_feature: MA Experiment 20000088 PARAMETER Experiment Name: At_100uM_ABA_Mutants_cDNA_P Parameter: Treatment Value: 100uM ABA vs. No Treatment
  misc_feature: MA Experiment ID: 20000089 Result: Down-regulated in Transcription
  misc_feature: MA Experiment ID: 20000090 Result: Down-regulated in Transcription
  misc_feature: MA Experiment ID: 20000117 Result: Down-regulated in Transcription
  misc_feature: MA Experiment 20000117 PARAMETER Experiment Name: At_100uM_ABA_Mutants_cDNA_P Parameter: Plant Line Value: Columbia
  misc_feature: MA Experiment 20000117 PARAMETER Experiment Name: At_100uM_ABA_Mutants_cDNA_P Parameter: Timepoint (hr) Value: 6
  misc_feature: MA Experiment 20000117 PARAMETER Experiment Name: At_100uM_ABA_Mutants_cDNA_P Parameter: Tissue Value: Aerial
  misc_feature: MA Experiment 20000117 PARAMETER Experiment Name: At_100uM_ABA_Mutants_cDNA_P Parameter: Treatment Value: 100uM ABA vs. No Treatment
  misc_feature: MA Experiment ID: 20000179 Result: Up-regulated in Transcription
  misc_feature: MA Experiment 20000179 PARAMETER Experiment Name: At_Germinating_Seeds_P Parameter: Age (hr) Value: 6 vs. 0
  misc_feature: MA Experiment 20000179 PARAMETER Experiment Name: At_Germinating_Seeds_P Parameter: Tissue Value: Germinating Seeds
  misc_feature: MA Experiment ID: 20000180 Result: Up-regulated in Transcription
  misc_feature: MA Experiment 20000180 PARAMETER Experiment Name: At_Germinating_Seeds_P Parameter: Age (hr) Value: 24 vs. 0
  misc_feature: MA Experiment 20000180 PARAMETER Experiment Name: At_Germinating_Seeds_P Parameter: Tissue Value: Germinating Seeds
  misc_feature: MA Experiment ID: 20000184 Result: Up-regulated in Transcription
  misc_feature: MA Experiment 20000184 PARAMETER Experiment Name: At_Shoots__P Parameter: Age (day) Value: 7
  misc_feature: MA Experiment 20000184 PARAMETER Experiment Name: At_Shoots__P Parameter: Tissue Value: Shoots vs. Whole Plant
  misc_feature: MA Experiment ID: 20000264 Result: Down-regulated in Transcription
  misc_feature: MA Experiment 20000264 PARAMETER Experiment Name: At_Open_Flower_P Parameter: Age (day) Value: 21
  misc_feature: MA Experiment 20000264 PARAMETER Experiment Name: At_Open_Flower_P Parameter: Plant Line Value: WS
  misc_feature: MA Experiment 20000264 PARAMETER Experiment Name: At_Open_Flower_P Parameter: Tissue Value: Open Flower vs. Whole Plant
  misc_feature: MA Experiment ID: 20000265 Result: Down-regulated in Transcription
  misc_feature: MA Experiment 20000265 PARAMETER Experiment Name: At_Open_Flower_P Parameter: Age (day) Value: 21
  misc_feature: MA Experiment 20000265 PARAMETER Experiment Name: At_Open_Flower_P Parameter: Plant Line Value: WS
  misc_feature: MA Experiment 20000265 PARAMETER Experiment Name: At_Open_Flower_P Parameter: Tissue Value: Closed Flower vs. Whole Plant
  misc_feature: MA Experiment ID: 20000286 Result: Down-regulated in Transcription
  misc_feature: MA Experiment 20000286 PARAMETER Experiment Name: At_Open_Flower_P Parameter: Age (day) Value: 21
  misc_feature: MA Experiment 20000286 PARAMETER Experiment Name: At_Open_Flower_P Parameter: Plant Line Value: WS
  misc_feature: MA Experiment 20000286 PARAMETER Experiment Name: At_Open_Flower_P Parameter: Tissue Value: Half Open vs. Whole Plant
  misc_feature: MA Experiment ID: 20000437 Result: Down-regulated in Transcription
  misc_feature: MA Experiment 20000437 PARAMETER Experiment Name: At_Drought_P Parameter: Age (day) Value: 8
  misc_feature: MA Experiment 20000437 PARAMETER Experiment Name: At_Drought_P Parameter: Organism Value: A. thaliana
  misc_feature: MA Experiment 20000437 PARAMETER Experiment Name: At_Drought_P Parameter: Plant Line Value: WS
  misc_feature: MA Experiment 20000437 PARAMETER Experiment Name: At_Drought_P Parameter: Timepoint (hr) Value: 24
  misc_feature: MA Experiment 20000437 PARAMETER Experiment Name: At_Drought_P Parameter: Tissue Value: Whole Plant
  misc_feature: MA Experiment 20000437 PARAMETER Experiment Name: At_Drought_P Parameter: Treatment Value: Drought vs. No Drought
  misc_feature: MA Experiment ID: 20000794 Result: Down-regulated in Transcription
  misc_feature: MA Experiment 20000794 PARAMETER Experiment Name: At_Petals_P Parameter: Age (day) Value: 23-25 days
  misc_feature: MA Experiment 20000794 PARAMETER Experiment Name: At_Petals_P Parameter: Plant Line Value: WS
  misc_feature: MA Experiment 20000794 PARAMETER Experiment Name: At_Petals_P Parameter: Tissue Value: Petals vs. Whole plant
  misc_feature: MA Experiment ID: 20001555 Result: Down-regulated in Transcription
  misc_feature: MA Experiment 20001555 PARAMETER Experiment Name: At_Drought_Soil_Dry_P Parameter: Age (day) Value: 24
  misc_feature: MA Experiment 20001555 PARAMETER Experiment Name: At_Drought_Soil_Dry_P Parameter: Organism Value: A. thaliana
  misc_feature: MA Experiment 20001555 PARAMETER Experiment Name: At_Drought_Soil_Dry_P Parameter: Plant Line Value: WS
  misc_feature: MA Experiment 20001555 PARAMETER Experiment Name: At_Drought_Soil_Dry_P Parameter: Post Timepoint (hr) Value: None
  misc_feature: MA Experiment 20001555 PARAMETER Experiment Name: At_Drought_Soil_Dry_P Parameter: Post-Treatment Value: None
  misc_feature: MA Experiment 20001555 PARAMETER Experiment Name: At_Drought_Soil_Dry_P Parameter: Timepoint (day) Value: 10
  misc_feature: MA Experiment 20001555 PARAMETER Experiment Name: At_Drought_Soil_Dry_P Parameter: Treatment Value: Drought vs. No Drought
  misc_feature: MA Experiment ID: 20001556 Result: Down-regulated in Transcription
  misc_feature: MA Experiment 20001556 PARAMETER Experiment Name: At_Drought_Soil_Dry_P Parameter: Age (day) Value: 26
  misc_feature: MA Experiment 20001556 PARAMETER Experiment Name: At_Drought_Soil_Dry_P Parameter: Organism Value: A. thaliana
  misc_feature: MA Experiment 20001556 PARAMETER Experiment Name: At_Drought_Soil_Dry_P Parameter: Plant Line Value: WS
  misc_feature: MA Experiment 20001556 PARAMETER Experiment Name: At_Drought_Soil_Dry_P Parameter: Post Timepoint (hr) Value: None
  misc_feature: MA Experiment 20001556 PARAMETER Experiment Name: At_Drought_Soil_Dry_P Parameter: Post-Treatment Value: None
  misc_feature: MA Experiment 20001556 PARAMETER Experiment Name: At_Drought_Soil_Dry_P Parameter: Timepoint (day) Value: 12
  misc_feature: MA Experiment 20001556 PARAMETER Experiment Name: At_Drought_Soil_Dry_P Parameter: Treatment Value: Drought vs. No Drought
  misc_feature: MA Experiment ID: 20001559 Result: Down-regulated in Transcription
  misc_feature: MA Experiment 20001559 PARAMETER Experiment Name: At_Drought_Soil_Dry_P Parameter: Age (day) Value: 28
  misc_feature: MA Experiment 20001559 PARAMETER Experiment Name: At_Drought_Soil_Dry_P Parameter: Organism Value: A. thaliana
  misc_feature: MA Experiment 20001559 PARAMETER Experiment Name: At_Drought_Soil_Dry_P Parameter: Plant Line Value: WS
  misc_feature: MA Experiment 20001559 PARAMETER Experiment Name: At_Drought_Soil_Dry_P Parameter: Post Timepoint (hr) Value: 29
  misc_feature: MA Experiment 20001559 PARAMETER Experiment Name: At_Drought_Soil_Dry_P Parameter: Post-Treatment Value: Re-Water vs. No Drought
  misc_feature: MA Experiment 20001559 PARAMETER Experiment Name: At_Drought_Soil_Dry_P Parameter: Timepoint (day) Value: 14
  misc_feature: MA Experiment 20001559 PARAMETER Experiment Name: At_Drought_Soil_Dry_P Parameter: Treatment Value: Drought vs. No Drought
  misc_feature: MA Experiment ID: 20001904 Result: Down-regulated in Transcription
  misc_feature: MA Experiment 20001904 PARAMETER Experiment Name: At_Drought_Reproduction_P Parameter: Age (day) Value: 37
  misc_feature: MA Experiment 20001904 PARAMETER Experiment Name: At_Drought_Reproduction_P Parameter: Organism Value: A. thaliana
  misc_feature: MA Experiment 20001904 PARAMETER Experiment Name: At_Drought_Reproduction_P Parameter: Plant Line Value: WS
  misc_feature: MA Experiment 20001904 PARAMETER Experiment Name: At_Drought_Reproduction_P Parameter: Timepoint (day) Value: 7
  misc_feature: MA Experiment 20001904 PARAMETER Experiment Name: At_Drought_Reproduction_P Parameter: Tissue Value: Rosettes
  misc_feature: MA Experiment 20001904 PARAMETER Experiment Name: At_Drought_Reproduction_P Parameter: Treatment Value: Drought vs. No Drought
  misc_feature: MA Experiment ID: 20001905 Result: Down-regulated in Transcription
  misc_feature: MA Experiment 20001905 PARAMETER Experiment Name: At_Drought_Reproduction_P Parameter: Age (day) Value: 40
  misc_feature: MA Experiment 20001905 PARAMETER Experiment Name: At_Drought_Reproduction_P Parameter: Organism Value: A. thaliana
  misc_feature: MA Experiment 20001905 PARAMETER Experiment Name: At_Drought_Reproduction_P Parameter: Plant Line Value: WS
  misc_feature: MA Experiment 20001905 PARAMETER Experiment Name: At_Drought_Reproduction_P Parameter: Timepoint (day) Value: 10
  misc_feature: MA Experiment 20001905 PARAMETER Experiment Name: At_Drought_Reproduction_P Parameter: Tissue Value: Rosettes
  misc_feature: MA Experiment 20001905 PARAMETER Experiment Name: At_Drought_Reproduction_P Parameter: Treatment Value: Drought vs. No Drought
  misc_feature: MA Experiment ID: 20001911 Result: Down-regulated in Transcription
  misc_feature: MA Experiment 20001911 PARAMETER Experiment Name: At_Drought_Reproduction_P Parameter: Age (day) Value: 40
  misc_feature: MA Experiment 20001911 PARAMETER Experiment Name: At_Drought_Reproduction_P Parameter: Organism Value: A. thaliana
  misc_feature: MA Experiment 20001911 PARAMETER Experiment Name: At_Drought_Reproduction_P Parameter: Plant Line Value: WS
  misc_feature: MA Experiment 20001911 PARAMETER Experiment Name: At_Drought_Reproduction_P Parameter: Timepoint (day) Value: 10
  misc_feature: MA Experiment 20001911 PARAMETER Experiment Name: At_Drought_Reproduction_P Parameter: Tissue Value: Flowers
  misc_feature: MA Experiment 20001911 PARAMETER Experiment Name: At_Drought_Reproduction_P Parameter: Treatment Value: Drought vs. No Drought
atctggatttgttcttttttcatttttattcgagcggcttatctttctcggatccatctgatatcgatttgattctctttggtcaatcgttgaaatggcggatgcgtggaaggatttagcttcagggacagttggaggagcggctcagctagttgttggtcatccatttgacacaatcaaagtcaaacttcagagccaaccgactccagcaccaggccaacttccaaggtacaccggtgcaatcgatgcggttaaacagaccgttgcttctgaaggaactaaaggtttgtacaaaggtatgggagctccactggcaaccgttgctgccttcaatgcggttttgttcactgtgagaggtcaaatggaagggctgcttaggtctgaagctggaattcctttgaccattagtcaacagtttgtggccggtgcaggcgctggttccctgtttcgttccttgcttgtcctactgagttgatcaaatgcaggttgcaagcacaaggtgcattagctggtgcctctactacaagctcagtggttgcagccgtgaaatacggtggaccaatggatgtagcccgtcatgtcctacgatcagaaggcggagcacgaggtctattcaaaggtttattcccgacattcgcccgtgaagtcccgggaaatgcaacaatgtttgcagcctacgaagctttcaagcggtttttagccggtggttcagacacttcaagcttaggacaagggtcattgatcatggcgggtggagtcgctggtgcgtcgttttggggaattgtatatccgacagatgttgtgaagagtgttcttcaagtcgacgattacaaaaacccgaaatacacggggtcgatggatgctttccggaagattctgaaatctgaaggagttaaaggtttgtataaaggatttggtccagctatggctaggagtgttcctgctaatgctgcttgcttcttggcttatgagatgacaaggtcaagcttgggataaaccggttcgttttgggtttaactgttggtcctatttctggatgttccattgtcattaacctctctgtttttagatttgattcttttgaaatttctgcaaaaattatgtatctcttacacagtttatttcaactatctcttacacagaagc

SEQ ID NO: 29290 - protein, 144 aa, Arabidopsis thaliana
  peptide (1)..(144): Ceres Seq. ID no. 12337383
  misc_feature (1)..(143): Homolog of NCBI NO: 38566282 NR Description: Carnitine/acylcarnitine translocase [Silurana
  misc_feature (1)..(143): Homolog of NCBI NO: 27694786 NR Description: Similar to solute carrier family 25
  misc_feature (1)..(138): Homolog of NCBI NO: 31216089 NR Description: ENSANGP00000020391 [Anopheles gambiae]
  misc_feature (1)..(143): Homolog of NCBI NO: 38541954 NR Description: Unknown (protein for MGC:77760) [Danio rerio]
  misc_feature (1)..(139): Homolog of NCBI NO: 39593620 NR Description: Hypothetical protein CBG05908 [Caenorhabditis
  misc_feature (1)..(139): Homolog of NCBI NO: 17539560 NR Description: Embryonic tissue differentiation factor DIF-1,
  misc_feature (1)..(144): Homolog of NCBI NO: 37537072 NR Description: putative carnitine/acylcarnitine translocase
  misc_feature (1)..(144): Homolog of NCBI NO: 37537070 NR Description: putative carnitine/acylcarnitine translocase
  misc_feature (1)..(144): Homolog of NCBI NO: 9758516 NR Description: carnitine/acylcarnitine translocase-like protein
  misc_feature (1)..(144): Homolog of NCBI NO: 18422718 NR Description: mitochondrial carrier protein family
MDVARHVLRSEGGARGLFKGLFPTFAREVPGNATMFAAYEAFKRFLAGGSDTSSLGQGSLIMAGGVAGASFWGIVYPTDVVKSVLQVDDYKNPKYTGSMDAFRKILKSEGVKGLYKGFGPAMARSVPANAACFLAYEMTRSSLG

SEQ ID NO: 29291 - protein, 126 aa, Arabidopsis thaliana
  peptide (1)..(126): Ceres Seq. ID no. 12337384
  misc_feature (6)..(115): Homolog of NCBI NO: 38566282 NR Description: Carnitine/acylcarnitine translocase [Silurana
  misc_feature (6)..(115): Homolog of NCBI NO: 27694786 NR Description: Similar to solute carrier family 25
  misc_feature (6)..(115): Homolog of NCBI NO: 31216089 NR Description: ENSANGP00000020391 [Anopheles gambiae]
  misc_feature (6)..(115): Homolog of NCBI NO: 38541954 NR Description: Unknown (protein for MGC:77760) [Danio rerio]
  misc_feature (1)..(124): Homolog of NCBI NO: 39593620 NR Description: Hypothetical protein CBG05908 [Caenorhabditis
  misc_feature (1)..(124): Homolog of NCBI NO: 17539560 NR Description: Embryonic tissue differentiation factor DIF-1,
  misc_feature (1)..(115): Homolog of NCBI NO: 37537072 NR Description: putative carnitine/acylcarnitine translocase
  misc_feature (1)..(115): Homolog of NCBI NO: 37537070 NR Description: putative carnitine/acylcarnitine translocase
  misc_feature (1)..(115): Homolog of NCBI NO: 9758516 NR Description: carnitine/acylcarnitine translocase-like protein
  misc_feature (1)..(115): Homolog of NCBI NO: 18422718 NR Description: mitochondrial carrier protein family
MADAWKDLASGTVGGAAQLVVGHPFDTIKVKLQSQPTPAPGQLPRYTGAIDAVKQTVASEGTKGLYKGMGAPLATVAAFNAVLFTVRGQMEGLLRSEAGIPLTISQQFVAGAGAGSLFRSLLVLLS

SEQ ID NO: 29292 - protein, 110 aa, Arabidopsis thaliana
  peptide (1)..(110): Ceres Seq. ID no. 12337385
  misc_feature (1)..(109): Homolog of NCBI NO: 38566282 NR Description: Carnitine/acylcarnitine translocase [Silurana
  misc_feature (1)..(109): Homolog of NCBI NO: 27694786 NR Description: Similar to solute carrier family 25
  misc_feature (1)..(104): Homolog of NCBI NO: 31216089 NR Description: ENSANGP00000020391 [Anopheles gambiae]
  misc_feature (1)..(109): Homolog of NCBI NO: 38541954 NR Description: Unknown (protein for MGC:77760) [Danio rerio]
  misc_feature (1)..(105): Homolog of NCBI NO: 39593620 NR Description: Hypothetical protein CBG05908 [Caenorhabditis
  misc_feature (1)..(105): Homolog of NCBI NO: 17539560 NR Description: Embryonic tissue differentiation factor DIF-1,
  misc_feature (1)..(110): Homolog of NCBI NO: 37537072 NR Description: putative carnitine/acylcarnitine translocase
  misc_feature (1)..(110): Homolog of NCBI NO: 37537070 NR Description: putative carnitine/acylcarnitine translocase
  misc_feature (1)..(110): Homolog of NCBI NO: 9758516 NR Description: carnitine/acylcarnitine translocase-like protein
  misc_feature (1)..(110): Homolog of NCBI NO: 18422718 NR Description: mitochondrial carrier protein family
MFAAYEAFKRFLAGGSDTSSLGQGSLIMAGGVAGASFWGIVYPTDVVKSVLQVDDYKNPKYTGSMDAFRKILKSEGVKGLYKGFGPAMARSVPANAACFLAYEMTRSSLG

SEQ ID NO: 29293 - DNA, 1263 bp, Arabidopsis thaliana
  misc_feature (1)..(1263): Ceres Seq. ID no. 12324797
  misc_feature: MA Experiment ID: 108461 Result: Down-regulated in Transcription
  misc_feature: MA Experiment 108461 PARAMETER Experiment Name: At_Germinating_Seeds_cDNA_P Parameter: Age (day) Value: 1 vs. 0
  misc_feature: MA Experiment 108461 PARAMETER Experiment Name: At_Germinating_Seeds_cDNA_P Parameter: Tissue Value: Germinating Seeds
  misc_feature: MA Experiment ID: 108462 Result: Down-regulated in Transcription
  misc_feature: MA Experiment 108462 PARAMETER Experiment Name: At_Germinating_Seeds_cDNA_P Parameter: Age (day) Value: 2 vs. 0
  misc_feature: MA Experiment 108462 PARAMETER Experiment Name: At_Germinating_Seeds_cDNA_P Parameter: Tissue Value: Germinating Seeds
  misc_feature: MA Experiment ID: 108594 Result: Down-regulated in Transcription
  misc_feature: MA Experiment 108594 PARAMETER Experiment Name: At_Ler-rhl_Root_cDNA_P Parameter: Plant Line Value: null
  misc_feature: MA Experiment ID: 20000117 Result: Down-regulated in Transcription
  misc_feature: MA Experiment 20000117 PARAMETER Experiment Name: At_100uM_ABA_Mutants_cDNA_P Parameter: Plant Line Value: Columbia
  misc_feature: MA Experiment 20000117 PARAMETER Experiment Name: At_100uM_ABA_Mutants_cDNA_P Parameter: Timepoint (hr) Value: 6
  misc_feature: MA Experiment 20000117 PARAMETER Experiment Name: At_100uM_ABA_Mutants_cDNA_P Parameter: Tissue Value: Aerial
  misc_feature: MA Experiment 20000117 PARAMETER Experiment Name: At_100uM_ABA_Mutants_cDNA_P Parameter: Treatment Value: 100uM ABA vs. No Treatment
  misc_feature: MA Experiment ID: 20000179 Result: Down-regulated in Transcription
  misc_feature: MA Experiment 20000179 PARAMETER Experiment Name: At_Germinating_Seeds_P Parameter: Age (hr) Value: 6 vs. 0
  misc_feature: MA Experiment 20000179 PARAMETER Experiment Name: At_Germinating_Seeds_P Parameter: Tissue Value: Germinating Seeds
  misc_feature: MA Experiment ID: 20000180 Result: Down-regulated in Transcription
  misc_feature: MA Experiment 20000180 PARAMETER Experiment Name: At_Germinating_Seeds_P Parameter: Age (hr) Value: 24 vs. 0
  misc_feature: MA Experiment 20000180 PARAMETER Experiment Name: At_Germinating_Seeds_P Parameter: Tissue Value: Germinating Seeds
  misc_feature: MA Experiment ID: 20000227 Result: Down-regulated in Transcription
  misc_feature: MA Experiment 20000227 PARAMETER Experiment Name: At_Root-Tips-vs-Tops_P Parameter: Tissue Value: Root Tips vs. Root Tops
  misc_feature: MA Experiment ID: 20000234 Result: Down-regulated in Transcription
  misc_feature: MA Experiment 20000234 PARAMETER Experiment Name: At_Siliques_P Parameter: Age (day) Value: 21
  misc_feature: MA Experiment 20000234 PARAMETER Experiment Name: At_Siliques_P Parameter: Organism Value: A. thaliana
  misc_feature: MA Experiment 20000234 PARAMETER Experiment Name: At_Siliques_P Parameter: Plant Line Value: WS
  misc_feature: MA Experiment 20000234 PARAMETER Experiment Name: At_Siliques_P Parameter: Tissue Value: Less Than 5mm Siliques vs. Whole Plant
  misc_feature: MA Experiment ID: 20000264 Result: Down-regulated in Transcription
  misc_feature: MA Experiment 20000264 PARAMETER Experiment Name: At_Open_Flower_P Parameter: Age (day) Value: 21
  misc_feature: MA Experiment 20000264 PARAMETER Experiment Name: At_Open_Flower_P Parameter: Plant Line Value: WS
  misc_feature: MA Experiment 20000264 PARAMETER Experiment Name: At_Open_Flower_P Parameter: Tissue Value: Open Flower vs. Whole Plant
  misc_feature: MA Experiment ID: 20000265 Result: Down-regulated in Transcription
  misc_feature: MA Experiment 20000265 PARAMETER Experiment Name: At_Open_Flower_P Parameter: Age (day) Value: 21
  misc_feature: MA Experiment 20000265 PARAMETER Experiment Name: At_Open_Flower_P Parameter: Plant Line Value: WS
  misc_feature: MA Experiment 20000265 PARAMETER Experiment Name: At_Open_Flower_P Parameter: Tissue Value: Closed Flower vs. Whole Plant
  misc_feature: MA Experiment ID: 20000286 Result: Down-regulated in Transcription
  misc_feature: MA Experiment 20000286 PARAMETER Experiment Name: At_Open_Flower_P Parameter: Age (day) Value: 21
  misc_feature: MA Experiment 20000286 PARAMETER Experiment Name: At_Open_Flower_P Parameter: Plant Line Value: WS
  misc_feature: MA Experiment 20000286 PARAMETER Experiment Name: At_Open_Flower_P Parameter: Tissue Value: Half Open vs. Whole Plant
  misc_feature: MA Experiment ID: 20000438 Result: Down-regulated in Transcription
  misc_feature: MA Experiment 20000438 PARAMETER Experiment Name: At_Shoots__P Parameter: Age (day) Value: 14
  misc_feature: MA Experiment 20000438 PARAMETER Experiment Name: At_Shoots__P Parameter: Tissue Value: Shoots vs. Whole Plant
  misc_feature: MA Experiment ID: 20000794 Result: Down-regulated in Transcription
  misc_feature: MA Experiment 20000794 PARAMETER Experiment Name: At_Petals_P Parameter: Age (day) Value: 23-25 days
  misc_feature: MA Experiment 20000794 PARAMETER Experiment Name: At_Petals_P Parameter: Plant Line Value: WS
  misc_feature: MA Experiment 20000794 PARAMETER Experiment Name: At_Petals_P Parameter: Tissue Value: Petals vs. Whole plant
gaaactctctttcagatttcaagaaacccttaaaatcctctctctgtctctttctgtttgtttgttttcttgtttccttctctctctctctttctttctttgtcttcctttcccaggttgtttttttttgctctctctgccttcttgactttcaaaagactctttctttcttttggattgattttggattctagggctctctttcttttagtgggtttttgttcttgttgtggtctctctgatgattactgaacttgagatggggaaaggtgagagtgagcttgagcttggtctagggctgagtcttggcggtggaacggcggccaagattggtaaatcaggtggtggtggcgcgtggggagagcgtggaaggcttttgacggctaaggattttccttctgttggttctaaacgtgctgctgattctgcttctcatgctggttcatctcctcctcgttcaagtcaagttgttggatggcctcctatagggtcacacaggatgaacagtttggttaataaccaagctacaaagtcagcaagagaagaagaagaagctggtaagaagaaagtgaaagatgatgaacctaaagatgtgacaaagaaagtgaatgggaaagtacaagttggatttattaaggtgaacatggatggagttgctataggaagaaaagtggatttgaatgctcattcttcttacgagaatttggcgcaaacattggaagatatgttctttcgcactaatccgggtactgtcgggttaaccagtcagttcactaaaccgttgaggcttttagatggatcgtctgagtttgtacttacttatgaagataaggaaggagattggatgcttgttggtgatgttccatggagaatgttcatcaactcggtgaaaaggctacgtgtgatgaaaacctctgaagctaatggactcgctgcacgaaatcaagaaccaaacgagagacagcgaaagcagccggtttagatctcttttcgacgttacggtgttacaggttttatattttggggttttgcaagtctgagatacttctgaagcaagcataagctagattgatcttatatccagtttgtgtattttcttggttcttataatggtttttactggttttctttagtttttttttttgctgtcttttaattttcggttgcgatttcactatatactatggatggaagagaatgctctttatatcttttactacactgtaaatatttgaagcttatctaatatcgtttttaagggtc

SEQ ID NO: 29294 - protein, 246 aa, Arabidopsis thaliana
  peptide (1)..(246): Ceres Seq. ID no. 12324798
  misc_feature (15)..(234): Pfam Name: AUX/IAA family Pfam Description: AUX/IAA family
  misc_feature (15)..(234): Pfam Name: AUX/IAA family Pfam Description: AUX/IAA family
  misc_feature (56)..(243): Homolog of NCBI NO: 21594025 NR Description: auxin regulated protein IAA18, putative
  misc_feature (11)..(230): Homolog of NCBI NO: 15219646 NR Description: putative IAA1 protein
  misc_feature (12)..(231): Homolog of NCBI NO: 20466408 NR Description: early auxin-inducible protein 11 [Arabidopsis
  misc_feature (12)..(231): Homolog of NCBI NO: 15235385 NR Description: early auxin-inducible protein 11 (IAA11)
  misc_feature (53)..(230): Homolog of NCBI NO: 20269057 NR Description: aux/IAA protein [Populus tremula x Populus
  misc_feature (56)..(243): Homolog of NCBI NO: 21594025 NR Description: auxin regulated protein IAA18, putative
  misc_feature (12)..(231): Homolog of NCBI NO: 20466408 NR Description: early auxin-inducible protein 11 [Arabidopsis
  misc_feature (53)..(230): Homolog of NCBI NO: 20269057 NR Description: aux/IAA protein [Populus tremula x Populus
  misc_feature (1)..(246): Homolog of NCBI NO: 15225833 NR Description: auxin regulated protein (IAA13)
  misc_feature (1)..(246): Homolog of NCBI NO: 30685642 NR Description: auxin-responsive protein IAA13 (Indoleacetic
  misc_feature (2)..(246): Homolog of NCBI NO: 21593621 NR Description: putative auxin-induced protein, IAA12
  misc_feature (2)..(246): Homolog of NCBI NO: 15219761 NR Description: putative auxin-induced protein, IAA12
  misc_feature (2)..(164): Homolog of NCBI NO: 30678907 NR Description: auxin-responsive protein IAA12 (Indoleacetic
  misc_feature (12)..(231): Homolog of NCBI NO: 15235385 NR Description: early auxin-inducible protein 11 (IAA11)
  misc_feature (11)..(230): Homolog of NCBI NO: 15219646 NR Description: putative IAA1 protein
  misc_feature (2)..(164): Homolog of NCBI NO: 30678907 NR Description: auxin-responsive protein IAA12 (Indoleacetic
  misc_feature (2)..(246): Homolog of NCBI NO: 15219761 NR Description: putative auxin-induced protein, IAA12
  misc_feature (2)..(246): Homolog of NCBI NO: 21593621 NR Description: putative auxin-induced protein, IAA12
  misc_feature (1)..(246): Homolog of NCBI NO: 30685642 NR Description: auxin-responsive protein IAA13 (Indoleacetic
  misc_feature (1)..(246): Homolog of NCBI NO: 15225833 NR Description: auxin regulated protein (IAA13)
MITELEMGKGESELELGLGLSLGGGTAAKIGKSGGGGAWGERGRLLTAKDFPSVGSKRAADSASHAGSSPPRSSQVVGWPPIGSHRMNSLVNNQATKSAREEEEAGKKKVKDDEPKDVTKKVNGKVQVGFIKVNMDGVAIGRKVDLNAHSSYENLAQTLEDMFFRTNPGTVGLTSQFTKPLRLLDGSSEFVLTYEDKEGDWMLVGDVPWRMFINSVKRLRVMKTSEANGLAARNQEPNERQRKQPV

SEQ ID NO: 29295 - protein, 240 aa, Arabidopsis thaliana
  peptide (1)..(240): Ceres Seq. ID no. 12324799
  misc_feature (9)..(228): Pfam Name: AUX/IAA family Pfam Description: AUX/IAA family
  misc_feature (9)..(228): Pfam Name: AUX/IAA family Pfam Description: AUX/IAA family
  misc_feature (50)..(237): Homolog of NCBI NO: 21594025 NR Description: auxin regulated protein IAA18, putative
  misc_feature (5)..(224): Homolog of NCBI NO: 15219646 NR Description: putative IAA1 protein
  misc_feature (6)..(225): Homolog of NCBI NO: 20466408 NR Description: early auxin-inducible protein 11 [Arabidopsis
  misc_feature (6)..(225): Homolog of NCBI NO: 15235385 NR Description: early auxin-inducible protein 11 (IAA11)
  misc_feature (47)..(224): Homolog of NCBI NO: 20269057 NR Description: aux/IAA protein [Populus tremula x Populus
  misc_feature (50)..(237): Homolog of NCBI NO: 21594025 NR Description: auxin regulated protein IAA18, putative
  misc_feature (6)..(225): Homolog of NCBI NO: 20466408 NR Description: early auxin-inducible protein 11 [Arabidopsis
  misc_feature (47)..(224): Homolog of NCBI NO: 20269057 NR Description: aux/IAA protein [Populus tremula x Populus
  misc_feature (1)..(240): Homolog of NCBI NO: 15225833 NR Description: auxin regulated protein (IAA13)
  misc_feature (1)..(240): Homolog of NCBI NO: 30685642 NR Description: auxin-responsive protein IAA13 (Indoleacetic
  misc_feature (1)..(240): Homolog of NCBI NO: 21593621 NR Description: putative auxin-induced protein, IAA12
  misc_feature (1)..(240): Homolog of NCBI NO: 15219761 NR Description: putative auxin-induced protein, IAA12
  misc_feature (1)..(158): Homolog of NCBI NO: 30678907 NR Description: auxin-responsive protein IAA12 (Indoleacetic
  misc_feature (6)..(225): Homolog of NCBI NO: 15235385 NR Description: early auxin-inducible protein 11 (IAA11)
  misc_feature (5)..(224): Homolog of NCBI NO: 15219646 NR Description: putative IAA1 protein
  misc_feature (1)..(158): Homolog of NCBI NO: 30678907 NR Description: auxin-responsive protein IAA12 (Indoleacetic
  misc_feature (1)..(240): Homolog of NCBI NO: 15219761 NR Description: putative auxin-induced protein, IAA12
  misc_feature (1)..(240): Homolog of NCBI NO: 21593621 NR Description: putative auxin-induced protein, IAA12
  misc_feature (1)..(240): Homolog of NCBI NO: 30685642 NR Description: auxin-responsive protein IAA13 (Indoleacetic
  misc_feature (1)..(240): Homolog of NCBI NO: 15225833 NR Description: auxin regulated protein (IAA13)
MGKGESELELGLGLSLGGGTAAKIGKSGGGGAWGERGRLLTAKDFPSVGSKRAADSASHAGSSPPRSSQVVGWPPIGSHRMNSLVNNQATKSAREEEEAGKKKVKDDEPKDVTKKVNGKVQVGFIKVNMDGVAIGRKVDLNAHSSYENLAQTLEDMFFRTNPGTVGLTSQFTKPLRLLDGSSEFVLTYEDKEGDWMLVGDVPWRMFINSVKRLRVMKTSEANGLAARNQEPNERQRKQPV

SEQ ID NO: 29296 - protein, 160 aa, Arabidopsis thaliana
  peptide (1)..(160): Ceres Seq. ID no. 12324800
  misc_feature (1)..(148): Pfam Name: AUX/IAA family Pfam Description: AUX/IAA family
  misc_feature (1)..(148): Pfam Name: AUX/IAA family Pfam Description: AUX/IAA family
  misc_feature (1)..(157): Homolog of NCBI NO: 21594025 NR Description: auxin regulated protein IAA18, putative
  misc_feature (1)..(144): Homolog of NCBI NO: 15219646 NR Description: putative IAA1 protein
  misc_feature (1)..(145): Homolog of NCBI NO: 20466408 NR Description: early auxin-inducible protein 11 [Arabidopsis
  misc_feature (1)..(145): Homolog of NCBI NO: 15235385 NR Description: early auxin-inducible protein 11 (IAA11)
  misc_feature (1)..(144): Homolog of NCBI NO: 20269057 NR Description: aux/IAA protein [Populus tremula x Populus
  misc_feature (1)..(157): Homolog of NCBI NO: 21594025 NR Description: auxin regulated protein IAA18, putative
  misc_feature (1)..(145): Homolog of NCBI NO: 20466408 NR Description: early auxin-inducible protein 11 [Arabidopsis
  misc_feature (1)..(144): Homolog of NCBI NO: 20269057 NR Description: aux/IAA protein [Populus tremula x Populus
  misc_feature (1)..(160): Homolog of NCBI NO: 15225833 NR Description: auxin regulated protein (IAA13)
  misc_feature (1)..(160): Homolog of NCBI NO: 30685642 NR Description: auxin-responsive protein IAA13 (Indoleacetic
  misc_feature (1)..(160): Homolog of NCBI NO: 21593621 NR Description: putative auxin-induced protein, IAA12
  misc_feature (1)..(160): Homolog of NCBI NO: 15219761 NR Description: putative auxin-induced protein, IAA12
  misc_feature (1)..(78): Homolog of NCBI NO: 30678907 NR Description: auxin-responsive protein IAA12 (Indoleacetic
  misc_feature (1)..(145): Homolog of NCBI NO: 15235385 NR Description: early auxin-inducible protein 11 (IAA11)
  misc_feature (1)..(144): Homolog of NCBI NO: 15219646 NR Description: putative IAA1 protein
  misc_feature (1)..(78): Homolog of NCBI NO: 30678907 NR Description: auxin-responsive protein IAA12 (Indoleacetic
  misc_feature (1)..(160): Homolog of NCBI NO: 15219761 NR Description: putative auxin-induced protein, IAA12
  misc_feature (1)..(160): Homolog of NCBI NO: 21593621 NR Description: putative auxin-induced protein, IAA12
  misc_feature (1)..(160): Homolog of NCBI NO: 30685642 NR Description: auxin-responsive protein IAA13 (Indoleacetic
  misc_feature (1)..(160): Homolog of NCBI NO: 15225833 NR Description: auxin regulated protein (IAA13)
MNSLVNNQATKSAREEEEAGKKKVKDDEPKDVTKKVNGKVQVGFIKVNMDGVAIGRKVDLNAHSSYENLAQTLEDMFFRTNPGTVGLTSQFTKPLRLLDGSSEFVLTYEDKEGDWMLVGDVPWRMFINSVKRLRVMKTSEANGLAARNQEPNERQRKQPV

SEQ ID NO: 29297 - DNA, 1687 bp, Arabidopsis thaliana
  misc_feature (1)..(1687): Ceres Seq. ID no. 12321246
  misc_feature: MA Experiment ID: 108434 Result: Down-regulated in Transcription
  misc_feature: MA Experiment 108434 PARAMETER Experiment Name: At_Root_Tips_cDNA_P Parameter: Tissue Value: Root Tips
  misc_feature: MA Experiment ID: 108435 Result: Up-regulated in Transcription
  misc_feature: MA Experiment 108435 PARAMETER Experiment Name: At_stm_Mutants_cDNA_P Parameter: Plant Line Value: wt Landsburg vs stm
  misc_feature: MA Experiment 108435 PARAMETER Experiment Name: At_stm_Mutants_cDNA_P Parameter: Tissue Value: Shoot Apical Meristem Region
  misc_feature: MA Experiment ID: 108501 Result: Down-regulated in Transcription
  misc_feature: MA Experiment 108501 PARAMETER Experiment Name: At_ap2_floral_buds_cDNA_P Parameter: Plant Line Value: ap2 (Ler.)
  misc_feature: MA Experiment 108501 PARAMETER Experiment Name: At_ap2_floral_buds_cDNA_P Parameter: Tissue Value: Closed Flower
  misc_feature: MA Experiment ID: 108569 Result: Up-regulated in Transcription
  misc_feature: MA Experiment 108569 PARAMETER Experiment Name: At_0.001%_MeJA__cDNA_P Parameter: Timepoint (hr) Value: 6
  misc_feature: MA Experiment 108569 PARAMETER Experiment Name: At_0.001%_MeJA__cDNA_P Parameter: Tissue Value: Aerial
  misc_feature: MA Experiment 108569 PARAMETER Experiment Name: At_0.001%_MeJA__cDNA_P Parameter: Treatment Value: 0.001% MeJA vs. No Treatment
  misc_feature: MA Experiment ID: 108573 Result: Down-regulated in Transcription
  misc_feature: MA Experiment 108573 PARAMETER Experiment Name: At_Drought_cDNA_P Parameter: Timepoint (hr) Value: 6
  misc_feature: MA Experiment 108573 PARAMETER Experiment Name: At_Drought_cDNA_P Parameter: Tissue Value: Aerial
  misc_feature: MA Experiment 108573 PARAMETER Experiment Name: At_Drought_cDNA_P Parameter: Treatment Value: Drought vs. No Drought
  misc_feature: MA Experiment ID: 108574 Result: Up-regulated in Transcription
  misc_feature: MA Experiment 108574 PARAMETER Experiment Name: At_Wounding__cDNA_P Parameter: Timepoint (hr) Value: 1
  misc_feature: MA Experiment 108574 PARAMETER Experiment Name: At_Wounding__cDNA_P Parameter: Tissue Value: Aerial
  misc_feature: MA Experiment 108574 PARAMETER Experiment Name: At_Wounding__cDNA_P Parameter: Treatment Value: Wounding vs. No Wounding
  misc_feature: MA Experiment ID: 108576 Result: Down-regulated in Transcription
  misc_feature: MA Experiment 108576 PARAMETER Experiment Name: At_42deg_Heat_cDNA_P Parameter: Temperature (deg C) Value: 42 vs. 22
  misc_feature: MA Experiment 108576 PARAMETER Experiment Name: At_42deg_Heat_cDNA_P Parameter: Timepoint (hr) Value: 1
  misc_feature: MA Experiment 108576 PARAMETER Experiment Name: At_42deg_Heat_cDNA_P Parameter: Tissue Value: Aerial
  misc_feature: MA Experiment ID: 108577 Result: Down-regulated in Transcription
  misc_feature: MA Experiment 108577 PARAMETER Experiment Name: At_42deg_Heat_cDNA_P Parameter: Temperature (deg C) Value: 42 vs. 22
  misc_feature: MA Experiment 108577 PARAMETER Experiment Name: At_42deg_Heat_cDNA_P Parameter: Timepoint (hr) Value: 6
  misc_feature: MA Experiment 108577 PARAMETER Experiment Name: At_42deg_Heat_cDNA_P Parameter: Tissue Value: Aerial
  misc_feature: MA Experiment ID: 108595 Result: Down-regulated in Transcription
  misc_feature: MA Experiment 108595 PARAMETER Experiment Name: At_Ler-pi_Ovule_cDNA_P Parameter: Plant Line Value: null
  misc_feature: MA Experiment ID: 20000093 Result: Down-regulated in Transcription
  misc_feature: MA Experiment 20000093 PARAMETER Experiment Name: At_42deg_Heat_cDNA_P Parameter: Temperature (deg C) Value: 42 vs. 22
  misc_feature: MA Experiment 20000093 PARAMETER Experiment Name: At_42deg_Heat_cDNA_P Parameter: Timepoint (hr) Value: 0.5
  misc_feature: MA Experiment 20000093 PARAMETER Experiment Name: At_42deg_Heat_cDNA_P Parameter: Tissue Value: Aerial
  misc_feature: MA Experiment ID: 20000112 Result: Down-regulated in Transcription
  misc_feature: MA Experiment 20000112 PARAMETER Experiment Name: At_42deg_Heat_cDNA_P Parameter: Temperature (deg C) Value: 42 vs. 22
  misc_feature: MA Experiment 20000112 PARAMETER Experiment Name: At_42deg_Heat_cDNA_P Parameter: Timepoint (hr) Value: 2
  misc_feature: MA Experiment 20000112 PARAMETER Experiment Name: At_42deg_Heat_cDNA_P Parameter: Tissue Value: Aerial
  misc_feature: MA Experiment ID: 20000113 Result: Down-regulated in Transcription
  misc_feature: MA Experiment 20000113 PARAMETER Experiment Name: At_42deg_Heat_cDNA_P Parameter: Temperature (deg C) Value: 42 vs. 22
  misc_feature: MA Experiment 20000113 PARAMETER Experiment Name: At_42deg_Heat_cDNA_P Parameter: Timepoint (hr) Value: 8
  misc_feature: MA Experiment 20000113 PARAMETER Experiment Name: At_42deg_Heat_cDNA_P Parameter: Tissue Value: Aerial
  misc_feature: MA Experiment ID: 20000144 Result: Down-regulated in Transcription
  misc_feature: MA Experiment 20000144 PARAMETER Experiment Name: At_42deg_Heat_cDNA_P Parameter: Temperature (deg C) Value: 42 vs. 22
  misc_feature: MA Experiment 20000144 PARAMETER Experiment Name: At_42deg_Heat_cDNA_P Parameter: Timepoint (hr) Value: 1
  misc_feature: MA Experiment 20000144 PARAMETER Experiment Name: At_42deg_Heat_cDNA_P Parameter: Tissue Value: Aerial
  misc_feature: MA Experiment ID: 20000171 Result: Down-regulated in Transcription
  misc_feature: MA Experiment 20000171 PARAMETER Experiment Name: At_42deg_Heat_P Parameter: Age (day) Value: 14
  misc_feature: MA Experiment 20000171 PARAMETER Experiment Name: At_42deg_Heat_P Parameter: Organism Value: A. thaliana
  misc_feature: MA Experiment 20000171 PARAMETER Experiment Name: At_42deg_Heat_P Parameter: Plant Line Value: WS
  misc_feature: MA Experiment 20000171 PARAMETER Experiment Name: At_42deg_Heat_P Parameter: Temperature (deg C) Value: 42 vs. 22
  misc_feature: MA Experiment 20000171 PARAMETER Experiment Name: At_42deg_Heat_P Parameter: Timepoint (hr) Value: 1
  misc_feature: MA Experiment 20000171 PARAMETER Experiment Name: At_42deg_Heat_P Parameter: Tissue Value: Aerial
  misc_feature: MA Experiment ID: 20000173 Result: Down-regulated in Transcription
  misc_feature: MA Experiment 20000173 PARAMETER Experiment Name: At_42deg_Heat_P Parameter: Age (day) Value: 14
  misc_feature: MA Experiment 20000173 PARAMETER Experiment Name: At_42deg_Heat_P Parameter: Organism Value: A. thaliana
  misc_feature: MA Experiment 20000173 PARAMETER Experiment Name: At_42deg_Heat_P Parameter: Plant Line Value: WS
  misc_feature: MA Experiment 20000173 PARAMETER Experiment Name: At_42deg_Heat_P Parameter: Temperature (deg C) Value: 42 vs. 22
  misc_feature: MA Experiment 20000173 PARAMETER Experiment Name: At_42deg_Heat_P Parameter: Timepoint (hr) Value: 6
  misc_feature: MA Experiment 20000173 PARAMETER Experiment Name: At_42deg_Heat_P Parameter: Tissue Value: Aerial
  misc_feature: MA Experiment ID: 20000180 Result: Up-regulated in Transcription
  misc_feature: MA Experiment 20000180 PARAMETER Experiment Name: At_Germinating_Seeds_P Parameter: Age (hr) Value: 24 vs. 0
  misc_feature: MA Experiment 20000180 PARAMETER Experiment Name: At_Germinating_Seeds_P Parameter: Tissue Value: Germinating Seeds
  misc_feature: MA Experiment ID: 20000184 Result: Down-regulated in Transcription
  misc_feature: MA Experiment 20000184 PARAMETER Experiment Name: At_Shoots__P Parameter: Age (day) Value: 7
  misc_feature: MA Experiment 20000184 PARAMETER Experiment Name: At_Shoots__P Parameter: Tissue Value: Shoots vs. Whole Plant
  misc_feature: MA Experiment ID: 20000227 Result: Down-regulated in Transcription
  misc_feature: MA Experiment 20000227 PARAMETER Experiment Name: At_Root-Tips-vs-Tops_P Parameter: Tissue Value: Root Tips vs. Root Tops
  misc_feature: MA Experiment ID: 20000234 Result: Down-regulated in Transcription
  misc_feature: MA Experiment 20000234 PARAMETER Experiment Name: At_Siliques_P Parameter: Age (day) Value: 21
  misc_feature: MA Experiment 20000234 PARAMETER Experiment Name: At_Siliques_P Parameter: Organism Value: A. thaliana
  misc_feature: MA Experiment 20000234 PARAMETER Experiment Name: At_Siliques_P Parameter: Plant Line Value: WS
  misc_feature: MA Experiment 20000234 PARAMETER Experiment Name: At_Siliques_P Parameter: Tissue Value: Less Than 5mm Siliques vs. Whole Plant
  misc_feature: MA Experiment ID: 20000264 Result: Down-regulated in Transcription
  misc_feature: MA Experiment 20000264 PARAMETER Experiment Name: At_Open_Flower_P Parameter: Age (day) Value: 21
  misc_feature: MA Experiment 20000264 PARAMETER Experiment Name: At_Open_Flower_P Parameter: Plant Line Value: WS
  misc_feature: MA Experiment 20000264 PARAMETER Experiment Name: At_Open_Flower_P Parameter: Tissue Value: Open Flower vs. Whole Plant
  misc_feature: MA Experiment ID: 20000265 Result: Down-regulated in Transcription
  misc_feature: MA Experiment 20000265 PARAMETER Experiment Name: At_Open_Flower_P Parameter: Age (day) Value: 21
  misc_feature: MA Experiment 20000265 PARAMETER Experiment Name: At_Open_Flower_P Parameter: Plant Line Value: WS
  misc_feature: MA Experiment 20000265 PARAMETER Experiment Name: At_Open_Flower_P Parameter: Tissue Value: Closed Flower vs. Whole Plant
  misc_feature: MA Experiment ID: 20000286 Result: Down-regulated in Transcription
  misc_feature: MA Experiment 20000286 PARAMETER Experiment Name: At_Open_Flower_P Parameter: Age (day) Value: 21
  misc_feature: MA Experiment 20000286 PARAMETER Experiment Name: At_Open_Flower_P Parameter: Plant Line Value: WS
  misc_feature: MA Experiment 20000286 PARAMETER Experiment Name: At_Open_Flower_P Parameter: Tissue Value: Half Open vs. Whole Plant
  misc_feature: MA Experiment ID: 20000437 Result: Down-regulated in Transcription
  misc_feature: MA Experiment 20000437 PARAMETER Experiment Name: At_Drought_P Parameter: Age (day) Value: 8
  misc_feature: MA Experiment 20000437 PARAMETER Experiment Name: At_Drought_P Parameter: Organism Value: A. thaliana
  misc_feature: MA Experiment 20000437 PARAMETER Experiment Name: At_Drought_P Parameter: Plant Line Value: WS
  misc_feature: MA Experiment 20000437 PARAMETER Experiment Name: At_Drought_P Parameter: Timepoint (hr) Value: 24
  misc_feature: MA Experiment 20000437 PARAMETER Experiment Name: At_Drought_P Parameter: Tissue Value: Whole Plant
  misc_feature: MA Experiment 20000437 PARAMETER Experiment Name: At_Drought_P Parameter: Treatment Value: Drought vs. No Drought
  misc_feature: MA Experiment ID: 20000438 Result: Down-regulated in Transcription
  misc_feature: MA Experiment 20000438 PARAMETER Experiment Name: At_Shoots__P Parameter: Age (day) Value: 14
  misc_feature: MA Experiment 20000438 PARAMETER Experiment Name: At_Shoots__P Parameter: Tissue Value: Shoots vs. Whole Plant
  misc_feature: MA Experiment ID: 20000441 Result: Up-regulated in Transcription
  misc_feature: MA Experiment 20000441 PARAMETER Experiment Name: At_1uM_BR-BRZ__P Parameter: Tissue Value: Shoot Apices
  misc_feature: MA Experiment 20000441 PARAMETER Experiment Name: At_1uM_BR-BRZ__P Parameter: Treatment Value: 1uM BR vs. No Treatment
  misc_feature: MA Experiment ID: 20000443 Result: Up-regulated in Transcription
  misc_feature: MA Experiment 20000443 PARAMETER Experiment Name: At_1uM_BR-BRZ__P Parameter: Tissue Value: Shoot Apices
  misc_feature: MA Experiment 20000443 PARAMETER Experiment Name: At_1uM_BR-BRZ__P Parameter: Treatment Value: 1uM BRZ vs. No Treatment
  misc_feature: MA Experiment ID: 20000527 Result: Down-regulated in Transcription
  misc_feature: MA Experiment 20000527 PARAMETER Experiment Name: At_10percent_PEG_P Parameter: Age (day) Value: 20
  misc_feature: MA Experiment 20000527 PARAMETER Experiment Name: At_10percent_PEG_P Parameter: Organism Value: A. thaliana
  misc_feature: MA Experiment 20000527 PARAMETER Experiment Name: At_10percent_PEG_P Parameter: Plant Line Value: WS
  misc_feature: MA Experiment 20000527 PARAMETER Experiment Name: At_10percent_PEG_P Parameter: Timepoint (day) Value: 20
  misc_feature: MA Experiment 20000527 PARAMETER Experiment Name: At_10percent_PEG_P Parameter: Tissue Value: Whole Plant
  misc_feature: MA Experiment 20000527 PARAMETER Experiment Name: At_10percent_PEG_P Parameter: Treatment Value: 10percent PEG vs. No Treatment
  misc_feature: MA Experiment ID: 20000575 Result: Down-regulated in Transcription
  misc_feature: MA Experiment 20000575 PARAMETER Experiment Name: At_100uM_ABA_Mutants__P Parameter: Organism Value: A. thaliana
  misc_feature: MA Experiment 20000575 PARAMETER Experiment Name: At_100uM_ABA_Mutants__P Parameter: Plant Line Value: CS22
  misc_feature: MA Experiment 20000575 PARAMETER Experiment Name: At_100uM_ABA_Mutants__P Parameter: Timepoint (hr) Value: 6
  misc_feature: MA Experiment 20000575 PARAMETER Experiment Name: At_100uM_ABA_Mutants__P Parameter: Tissue Value: Whole Plant
  misc_feature: MA Experiment 20000575 PARAMETER Experiment Name: At_100uM_ABA_Mutants__P Parameter: Treatment Value: 1uM ABA vs. No Treatment
  misc_feature: MA Experiment ID: 20000709 Result: Down-regulated in Transcription
  misc_feature: MA Experiment 20000709 PARAMETER Experiment Name: At_15mM_NH4NO3_L-to-H_P Parameter: Age (hr) Value: 14
  misc_feature: MA Experiment 20000709 PARAMETER Experiment Name: At_15mM_NH4NO3_L-to-H_P Parameter: Organism Value: A. thaliana
  misc_feature: MA Experiment 20000709 PARAMETER Experiment Name: At_15mM_NH4NO3_L-to-H_P Parameter: Plant Line Value: WS
  misc_feature: MA Experiment 20000709 PARAMETER Experiment Name: At_15mM_NH4NO3_L-to-H_P Parameter: Timepoint (hr) Value: 4
  misc_feature: MA Experiment 20000709 PARAMETER Experiment Name: At_15mM_NH4NO3_L-to-H_P Parameter: Tissue Value: Aerial
  misc_feature: MA Experiment 20000709 PARAMETER Experiment Name: At_15mM_NH4NO3_L-to-H_P Parameter: Treatment Value: 15mM NH4NO3 vs. 30mM Mannitol
  misc_feature: MA Experiment ID: 20000794 Result: Down-regulated in Transcription
  misc_feature: MA Experiment 20000794 PARAMETER Experiment Name: At_Petals_P Parameter: Age (day) Value: 23-25 days
  misc_feature: MA Experiment 20000794 PARAMETER Experiment Name: At_Petals_P Parameter: Plant Line Value: WS
  misc_feature: MA Experiment 20000794 PARAMETER Experiment Name: At_Petals_P Parameter: Tissue Value: Petals vs. Whole plant
  misc_feature: MA Experiment ID: 20001248 Result: Down-regulated in Transcription
  misc_feature: MA Experiment 20001248 PARAMETER Experiment Name: At_Far-red-induction_P Parameter: Age (day) Value: 7
  misc_feature: MA Experiment 20001248 PARAMETER Experiment Name: At_Far-red-induction_P Parameter: Light Value: Far-red vs. White
  misc_feature: MA Experiment 20001248 PARAMETER Experiment Name: At_Far-red-induction_P Parameter: Organism Value: A. thaliana
  misc_feature: MA Experiment 20001248 PARAMETER Experiment Name: At_Far-red-induction_P Parameter: Plant Line Value: Columbia
  misc_feature: MA Experiment 20001248 PARAMETER Experiment Name: At_Far-red-induction_P Parameter: Timepoint (hr) Value: 4
  misc_feature: MA Experiment 20001248 PARAMETER Experiment Name: At_Far-red-induction_P Parameter: Tissue Value: Whole Plant
  misc_feature: MA Experiment ID: 20001450 Result: Down-regulated in Transcription
  misc_feature: MA Experiment 20001450 PARAMETER Experiment Name: At_Far-red-induction_P Parameter: Age (day) Value: 7
  misc_feature: MA Experiment 20001450 PARAMETER Experiment Name: At_Far-red-induction_P Parameter: Light Value: Far-red vs. White
  misc_feature: MA Experiment 20001450 PARAMETER Experiment Name: At_Far-red-induction_P Parameter: Organism Value: A. thaliana
  misc_feature: MA Experiment 20001450 PARAMETER Experiment Name: At_Far-red-induction_P Parameter: Plant Line Value: Columbia
  misc_feature: MA Experiment 20001450 PARAMETER Experiment Name: At_Far-red-induction_P Parameter: Timepoint (hr) Value: 8
  misc_feature: MA Experiment 20001450 PARAMETER Experiment Name: At_Far-red-induction_P Parameter: Tissue Value: Whole Plant
  misc_feature: MA Experiment ID: 20001451 Result: Down-regulated in Transcription
  misc_feature: MA Experiment 20001451 PARAMETER Experiment Name: At_Far-red-induction_P Parameter: Age (day) Value: 7
  misc_feature: MA Experiment 20001451 PARAMETER Experiment Name: At_Far-red-induction_P Parameter: Light Value: Far-red vs. White
  misc_feature: MA Experiment 20001451 PARAMETER Experiment Name: At_Far-red-induction_P Parameter: Organism Value: A. thaliana
  misc_feature: MA Experiment 20001451 PARAMETER Experiment Name: At_Far-red-induction_P Parameter: Plant Line Value: Columbia
  misc_feature: MA Experiment 20001451 PARAMETER Experiment Name: At_Far-red-induction_P Parameter: Timepoint (hr) Value: 24
  misc_feature: MA Experiment 20001451 PARAMETER Experiment Name: At_Far-red-induction_P Parameter: Tissue Value: Whole Plant
  misc_feature: MA Experiment ID: 20001554 Result: Down-regulated in Transcription
  misc_feature: MA Experiment 20001554 PARAMETER Experiment Name: At_Drought_Soil_Dry_P Parameter: Age (day) Value: 21
  misc_feature: MA Experiment 20001554 PARAMETER Experiment Name: At_Drought_Soil_Dry_P Parameter: Organism Value: A. thaliana
  misc_feature: MA Experiment 20001554 PARAMETER Experiment Name: At_Drought_Soil_Dry_P Parameter: Plant Line Value: WS
  misc_feature: MA Experiment 20001554 PARAMETER Experiment Name: At_Drought_Soil_Dry_P Parameter: Post Timepoint (hr) Value: None
  misc_feature: MA Experiment 20001554 PARAMETER Experiment Name: At_Drought_Soil_Dry_P Parameter: Post-Treatment Value: None
  misc_feature: MA Experiment 20001554 PARAMETER Experiment Name: At_Drought_Soil_Dry_P Parameter: Timepoint (day) Value: 7
  misc_feature: MA Experiment 20001554 PARAMETER Experiment Name: At_Drought_Soil_Dry_P Parameter: Treatment Value: Drought vs. No Drought
  misc_feature: MA Experiment ID: 20001555 Result: Down-regulated in Transcription
  misc_feature: MA Experiment 20001555 PARAMETER Experiment Name: At_Drought_Soil_Dry_P Parameter: Age (day) Value: 24
  misc_feature: MA Experiment 20001555 PARAMETER Experiment Name: At_Drought_Soil_Dry_P Parameter: Organism Value: A. thaliana
  misc_feature: MA Experiment 20001555 PARAMETER Experiment Name: At_Drought_Soil_Dry_P Parameter: Plant Line Value: WS
  misc_feature: MA Experiment 20001555 PARAMETER Experiment Name: At_Drought_Soil_Dry_P Parameter: Post Timepoint (hr) Value: None
  misc_feature: MA Experiment 20001555 PARAMETER Experiment Name: At_Drought_Soil_Dry_P Parameter: Post-Treatment Value: None
  misc_feature: MA Experiment 20001555 PARAMETER Experiment Name: At_Drought_Soil_Dry_P Parameter: Timepoint (day) Value: 10
  misc_feature: MA Experiment 20001555 PARAMETER Experiment Name: At_Drought_Soil_Dry_P Parameter: Treatment Value: Drought vs. No Drought
  misc_feature: MA Experiment ID: 20001556 Result: Down-regulated in Transcription
  misc_feature: MA Experiment 20001556 PARAMETER Experiment Name: At_Drought_Soil_Dry_P Parameter: Age (day) Value: 26
  misc_feature: MA Experiment 20001556 PARAMETER Experiment Name: At_Drought_Soil_Dry_P Parameter: Organism Value: A. thaliana
  misc_feature: MA Experiment 20001556 PARAMETER Experiment Name: At_Drought_Soil_Dry_P Parameter: Plant Line Value: WS
  misc_feature: MA Experiment 20001556 PARAMETER Experiment Name: At_Drought_Soil_Dry_P Parameter: Post Timepoint (hr) Value: None
  misc_feature: MA Experiment 20001556 PARAMETER Experiment Name: At_Drought_Soil_Dry_P Parameter: Post-Treatment Value: None
  misc_feature: MA Experiment 20001556 PARAMETER Experiment Name: At_Drought_Soil_Dry_P Parameter: Timepoint (day) Value: 12
  misc_feature: MA Experiment 20001556 PARAMETER Experiment Name: At_Drought_Soil_Dry_P Parameter: Treatment Value: Drought vs. No Drought
  misc_feature: MA Experiment ID: 20001558 Result: Down-regulated in Transcription
  misc_feature: MA Experiment 20001558 PARAMETER Experiment Name: At_Drought_Soil_Dry_P Parameter: Age (day) Value: 27
  misc_feature: MA Experiment 20001558 PARAMETER Experiment Name: At_Drought_Soil_Dry_P Parameter: Organism Value: A. thaliana
  misc_feature: MA Experiment 20001558 PARAMETER Experiment Name: At_Drought_Soil_Dry_P Parameter: Plant Line Value: WS
  misc_feature: MA Experiment 20001558 PARAMETER Experiment Name: At_Drought_Soil_Dry_P Parameter: Post Timepoint (hr) Value: 6
  misc_feature: MA Experiment 20001558 PARAMETER Experiment Name: At_Drought_Soil_Dry_P Parameter: Post-Treatment Value: Re-Water vs. No Drought
  misc_feature: MA Experiment 20001558 PARAMETER Experiment Name: At_Drought_Soil_Dry_P Parameter: Timepoint (day) Value: 13
  misc_feature: MA Experiment 20001558 PARAMETER Experiment Name: At_Drought_Soil_Dry_P Parameter: Treatment Value: Drought vs. No Drought
  misc_feature: MA Experiment ID: 20001560 Result: Down-regulated in Transcription
  misc_feature: MA Experiment 20001560 PARAMETER Experiment Name: At_Drought_Soil_Dry_P Parameter: Age (day) Value: 28
  misc_feature: MA Experiment 20001560 PARAMETER Experiment Name: At_Drought_Soil_Dry_P Parameter: Organism Value: A. thaliana
  misc_feature: MA Experiment 20001560 PARAMETER Experiment Name: At_Drought_Soil_Dry_P Parameter: Plant Line Value: WS
  misc_feature: MA Experiment 20001560 PARAMETER Experiment Name: At_Drought_Soil_Dry_P Parameter: Post Timepoint (hr) Value: None
  misc_feature: MA Experiment 20001560 PARAMETER Experiment Name: At_Drought_Soil_Dry_P Parameter: Post-Treatment Value: None
  misc_feature: MA Experiment 20001560 PARAMETER Experiment Name: At_Drought_Soil_Dry_P Parameter: Timepoint (day) Value: 14
  misc_feature: MA Experiment 20001560 PARAMETER Experiment Name: At_Drought_Soil_Dry_P Parameter: Treatment Value: Drought vs. No Drought
  misc_feature: MA Experiment ID: 20001904 Result: Down-regulated in Transcription
  misc_feature: MA Experiment 20001904 PARAMETER Experiment Name: At_Drought_Reproduction_P Parameter: Age (day) Value: 37
  misc_feature: MA Experiment 20001904 PARAMETER Experiment Name: At_Drought_Reproduction_P Parameter: Organism Value: A. thaliana
  misc_feature: MA Experiment 20001904 PARAMETER Experiment Name: At_Drought_Reproduction_P Parameter: Plant Line Value: WS
  misc_feature: MA Experiment 20001904 PARAMETER Experiment Name: At_Drought_Reproduction_P Parameter: Timepoint (day) Value: 7
  misc_feature: MA Experiment 20001904 PARAMETER Experiment Name: At_Drought_Reproduction_P Parameter: Tissue Value: Rosettes
  misc_feature: MA Experiment 20001904 PARAMETER Experiment Name: At_Drought_Reproduction_P Parameter: Treatment Value: Drought vs. No Drought
  misc_feature: MA Experiment ID: 20001906 Result: Down-regulated in Transcription
  misc_feature: MA Experiment 20001906 PARAMETER Experiment Name: At_Drought_Reproduction_P Parameter: Age (day) Value: 35
  misc_feature: MA Experiment 20001906 PARAMETER Experiment Name: At_Drought_Reproduction_P Parameter: Organism Value: A. thaliana
  misc_feature: MA Experiment 20001906 PARAMETER Experiment Name: At_Drought_Reproduction_P Parameter: Plant Line Value: WS
  misc_feature: MA Experiment 20001906 PARAMETER Experiment Name: At_Drought_Reproduction_P Parameter: Timepoint (day) Value: 5
  misc_feature: MA Experiment 20001906 PARAMETER Experiment Name: At_Drought_Reproduction_P Parameter: Tissue Value: Siliques
  misc_feature: MA Experiment 20001906 PARAMETER Experiment Name: At_Drought_Reproduction_P Parameter: Treatment Value: Drought vs. No Drought
  misc_feature: MA Experiment ID: 20001911 Result: Down-regulated in Transcription
  misc_feature: MA Experiment 20001911 PARAMETER Experiment Name: At_Drought_Reproduction_P Parameter: Age (day) Value: 40
  misc_feature: MA Experiment 20001911 PARAMETER Experiment Name: At_Drought_Reproduction_P Parameter: Organism Value: A. thaliana
  misc_feature: MA Experiment 20001911 PARAMETER Experiment Name: At_Drought_Reproduction_P Parameter: Plant Line Value: WS
  misc_feature: MA Experiment 20001911 PARAMETER Experiment Name: At_Drought_Reproduction_P Parameter: Timepoint (day) Value: 10
  misc_feature: MA Experiment 20001911 PARAMETER Experiment Name: At_Drought_Reproduction_P Parameter: Tissue Value: Flowers
  misc_feature: MA Experiment 20001911 PARAMETER Experiment Name: At_Drought_Reproduction_P Parameter: Treatment Value: Drought vs. No Drought
atccgaacacaaagacttaagtaagtcaaacagaaaaaaatggatctcttattgattatagccggtttagtagcggctgcagccttctttttcctccgtagcacgaccaagaaatctctccggttacctccgggaccaaaaggtcttcctattataggaaaccttcaccagatggagaaattcaacccccaacacttccttttccgtctctccaagctatacggcccgattttcacgatgaaaatcggtggccgtcgcctcgcggtgatctcctcggccgagctagccaaggagctactcaaaactcaagacctcaacttcaccgctcgtcctctcttgaaagggcaacaaaccatgtcgtatcaaggccgtgagcttggtttcggacagtacaccgcgtactaccgtgagatgaggaagatgtgtatggtgaacctcttcagcccgaaccgtgtcgcaagtttcagaccggttagagaagaagagtgtcaacggatgatggacaagatctataaagccgctgatcaatcaggcaccgttgatctaagtgagcttctcttgtctttcactaactgtgtcgtatgtagacaagcttttgggaaacggtacaatgagtacggcacagagatgaagagattcatagatatcttgtacgagacgcaagcacttttgggcactctgtttttctccgaccttttcccttatttcggattccttgacaacctcactggtctcagtgcacgtctcaagaaagctttcaaggagcttgacacttaccttcaagaacttctagacgagactcttgaccctaaccgccctaaacaagaaacagagagtttcattgatcttttgatgcagatctacaaagaccaacctttctccatcaaattcactcacgaaaatgtcaaggccatgatattggatattgttgtgccgggaactgacacggcggctgcagtggtggtatgggccatgacttaccttattaagtaccctgaagcaatgaagaaagctcaagacgaagtgaggagtgtgataggtgacaaaggatatgtctctgaagaagacatacctaatctcccttacctaaaggcagtcatcaaggagtctcttcggctcgaaccagtcatccccattcttctacacagagaaactatcgcagacgcaaagataggtggctatgatattccggccaagaccatcattcaggtgaacgcatgggcggtttctcgtgacacagccgcgtggggagacaaccctaatgagttcattccagagaggttcatgaacgagcacaaaggagtggacttcaagggccaagattttgagctcctacctttcgggtcgggccggagaatgtgcccggccatgcatcttgggattgcaatggtagagatacctttcgctaaccttctctacaaatttgactggagtctacctaaagggattaaaccagaggatataaagatggacgtcatgactggactcgctatgcacaagaaagaacacctcgttcttgcaccaacgaaacacatctgatgctatatatatcattaggacgtttctgctggtagatatggcgtgaccaatggttatttttcattgcaatatccctttttgttttaatgagtactatgttctcattttaacgaataaaaatgtatcagtgctcttgtttttggactag

SEQ ID NO: 29298 - protein, 499 aa, Arabidopsis thaliana
  peptide (1)..(499): Ceres Seq. ID no. 12321247
  misc_feature (30)..(494): Pfam Name: Cytochrome P450 Pfam Description: Cytochrome P450
  misc_feature (1)..(499): Homolog of NCBI NO: 15231538 NR Description: cytochrome p450 family; protein id: At3g26300.1
  misc_feature (1)..(499): Homolog of NCBI NO: 28393289 NR Description: putative cytochrome p450 [Arabidopsis thaliana]
  misc_feature (1)..(499): Homolog of NCBI NO: 30696845 NR Description: cytochrome P450 71B10 [Arabidopsis thaliana]
  misc_feature (1)..(499): Homolog of NCBI NO: 13878390 NR Description: Cytochrome P450 71B10
  misc_feature (19)..(499): Homolog of NCBI NO: 16507125 NR Description: cytochrome P450 [Citrus sinensis]
  misc_feature (1)..(499): Homolog of NCBI NO: 25282608 NR Description: cytochrome P-450LXXIA1 [similarity] - avocado
  misc_feature (245)..(499): Homolog of NCBI NO: 21450868 NR Description: putative cytochrome P450 monooxygenase
  misc_feature (6)..(497): Homolog of NCBI NO: 619745 NR Description: cytochrome p450 dependent monooxygenase
  misc_feature (6)..(497): Homolog of NCBI NO: 15236349 NR Description: cytochrome p450 family
  misc_feature (1)..(499): Homolog of NCBI NO: 15235968 NR Description: cytochrome p450 family
MDLLLIIAGLVAAAAFFFLRSTTKKSLRLPPGPKGLPIIGNLHQMEKFNPQHFLFRLSKLYGPIFTMKIGGRRLAVISSAELAKELLKTQDLNFTARPLLKGQQTMSYQGRELGFGQYTAYYREMRKMCMVNLFSPNRVASFRPVREEECQRMMDKIYKAADQSGTVDLSELLLSFTNCVVCRQAFGKRYNEYGTEMKRFIDILYETQALLGTLFFSDLFPYFGFLDNLTGLSARLKKAFKELDTYLQELLDETLDPNRPKQETESFIDLLMQIYKDQPFSIKFTHENVKAMILDIVVPGTDTAAAVVVWAMTYLIKYPEAMKKAQDEVRSVIGDKGYVSEEDIPNLPYLKAVIKESLRLEPVIPILLHRETIADAKIGGYDIPAKTIIQVNAWAVSRDTAAWGDNPNEFIPERFMNEHKGVDFKGQDFELLPFGSGRRMCPAMHLGIAMVEIPFANLLYKFDWSLPKGIKPEDIKMDVMTGLAMHKKEHLVLAPTKHI

SEQ ID NO: 29299 - protein, 455 aa, Arabidopsis thaliana
  peptide (1)..(455): Ceres Seq. ID no. 12321248
  misc_feature (1)..(450): Pfam Name: Cytochrome P450 Pfam Description: Cytochrome P450
  misc_feature (1)..(455): Homolog of NCBI NO: 15231538 NR Description: cytochrome p450 family; protein id: At3g26300.1
  misc_feature (1)..(455): Homolog of NCBI NO: 28393289 NR Description: putative cytochrome p450 [Arabidopsis thaliana]
  misc_feature (1)..(455): Homolog of NCBI NO: 30696845 NR Description: cytochrome P450 71B10 [Arabidopsis thaliana]
  misc_feature (1)..(455): Homolog of NCBI NO: 13878390 NR Description: Cytochrome P450 71B10
  misc_feature (1)..(455): Homolog of NCBI NO: 16507125 NR Description: cytochrome P450 [Citrus sinensis]
  misc_feature (1)..(455): Homolog of NCBI NO: 25282608 NR Description: cytochrome P-450LXXIA1 [similarity] - avocado
  misc_feature (201)..(455): Homolog of NCBI NO: 21450868 NR Description: putative cytochrome P450 monooxygenase
  misc_feature (1)..(453): Homolog of NCBI NO: 619745 NR Description: cytochrome p450 dependent monooxygenase
  misc_feature (1)..(453): Homolog of NCBI NO: 15236349 NR Description: cytochrome p450 family
  misc_feature (1)..(455): Homolog of NCBI NO: 15235968 NR Description: cytochrome p450 family
MEKFNPQHFLFRLSKLYGPIFTMKIGGRRLAVISSAELAKELLKTQDLNFTARPLLKGQQTMSYQGRELGFGQYTAYYREMRKMCMVNLFSPNRVASFRPVREEECQRMMDKIYKAADQSGTVDLSELLLSFTNCVVCRQAFGKRYNEYGTEMKRFIDILYETQALLGTLFFSDLFPYFGFLDNLTGLSARLKKAFKELDTYLQELLDETLDPNRPKQETESFIDLLMQIYKDQPFSIKFTHENVKAMILDIVVPGTDTAAAVVVWAMTYLIKYPEAMKKAQDEVRSVIGDKGYVSEEDIPNLPYLKAVIKESLRLEPVIPILLHRETIADAKIGGYDIPAKTIIQVNAWAVSRDTAAWGDNPNEFIPERFMNEHKGVDFKGQDFELLPFGSGRRMCPAMHLGIAMVEIPFANLLYKFDWSLPKGIKPEDIKMDVMTGLAMHKKEHLVLAPTKHI

SEQ ID NO: 29300 - protein, 433 aa, Arabidopsis thaliana
  peptide (1)..(433): Ceres Seq. ID no. 12321249
  misc_feature (1)..(428): Pfam Name: Cytochrome P450 Pfam Description: Cytochrome P450
  misc_feature (1)..(433): Homolog of NCBI NO: 15231538 NR Description: cytochrome p450 family; protein id: At3g26300.1
  misc_feature (1)..(433): Homolog of NCBI NO: 28393289 NR Description: putative cytochrome p450 [Arabidopsis thaliana]
  misc_feature (1)..(433): Homolog of NCBI NO: 30696845 NR Description: cytochrome P450 71B10 [Arabidopsis thaliana]
  misc_feature (1)..(433): Homolog of NCBI NO: 13878390 NR Description: Cytochrome P450 71B10
  misc_feature (1)..(433): Homolog of NCBI NO: 16507125 NR Description: cytochrome P450 [Citrus sinensis]
  misc_feature (1)..(433): Homolog of NCBI NO: 25282608 NR Description: cytochrome P-450LXXIA1 [similarity] - avocado
  misc_feature (179)..(433): Homolog of NCBI NO: 21450868 NR Description: putative cytochrome P450 monooxygenase
  misc_feature (1)..(431): Homolog of NCBI NO: 619745 NR Description: cytochrome p450 dependent monooxygenase
  misc_feature (1)..(431): Homolog of NCBI NO: 15236349 NR Description: cytochrome p450 family
  misc_feature (1)..(433): Homolog of NCBI NO: 15235968 NR Description: cytochrome p450 family
MKIGGRRLAVISSAELAKELLKTQDLNFTARPLLKGQQTMSYQGRELGFGQYTAYYREMRKMCMVNLFSPNRVASFRPVREEECQRMMDKIYKAADQSGTVDLSELLLSFTNCVVCRQAFGKRYNEYGTEMKRFIDILYETQALLGTLFFSDLFPYFGFLDNLTGLSARLKKAFKELDTYLQELLDETLDPNRPKQETESFIDLLMQIYKDQPFSIKFTHENVKAMILDIVVPGTDTAAAVVVWAMTYLIKYPEAMKKAQDEVRSVIGDKGYVSEEDIPNLPYLKAVIKESLRLEPVIPILLHRETIADAKIGGYDIPAKTIIQVNAWAVSRDTAAWGDNPNEFIPERFMNEHKGVDFKGQDFELLPFGSGRRMCPAMHLGIAMVEIPFANLLYKFDWSLPKGIKPEDIKMDVMTGLAMHKKEHLVLAPTKHI

SEQ ID NO: 29301 - DNA, 1422 bp, Arabidopsis thaliana
  misc_feature (1)..(1422): Ceres Seq. ID no. 12395190
  misc_feature: MA Experiment ID: 108573 Result: Up-regulated in Transcription
  misc_feature: MA Experiment 108573 PARAMETER Experiment Name: At_Drought_cDNA_P Parameter: Timepoint (hr) Value: 6
  misc_feature: MA Experiment 108573 PARAMETER Experiment Name: At_Drought_cDNA_P Parameter: Tissue Value: Aerial
  misc_feature: MA Experiment 108573 PARAMETER Experiment Name: At_Drought_cDNA_P Parameter: Treatment Value: Drought vs. No Drought
  misc_feature: MA Experiment ID: 108579 Result: Down-regulated in Transcription
  misc_feature: MA Experiment 108579 PARAMETER Experiment Name: At_4deg_Cold_cDNA_P Parameter: Temperature (deg C) Value: 4 vs. 22
  misc_feature: MA Experiment 108579 PARAMETER Experiment Name: At_4deg_Cold_cDNA_P Parameter: Timepoint (hr) Value: 6
  misc_feature: MA Experiment 108579 PARAMETER Experiment Name: At_4deg_Cold_cDNA_P Parameter: Tissue Value: Aerial
  misc_feature: MA Experiment ID: 108595 Result: Down-regulated in Transcription
  misc_feature: MA Experiment 108595 PARAMETER Experiment Name: At_Ler-pi_Ovule_cDNA_P Parameter: Plant Line Value: null
  misc_feature: MA Experiment ID: 20000445 Result: Up-regulated in Transcription
  misc_feature: MA Experiment 20000445 PARAMETER Experiment Name: At_100uM_NAA__P Parameter: Age (day) Value: 14
  misc_feature: MA Experiment 20000445 PARAMETER Experiment Name: At_100uM_NAA__P Parameter: Organism Value: A. thaliana
  misc_feature: MA Experiment 20000445 PARAMETER Experiment Name: At_100uM_NAA__P Parameter: Plant Line Value: WS
  misc_feature: MA Experiment 20000445 PARAMETER Experiment Name: At_100uM_NAA__P Parameter: Timepoint (hr) Value: 6
  misc_feature: MA Experiment 20000445 PARAMETER Experiment Name: At_100uM_NAA__P Parameter: Tissue Value: Aerial
  misc_feature: MA Experiment 20000445 PARAMETER Experiment Name: At_100uM_NAA__P Parameter: Treatment Value: 100uM NAA vs. No Treatment
  misc_feature: MA Experiment ID: 20001247 Result: Up-regulated in Transcription
  misc_feature: MA Experiment 20001247 PARAMETER Experiment Name: At_Far-red-induction_P Parameter: Age (day) Value: 7
  misc_feature: MA Experiment 20001247 PARAMETER Experiment Name: At_Far-red-induction_P Parameter: Light Value: Far-red vs. White
  misc_feature: MA Experiment 20001247 PARAMETER Experiment Name: At_Far-red-induction_P Parameter: Organism Value: A. thaliana
  misc_feature: MA Experiment 20001247 PARAMETER Experiment Name: At_Far-red-induction_P Parameter: Plant Line Value: Columbia
  misc_feature: MA Experiment 20001247 PARAMETER Experiment Name: At_Far-red-induction_P Parameter: Timepoint (hr) Value: 1
  misc_feature: MA Experiment 20001247 PARAMETER Experiment Name: At_Far-red-induction_P Parameter: Tissue Value: Whole Plant
  misc_feature: MA Experiment ID: 20001248 Result: Up-regulated in Transcription
  misc_feature: MA Experiment 20001248 PARAMETER Experiment Name: At_Far-red-induction_P Parameter: Age (day) Value: 7
  misc_feature: MA Experiment 20001248 PARAMETER Experiment Name: At_Far-red-induction_P Parameter: Light Value: Far-red vs. White
  misc_feature: MA Experiment 20001248 PARAMETER Experiment Name: At_Far-red-induction_P Parameter: Organism Value: A. thaliana
  misc_feature: MA Experiment 20001248 PARAMETER Experiment Name: At_Far-red-induction_P Parameter: Plant Line Value: Columbia
  misc_feature: MA Experiment 20001248 PARAMETER Experiment Name: At_Far-red-induction_P Parameter: Timepoint (hr) Value: 4
  misc_feature: MA Experiment 20001248 PARAMETER Experiment Name: At_Far-red-induction_P Parameter: Tissue Value: Whole Plant
  misc_feature: MA Experiment ID: 20001450 Result: Up-regulated in Transcription
  misc_feature: MA Experiment 20001450 PARAMETER Experiment Name: At_Far-red-induction_P Parameter: Age (day) Value: 7
  misc_feature: MA Experiment 20001450 PARAMETER Experiment Name: At_Far-red-induction_P Parameter: Light Value: Far-red vs. White
  misc_feature: MA Experiment 20001450 PARAMETER Experiment Name: At_Far-red-induction_P Parameter: Organism Value: A. thaliana
  misc_feature: MA Experiment 20001450 PARAMETER Experiment Name: At_Far-red-induction_P Parameter: Plant Line Value: Columbia
  misc_feature: MA Experiment 20001450 PARAMETER Experiment Name: At_Far-red-induction_P Parameter: Timepoint (hr) Value: 8
  misc_feature: MA Experiment 20001450 PARAMETER Experiment Name: At_Far-red-induction_P Parameter: Tissue Value: Whole Plant
atcatcccttccattaagacctagggttttctctctctcccatcattctcttctcccgatctcatttccattacccaatcccgctccttttctctgattttgaatcgaacccttaatacccagaaatctcacggttccgaggagtgggtttttgggggttagggttttcgagagatgttgaatgtcaggttcattgatgaatctgttttctctctgcttcaagccattcgggcacgtctgtgataattccgaagctggatcgggtggtggtggtggcgtttctggtggaaccggccgtgaaggcaaagacggattgctttggttccgtgatctcggtaaatattgcggcggagatttctccatggctgtgattcaagccaatcaggttcttgaagatcagagccaggtcgaatccggtaattttgggacttttgttggtgtttacgatggtcatggtggtcctgaagctgctcgttatgtctgtgatcatctctttaaccattttcgagaaatatcagcggaaacacaaggagttgtgacgagagagacgatagaaagagcctttcatgcgacagaagaaggattcgcttccattgtgtcagagctgtggcaagaaataccaaatttggcaactgttggcacttgttgtttggttggagtgatatatcaaaatactctttttgtggcaagtcttggagattcacgggttgttcttggaaagaaaggcaactgtggcggactctctgctattcagctgtcgactgaacacaatgctaacaatgaagatattcgttgggaactcaaggacttacatcctgatgacccgcagatcgttgtgttcaggcatggagtttggagagttaagggcatcattcaggtatcgaggtctataggagacatgtacatgaaacggcccgaatttaacaaggagccaatcagtcaaaagttcagaattgcagagccaatgaaaagacccttgatgtctgcaacaccaacaatactctctcatcctctgcaccctaatgattcgtttctcatttttgcatctgatggtctttgggagcatttgactaacgaaaaagcagttgagattgttcataaccatccccgtgctggaagcgcaaagagactgataaaggcggctcttcacgaggcagcgaggaaacgtgagatgagatattcagatctaaggaagattgacaagaaagtgagacgacattttcatgatgacatcacggttatagtggtgttcttgaaccatgacctcatatcgagaggccacatcaactcaacccaagacacaacagtctctatacggagtgctcttgaacactgagaatcccaaacattttacaacaatgtttcttcttacttgattatatgacttttgcctagaatgaataaaaaaaaggcaacatatgg

SEQ ID NO: 29302 - protein, 384 aa, Arabidopsis thaliana
  peptide (1)..(384): Ceres Seq. ID no. 12395191
  misc_feature (49)..(330): Pfam Name: Protein phosphatase 2C Pfam Description: Protein phosphatase 2C
  misc_feature (40)..(379): Homolog of NCBI NO: 15239244 NR Description: protein phosphatase 2C-like protein
  misc_feature (34)..(379): Homolog of NCBI NO: 7768153 NR Description: protein phosphatase 2C (PP2C) [Fagus sylvatica]
  misc_feature (6)..(381): Homolog of NCBI NO: 7485891 NR Description: hypothetical protein F20M13.80 - Arabidopsis
  misc_feature (1)..(381): Homolog of NCBI NO: 17064756 NR Description: putative protein phosphatase-2c [Arabidopsis
  misc_feature (4)..(379): Homolog of NCBI NO: 18855039 NR Description: putative protein phosphatase [Oryza sativa]
  misc_feature (1)..(384): Homolog of NCBI NO: 11282004 NR Description: protein phosphatase 2C homolog [imported] -
  misc_feature (1)..(381): Homolog of NCBI NO: 22329238 NR Description: putative protein phosphatase-2c
  misc_feature (6)..(384): Homolog of NCBI NO: 7670033 NR Description: protein phosphatase 2C-like protein [Arabidopsis
  misc_feature (1)..(384): Homolog of NCBI NO: 21537406 NR Description: protein phosphatase-2c, putative [Arabidopsis
  misc_feature (1)..(384): Homolog of NCBI NO: 18401370 NR Description: protein phosphatase-2c, putative
MSGSLMNLFSLCFKPFGHVCDNSEAGSGGGGGVSGGTGREGKDGLLWFRDLGKYCGGDFSMAVIQANQVLEDQSQVESGNFGTFVGVYDGHGGPEAARYVCDHLFNHFREISAETQGVVTRETIERAFHATEEGFASIVSELWQEIPNLATVGTCCLVGVIYQNTLFVASLGDSRVVLGKKGNCGGLSAIQLSTEHNANNEDIRWELKDLHPDDPQIVVFRHGVWRVKGIIQVSRSIGDMYMKRPEFNKEPISQKFRIAEPMKRPLMSATPTILSHPLHPNDSFLIFASDGLWEHLTNEKAVEIVHNHPRAGSAKRLIKAALHEAARKREMRYSDLRKIDKKVRRHFHDDITVIVVFLNHDLISRGHINSTQDTTVSIRSALEH

SEQ ID NO: 29303 - protein, 379 aa, Arabidopsis thaliana
  peptide (1)..(379): Ceres Seq. ID no. 12395192
  misc_feature (44)..(325): Pfam Name: Protein phosphatase 2C Pfam Description: Protein phosphatase 2C
  misc_feature (35)..(374): Homolog of NCBI NO: 15239244 NR Description: protein phosphatase 2C-like protein
  misc_feature (29)..(374): Homolog of NCBI NO: 7768153 NR Description: protein phosphatase 2C (PP2C) [Fagus sylvatica]
  misc_feature (1)..(376): Homolog of NCBI NO: 7485891 NR Description: hypothetical protein F20M13.80 - Arabidopsis
  misc_feature (1)..(376): Homolog of NCBI NO: 17064756 NR Description: putative protein phosphatase-2c [Arabidopsis
  misc_feature (1)..(374): Homolog of NCBI NO: 18855039 NR Description: putative protein phosphatase [Oryza sativa]
  misc_feature (1)..(379): Homolog of NCBI NO: 11282004 NR Description: protein phosphatase 2C homolog [imported] -
  misc_feature (1)..(376): Homolog of NCBI NO: 22329238 NR Description: putative protein phosphatase-2c
  misc_feature (1)..(379): Homolog of NCBI NO: 7670033 NR Description: protein phosphatase 2C-like protein [Arabidopsis
  misc_feature (1)..(379): Homolog of NCBI NO: 21537406 NR Description: protein phosphatase-2c, putative [Arabidopsis
  misc_feature (1)..(379): Homolog of NCBI NO: 18401370 NR Description: protein phosphatase-2c, putative
MNLFSLCFKPFGHVCDNSEAGSGGGGGVSGGTGREGKDGLLWFRDLGKYCGGDFSMAVIQANQVLEDQSQVESGNFGTFVGVYDGHGGPEAARYVCDHLFNHFREISAETQGVVTRETIERAFHATEEGFASIVSELWQEIPNLATVGTCCLVGVIYQNTLFVASLGDSRVVLGKKGNCGGLSAIQLSTEHNANNEDIRWELKDLHPDDPQIVVFRHGVWRVKGIIQVSRSIGDMYMKRPEFNKEPISQKFRIAEPMKRPLMSATPTILSHPLHPNDSFLIFASDGLWEHLTNEKAVEIVHNHPRAGSAKRLIKAALHEAARKREMRYSDLRKIDKKVRRHFHDDITVIVVFLNHDLISRGHINSTQDTTVSIRSALEH

SEQ ID NO: 29304 - protein, 324 aa, Arabidopsis thaliana
  peptide (1)..(324): Ceres Seq. ID no. 12395193
  misc_feature (1)..(270): Pfam Name: Protein phosphatase 2C Pfam Description: Protein phosphatase 2C
  misc_feature (1)..(319): Homolog of NCBI NO: 15239244 NR Description: protein phosphatase 2C-like protein
  misc_feature (1)..(319): Homolog of NCBI NO: 7768153 NR Description: protein phosphatase 2C (PP2C) [Fagus sylvatica]
  misc_feature (1)..(321): Homolog of NCBI NO: 7485891 NR Description: hypothetical protein F20M13.80 - Arabidopsis
  misc_feature (1)..(321): Homolog of NCBI NO: 17064756 NR Description: putative protein phosphatase-2c [Arabidopsis
  misc_feature (1)..(319): Homolog of NCBI NO: 18855039 NR Description: putative protein phosphatase [Oryza sativa]
  misc_feature (1)..(324): Homolog of NCBI NO: 11282004 NR Description: protein phosphatase 2C homolog [imported] -
  misc_feature (1)..(321): Homolog of NCBI NO: 22329238 NR Description: putative protein phosphatase-2c
  misc_feature (1)..(324): Homolog of NCBI NO: 7670033 NR Description: protein phosphatase 2C-like protein [Arabidopsis
  misc_feature (1)..(324): Homolog of NCBI NO: 21537406 NR Description: protein phosphatase-2c, putative [Arabidopsis
  misc_feature (1)..(324): Homolog of NCBI NO: 18401370 NR Description: protein phosphatase-2c, putative
MAVIQANQVLEDQSQVESGNFGTFVGVYDGHGGPEAARYVCDHLFNHFREISAETQGVVTRETIERAFHATEEGFASIVSELWQEIPNLATVGTCCLVGVIYQNTLFVASLGDSRVVLGKKGNCGGLSAIQLSTEHNANNEDIRWELKDLHPDDPQIVVFRHGVWRVKGIIQVSRSIGDMYMKRPEFNKEPISQKFRIAEPMKRPLMSATPTILSHPLHPNDSFLIFASDGLWEHLTNEKAVEIVHNHPRAGSAKRLIKAALHEAARKREMRYSDLRKIDKKVRRHFHDDITVIVVFLNHDLISRGHINSTQDTTVSIRSALEH

SEQ ID NO: 29305 - DNA, 2300 bp, Arabidopsis thaliana
  misc_feature (1)..(2300): Ceres Seq. ID no. 13580663
  misc_feature: MA Experiment ID: 108434 Result: Up-regulated in Transcription
  misc_feature: MA Experiment 108434 PARAMETER Experiment Name: At_Root_Tips_cDNA_P Parameter: Tissue Value: Root Tips
  misc_feature: MA Experiment ID: 108462 Result: Down-regulated in Transcription
  misc_feature: MA Experiment 108462 PARAMETER Experiment Name: At_Germinating_Seeds_cDNA_P Parameter: Age (day) Value: 2 vs. 0
  misc_feature: MA Experiment 108462 PARAMETER Experiment Name: At_Germinating_Seeds_cDNA_P Parameter: Tissue Value: Germinating Seeds
  misc_feature: MA Experiment ID: 108463 Result: Down-regulated in Transcription
  misc_feature: MA Experiment 108463 PARAMETER Experiment Name: At_Germinating_Seeds_cDNA_P Parameter: Age (day) Value: 3 vs. 0
  misc_feature: MA Experiment 108463 PARAMETER Experiment Name: At_Germinating_Seeds_cDNA_P Parameter: Tissue Value: Germinating Seeds
  misc_feature: MA Experiment ID: 108464 Result: Down-regulated in Transcription
  misc_feature: MA Experiment 108464 PARAMETER Experiment Name: At_Germinating_Seeds_cDNA_P Parameter: Age (day) Value: 4 vs. 0
  misc_feature: MA Experiment 108464 PARAMETER Experiment Name: At_Germinating_Seeds_cDNA_P Parameter: Tissue Value: Germinating Seeds
  misc_feature: MA Experiment ID: 108573 Result: Down-regulated in Transcription
  misc_feature: MA Experiment 108573 PARAMETER Experiment Name: At_Drought_cDNA_P Parameter: Timepoint (hr) Value: 6
  misc_feature: MA Experiment 108573 PARAMETER Experiment Name: At_Drought_cDNA_P Parameter: Tissue Value: Aerial
  misc_feature: MA Experiment 108573 PARAMETER Experiment Name: At_Drought_cDNA_P Parameter: Treatment Value: Drought vs. No Drought
  misc_feature: MA Experiment ID: 20000227 Result: Up-regulated in Transcription
  misc_feature: MA Experiment 20000227 PARAMETER Experiment Name: At_Root-Tips-vs-Tops_P Parameter: Tissue Value: Root Tips vs. Root Tops
  misc_feature: MA Experiment ID: 20000437 Result: Down-regulated in Transcription
  misc_feature: MA Experiment 20000437 PARAMETER Experiment Name: At_Drought_P Parameter: Age (day) Value: 8
  misc_feature: MA Experiment 20000437 PARAMETER Experiment Name: At_Drought_P Parameter: Organism Value: A. thaliana
  misc_feature: MA Experiment 20000437 PARAMETER Experiment Name: At_Drought_P Parameter: Plant Line Value: WS
  misc_feature: MA Experiment 20000437 PARAMETER Experiment Name: At_Drought_P Parameter: Timepoint (hr) Value: 24
  misc_feature: MA Experiment 20000437 PARAMETER Experiment Name: At_Drought_P Parameter: Tissue Value: Whole Plant
  misc_feature: MA Experiment 20000437 PARAMETER Experiment Name: At_Drought_P Parameter: Treatment Value: Drought vs. No Drought
  misc_feature: MA Experiment ID: 20000496 Result: Up-regulated in Transcription
  misc_feature: MA Experiment 20000496 PARAMETER Experiment Name: At_Guard_Cells_P Parameter: Harvest Date Value: 7/19/2002
  misc_feature: MA Experiment 20000496 PARAMETER Experiment Name: At_Guard_Cells_P Parameter: Organism Value: Canola
  misc_feature: MA Experiment 20000496 PARAMETER Experiment Name: At_Guard_Cells_P Parameter: Tissue Value: Guard Cells vs. Leaves
  misc_feature: MA Experiment ID: 20000794 Result: Down-regulated in Transcription
  misc_feature: MA Experiment 20000794 PARAMETER Experiment Name: At_Petals_P Parameter: Age (day) Value: 23-25 days
  misc_feature: MA Experiment 20000794 PARAMETER Experiment Name: At_Petals_P Parameter: Plant Line Value: WS
  misc_feature: MA Experiment 20000794 PARAMETER Experiment Name: At_Petals_P Parameter: Tissue Value: Petals vs. Whole plant
  misc_feature: MA Experiment ID: 20001558 Result: Up-regulated in Transcription
  misc_feature: MA Experiment 20001558 PARAMETER Experiment Name: At_Drought_Soil_Dry_P Parameter: Age (day) Value: 27
  misc_feature: MA Experiment 20001558 PARAMETER Experiment Name: At_Drought_Soil_Dry_P Parameter: Organism Value: A. thaliana
  misc_feature: MA Experiment 20001558 PARAMETER Experiment Name: At_Drought_Soil_Dry_P Parameter: Plant Line Value: WS
  misc_feature: MA Experiment 20001558 PARAMETER Experiment Name: At_Drought_Soil_Dry_P Parameter: Post Timepoint (hr) Value: 6
  misc_feature: MA Experiment 20001558 PARAMETER Experiment Name: At_Drought_Soil_Dry_P Parameter: Post-Treatment Value: Re-Water vs. No Drought
  misc_feature: MA Experiment 20001558 PARAMETER Experiment Name: At_Drought_Soil_Dry_P Parameter: Timepoint (day) Value: 13
  misc_feature: MA Experiment 20001558 PARAMETER Experiment Name: At_Drought_Soil_Dry_P Parameter: Treatment Value: Drought vs. No Drought
  misc_feature: MA Experiment ID: 20001757 Result: Up-regulated in Transcription
  misc_feature: MA Experiment 20001757 PARAMETER Experiment Name: At_50mM_NH4NO3_L-to-H_P Parameter: Timepoint (hr) Value: 6
  misc_feature: MA Experiment 20001757 PARAMETER Experiment Name: At_50mM_NH4NO3_L-to-H_P Parameter: Tissue Value: Leaf
  misc_feature: MA Experiment 20001757 PARAMETER Experiment Name: At_50mM_NH4NO3_L-to-H_P Parameter: Treatment Value: 50mM NH4NO3 vs 100mM Mannitol
atgacctacatatatagagacacaaagatcacaacaaaatcaaccattcctttccttatcttcttcctcttttgcttttctaatctctcaatggctaccttaaaacacaaacctgtaaatttggtattttacgtttataatttgattattatattctcctcccatagttccacggcggagctccgcaggctactgcagccatcaaaaaccgatggtacagtgagctttctcgttatcggagactggggaagaagaggctcctataatcagtcccaagtagctcttcagatgggagaaatcggagagaaattagatatcgattttgtgatttctactggagataatttttacgacaatggtttaaccagcttgcacgatcctctatttcaagattcttttaccaacatttataccgctccgagcttgcagaaaccttggtatagtgttttaggaaatcatgattatagaggtgacgtcagggcacaacttagccctatgctcagagctctggacaacagatgggtttgcatgagatctttcattgtaaatgctgagatcgtcgatttgttcttcgtcgacacaactccgttcgtcgataaatactttattcaaccaaataagcatgtttatgactggagcggtgtattacctaggcaaacatatctgaataatctcttaaaggaactcgacgtggcgttgagagagtcagtcgcaaagtggaaaatagtgattggtcaccatacgatcaaaagcgcaggccaccacgggaacaccattgagttggagaaacaccttttacctattctccaagcaaatgaagtggatctctacgtaaacggacatgatcattgcttagagcacataagcagcgtggacagtaacatacaatttatgacaagtggaggtggatccaaggcctggaaaggaggtgacgtgaactacgttgaaccagaagagatgaggttttactacgacggacaaggtttcatgtcggttcacgtttcagaagctgaactgcgtgtagtcttttatgatgtttttggacacgttctgcatcattggaagaagacttacaaggaggcgctttatttcgcttcttgattccaatttaatcggacgtaattgtttatgatcgatgtactatgaaattatcaatatcgtacttcgtccaaaaaaaaaaaaaaaaaagcttctcgtgccgttttttttttttttttttggactaaaaacttaattaacataaaaaaccaaaccaatggtttcagtaaataaagcagggaaacattaagagaaagcaaaaagacaaaagctacaaactctcatgactgcgcatggaatcagtgaaaaaacataacaactcgagttttcttttctccttttttttattcagaacagtacgaactcaaccacacacaaactctcgccggtgtaagcttaggcctttgacatgtgaacgataaggtcaacgacacgagaactgtaaccccattcgttgtcgtaccatgacaccaacttcacaaacttgtcgctcaatgcaatcccagccttggcatcgaaaatgcttgacctgttgtcaccaacaaagtcggtagacacaacatcatcctcagtgtatcccaaaattcccttcattttgccttcagattcctccttgatggccttcttgatttcgtcgtatgttgcagctgtcgctcgtctacatttacactcggagcttagaccttccaatctaccggcggcgaaaatgggtttcaagaggtacgttgagatcgggagagtagcacttgtgaactacggagaagatcatggaaagctcgtcgttatcgtcgacgttgttgaccagaacagagctttggtggatgcccctgatatggagaggatccagatgaacttcaagaggttgtctcttaccgatattgtcattgacatcaaccgtgtgccaaagaagaaggctttgatcgaggcaatggaaaaggctgatgtgaagaacaagtgggagaaaagctcatggggtaggaagcttatcgtgcagaaacgtagggctaaccttaacgactttgataggttcaagatcatgttggccaagatcaagaaagctggtgttgtcaggcaagagcttgcaaaactcaagaaggagatcactgcctgatcaaatattatctacaattctgttgtctttcttttttgattttggattcggaaattagtgtttttggaactatcaatatcagtatgtgctcaattatcagacattattcaagtttgaaaccttgtttgcaaaactcaaagttttttgttcc

SEQ ID NO: 29306 - protein, 366 aa, Arabidopsis thaliana
  peptide (1)..(366): Ceres Seq. ID no. 13580664
  misc_feature (74)..(285): Pfam Name: Calcineurin-like phosphoesterase Pfam Description: Calcineurin-like phosphoesterase
  misc_feature (37)..(339): Homolog of NCBI NO: 6635445 NR Description: putative purple acid phosphatase precursor
  misc_feature (37)..(363): Homolog of NCBI NO: 25752251 NR Description: probable acid phosphatase (EC 3.1.3.2) At2g01890
  misc_feature (37)..(363): Homolog of NCBI NO: 22325419 NR Description: calcineurin-like phosphoesterase family
  misc_feature (15)..(366): Homolog of NCBI NO: 30911094 NR Description: putative purple acid phosphatase [Arabidopsis
  misc_feature (1)..(366): Homolog of NCBI NO: 25752249 NR Description: probable acid phosphatase (EC 3.1.3.2) F10B6.10
  misc_feature (1)..(366): Homolog of NCBI NO: 30683951 NR Description: calcineurin-like phosphoesterase family
MTYIYRDTKITTKSTIPFLIFFLFCFSNLSMATLKHKPVNLVFYVYNLIIIFSSHSSTAELRRLLQPSKTDGTVSFLVIGDWGRRGSYNQSQVALQMGEIGEKLDIDFVISTGDNFYDNGLTSLHDPLFQDSFTNIYTAPSLQKPWYSVLGNHDYRGDVRAQLSPMLRALDNRWVCMRSFIVNAEIVDLFFVDTTPFVDKYFIQPNKHVYDWSGVLPRQTYLNNLLKELDVALRESVAKWKIVIGHHTIKSAGHHGNTIELEKHLLPILQANEVDLYVNGHDHCLEHISSVDSNIQFMTSGGGSKAWKGGDVNYVEPEEMRFYYDGQGFMSVHVSEAELRVVFYDVFGHVLHHWKKTYKEALYFAS

SEQ ID NO: 29307 - protein, 336 aa, Arabidopsis thaliana
  peptide (1)..(336): Ceres Seq. ID no. 13580665
  misc_feature (44)..(255): Pfam Name: Calcineurin-like phosphoesterase Pfam Description: Calcineurin-like phosphoesterase
  misc_feature (7)..(309): Homolog of NCBI NO: 6635445 NR Description: putative purple acid phosphatase precursor
  misc_feature (7)..(333): Homolog of NCBI NO: 25752251 NR Description: probable acid phosphatase (EC 3.1.3.2) At2g01890
  misc_feature (7)..(333): Homolog of NCBI NO: 22325419 NR Description: calcineurin-like phosphoesterase family
  misc_feature (1)..(336): Homolog of NCBI NO: 30911094 NR Description: putative purple acid phosphatase [Arabidopsis
  misc_feature (1)..(336): Homolog of NCBI NO: 25752249 NR Description: probable acid phosphatase (EC 3.1.3.2) F10B6.10
  misc_feature (1)..(336): Homolog of NCBI NO: 30683951 NR Description: calcineurin-like phosphoesterase family
MATLKHKPVNLVFYVYNLIIIFSSHSSTAELRRLLQPSKTDGTVSFLVIGDWGRRGSYNQSQVALQMGEIGEKLDIDFVISTGDNFYDNGLTSLHDPLFQDSFTNIYTAPSLQKPWYSVLGNHDYRGDVRAQLSPMLRALDNRWVCMRSFIVNAEIVDLFFVDTTPFVDKYFIQPNKHVYDWSGVLPRQTYLNNLLKELDVALRESVAKWKIVIGHHTIKSAGHHGNTIELEKHLLPILQANEVDLYVNGHDHCLEHISSVDSNIQFMTSGGGSKAWKGGDVNYVEPEEMRFYYDGQGFMSVHVSEAELRVVFYDVFGHVLHHWKKTYKEALYFAS

SEQ ID NO: 29308 - protein, 270 aa, Arabidopsis thaliana
  peptide (1)..(270): Ceres Seq. ID no. 13580666
  misc_feature (1)..(189): Pfam Name: Calcineurin-like phosphoesterase Pfam Description: Calcineurin-like phosphoesterase
  misc_feature (1)..(243): Homolog of NCBI NO: 6635445 NR Description: putative purple acid phosphatase precursor
  misc_feature (1)..(267): Homolog of NCBI NO: 25752251 NR Description: probable acid phosphatase (EC 3.1.3.2) At2g01890
  misc_feature (1)..(267): Homolog of NCBI NO: 22325419 NR Description: calcineurin-like phosphoesterase family
  misc_feature (1)..(270): Homolog of NCBI NO: 30911094 NR Description: putative purple acid phosphatase [Arabidopsis
  misc_feature (1)..(270): Homolog of NCBI NO: 25752249 NR Description: probable acid phosphatase (EC 3.1.3.2) F10B6.10
  misc_feature (1)..(270): Homolog of NCBI NO: 30683951 NR Description: calcineurin-like phosphoesterase family
MGEIGEKLDIDFVISTGDNFYDNGLTSLHDPLFQDSFTNIYTAPSLQKPWYSVLGNHDYRGDVRAQLSPMLRALDNRWVCMRSFIVNAEIVDLFFVDTTPFVDKYFIQPNKHVYDWSGVLPRQTYLNNLLKELDVALRESVAKWKIVIGHHTIKSAGHHGNTIELEKHLLPILQANEVDLYVNGHDHCLEHISSVDSNIQFMTSGGGSKAWKGGDVNYVEPEEMRFYYDGQGFMSVHVSEAELRVVFYDVFGHVLHHWKKTYKEALYFAS

SEQ ID NO: 29309 - DNA, 1389 bp, Arabidopsis thaliana
  misc_feature (1)..(1389): Ceres Seq. ID no. 13486876
  misc_feature: MA Experiment ID: 20000314 Result: Down-regulated in Transcription
  misc_feature: MA Experiment 20000314 PARAMETER Experiment Name: At_14day_Shoots-Roots_Sub_P Parameter: Age (day) Value: 14
  misc_feature: MA Experiment 20000314 PARAMETER Experiment Name: At_14day_Shoots-Roots_Sub_P Parameter: Organism Value: A. thaliana
  misc_feature: MA Experiment 20000314 PARAMETER Experiment Name: At_14day_Shoots-Roots_Sub_P Parameter: Plant Line Value: WS
  misc_feature: MA Experiment 20000314 PARAMETER Experiment Name: At_14day_Shoots-Roots_Sub_P Parameter: Tissue Value: Roots vs. Whole Plant
  misc_feature: MA Experiment ID: 20000315 Result: Down-regulated in Transcription
  misc_feature: MA Experiment 20000315 PARAMETER Experiment Name: At_14day_Shoots-Roots_Sub_P Parameter: Age (day) Value: 14
  misc_feature: MA Experiment 20000315 PARAMETER Experiment Name: At_14day_Shoots-Roots_Sub_P Parameter: Organism Value: A. thaliana
  misc_feature: MA Experiment 20000315 PARAMETER Experiment Name: At_14day_Shoots-Roots_Sub_P Parameter: Plant Line Value: WS
  misc_feature: MA Experiment 20000315 PARAMETER Experiment Name: At_14day_Shoots-Roots_Sub_P Parameter: Tissue Value: Shoots vs. Whole Plant
  misc_feature: Phenotype: ROSETTE LEAVES Disorganized Rosette-Disorganized Rosette
  misc_feature: Phenotype: ROSETTE LEAVES Shape-Lanceolate
  misc_feature: Phenotype: ROSETTE LEAVES Other
  misc_feature: Phenotype: WHOLE PLANT Size-Small
  misc_feature: Phenotype: ROSETTE LEAVES Disorganized Rosette-Disorganized Rosette
  misc_feature: Phenotype: ROSETTE LEAVES Shape-Lanceolate
  misc_feature: Phenotype: ROSETTE LEAVES Other
  misc_feature: Phenotype: WHOLE PLANT Size-Small
  misc_feature: Phenotype: ROSETTE LEAVES Disorganized Rosette-Disorganized Rosette
  misc_feature: Phenotype: ROSETTE LEAVES Shape-Lanceolate
  misc_feature: Phenotype: ROSETTE LEAVES Other
  misc_feature: Phenotype: WHOLE PLANT Size-Small
  misc_feature: Phenotype: ROSETTE LEAVES Disorganized Rosette-Disorganized Rosette
  misc_feature: Phenotype: ROSETTE LEAVES Shape-Lanceolate
  misc_feature: Phenotype: ROSETTE LEAVES Other
  misc_feature: Phenotype: WHOLE PLANT Size-Small
  misc_feature: Phenotype: ROSETTE LEAVES Disorganized Rosette-Disorganized Rosette
  misc_feature: Phenotype: ROSETTE LEAVES Shape-Lanceolate
  misc_feature: Phenotype: ROSETTE LEAVES Other
  misc_feature: Phenotype: WHOLE PLANT Size-Small
  misc_feature: Phenotype: ROSETTE LEAVES Disorganized Rosette-Disorganized Rosette
  misc_feature: Phenotype: ROSETTE LEAVES Shape-Lanceolate
  misc_feature: Phenotype: ROSETTE LEAVES Other
  misc_feature: Phenotype: CAULINE LEAVES Shape-Lanceolate
  misc_feature: Phenotype: ROSETTE LEAVES Disorganized Rosette-Disorganized Rosette
  misc_feature: Phenotype: ROSETTE LEAVES Shape-Lanceolate
  misc_feature: Phenotype: ROSETTE LEAVES Other
  misc_feature: Phenotype: WHOLE PLANT Size-Small
  misc_feature: Phenotype: ROSETTE LEAVES Disorganized Rosette-Disorganized Rosette
  misc_feature: Phenotype: ROSETTE LEAVES Shape-Lanceolate
  misc_feature: Phenotype: INFLORESCENCE Height-Short
  misc_feature: Phenotype: ROSETTE LEAVES Disorganized Rosette-Disorganized Rosette
  misc_feature: Phenotype: ROSETTE LEAVES Shape-Lanceolate
  misc_feature: Phenotype: ROSETTE LEAVES Other
  misc_feature: Phenotype: FLOWERS Other
  misc_feature: Phenotype: INFLORESCENCE Height-Short
  misc_feature: Phenotype: FERTILITY Fertility-Reduced
  misc_feature: Phenotype: ROSETTE LEAVES Disorganized Rosette-Disorganized Rosette
  misc_feature: Phenotype: ROSETTE LEAVES Shape-Lanceolate
  misc_feature: Phenotype: ROSETTE LEAVES Other
  misc_feature: Phenotype: FLOWERS Other
  misc_feature: Phenotype: INFLORESCENCE Height-Short
  misc_feature: Phenotype: FERTILITY Fertility-Reduced
  misc_feature: Phenotype: ROSETTE LEAVES Disorganized Rosette-Disorganized Rosette
  misc_feature: Phenotype: ROSETTE LEAVES Shape-Lanceolate
  misc_feature: Phenotype: INFLORESCENCE Height-Short
  misc_feature: Phenotype: ROSETTE LEAVES Disorganized Rosette-Disorganized Rosette
  misc_feature: Phenotype: ROSETTE LEAVES Shape-Lanceolate
  misc_feature: Phenotype: ROSETTE LEAVES Other
  misc_feature: Phenotype: FLOWERS Other
  misc_feature: Phenotype: INFLORESCENCE Height-Short
  misc_feature: Phenotype: FERTILITY Fertility-Reduced
  misc_feature: Phenotype: ROSETTE LEAVES Disorganized Rosette-Disorganized Rosette
  misc_feature: Phenotype: ROSETTE LEAVES Shape-Lanceolate
  misc_feature: Phenotype: INFLORESCENCE Height-Short
  misc_feature: Phenotype: ROSETTE LEAVES Disorganized Rosette-Disorganized Rosette
  misc_feature: Phenotype: ROSETTE LEAVES Shape-Lanceolate
  misc_feature: Phenotype: ROSETTE LEAVES Other
  misc_feature: Phenotype: FLOWERS Other
  misc_feature: Phenotype: INFLORESCENCE Height-Short
  misc_feature: Phenotype: FERTILITY Fertility-Reduced
  misc_feature: Phenotype: ROSETTE LEAVES Disorganized Rosette-Disorganized Rosette
  misc_feature: Phenotype: ROSETTE LEAVES Shape-Lanceolate
  misc_feature: Phenotype: INFLORESCENCE Height-Short
  misc_feature: Phenotype: ROSETTE LEAVES Disorganized Rosette-Disorganized Rosette
  misc_feature: Phenotype: ROSETTE LEAVES Shape-Lanceolate
  misc_feature: Phenotype: ROSETTE LEAVES Other
  misc_feature: Phenotype: FLOWERS Other
  misc_feature: Phenotype: INFLORESCENCE Height-Short
  misc_feature: Phenotype: FERTILITY Fertility-Reduced
  misc_feature: Phenotype: ROSETTE LEAVES Disorganized Rosette-Disorganized Rosette
  misc_feature: Phenotype: ROSETTE LEAVES Shape-Lanceolate
  misc_feature: Phenotype: INFLORESCENCE Height-Short
  misc_feature: Phenotype: ROSETTE LEAVES Shape-Lanceolate
  misc_feature: Phenotype: ROSETTE LEAVES Shape-Lanceolate
  misc_feature: Phenotype: ROSETTE LEAVES Shape-Lanceolate
  misc_feature: Phenotype: ROSETTE LEAVES Shape-Lanceolate
  misc_feature: Phenotype: ROSETTE LEAVES Shape-Lanceolate
  misc_feature: Phenotype: ROSETTE LEAVES Shape-Lanceolate
  misc_feature: Phenotype: ROSETTE LEAVES Shape-Lanceolate
  misc_feature: Phenotype: ROSETTE LEAVES Shape-Lanceolate
  misc_feature: Phenotype: ROSETTE LEAVES Shape-Lanceolate
  misc_feature: Phenotype: ROSETTE LEAVES Shape-Lanceolate
  misc_feature: Phenotype: ROSETTE LEAVES Shape-Lanceolate
  misc_feature: Phenotype: ROSETTE LEAVES Other
  misc_feature: Phenotype: CAULINE LEAVES Shape-Lanceolate
  misc_feature: Phenotype: CAULINE LEAVES Other
  misc_feature: Phenotype: ROSETTE LEAVES Disorganized Rosette-Disorganized Rosette
  misc_feature: Phenotype: ROSETTE LEAVES Shape-Lanceolate
  misc_feature: Phenotype: ROSETTE LEAVES Other
  misc_feature: Phenotype: INFLORESCENCE Other
  misc_feature: Phenotype: ROSETTE LEAVES Disorganized Rosette-Disorganized Rosette
  misc_feature: Phenotype: ROSETTE LEAVES Shape-Lanceolate
  misc_feature: Phenotype: ROSETTE LEAVES Other
  misc_feature: Phenotype: INFLORESCENCE Height-Short
  misc_feature: Phenotype: INFLORESCENCE Other
  misc_feature: Phenotype: FERTILITY Fertility-Reduced
  misc_feature: Phenotype: ROSETTE LEAVES Disorganized Rosette-Disorganized Rosette
  misc_feature: Phenotype: ROSETTE LEAVES Shape-Lanceolate
  misc_feature: Phenotype: ROSETTE LEAVES Other
  misc_feature: Phenotype: INFLORESCENCE Height-Short
  misc_feature: Phenotype: INFLORESCENCE Other
  misc_feature: Phenotype: FERTILITY Fertility-Reduced
  misc_feature: Phenotype: ROSETTE LEAVES Disorganized Rosette-Disorganized Rosette
  misc_feature: Phenotype: ROSETTE LEAVES Shape-Lanceolate
  misc_feature: Phenotype: ROSETTE LEAVES Other
  misc_feature: Phenotype: INFLORESCENCE Height-Short
  misc_feature: Phenotype: INFLORESCENCE Other
  misc_feature: Phenotype: FERTILITY Fertility-Reduced
  misc_feature: Phenotype: ROSETTE LEAVES Disorganized Rosette-Disorganized Rosette
  misc_feature: Phenotype: ROSETTE LEAVES Shape-Lanceolate
  misc_feature: Phenotype: ROSETTE LEAVES Other
  misc_feature: Phenotype: INFLORESCENCE Height-Short
  misc_feature: Phenotype: INFLORESCENCE Other
  misc_feature: Phenotype: FERTILITY Fertility-Reduced
  misc_feature: Phenotype: INFLORESCENCE Other
  misc_feature: Phenotype: ROSETTE LEAVES Shape-Lanceolate
  misc_feature: Phenotype: ROSETTE LEAVES Shape-Serrate
  misc_feature: Phenotype: ROSETTE LEAVES Other
  misc_feature: Phenotype: ROSETTE LEAVES Other
  misc_feature: Phenotype: WHOLE PLANT Color-Dark Green
  misc_feature: Phenotype: WHOLE PLANT Color-Dark Green
  misc_feature: Phenotype: WHOLE PLANT Color-Dark Green
  misc_feature: Phenotype: WHOLE PLANT Size-Small
  misc_feature: Phenotype: WHOLE PLANT Size-Small
  misc_feature: Phenotype: WHOLE PLANT Other
  misc_feature: Phenotype: INFLORESCENCE Branching-No Branching
  misc_feature: Phenotype: INFLORESCENCE Flowering Time-Late Flowering
  misc_feature: Phenotype: INFLORESCENCE Flowering Time-Late Flowering
  misc_feature: Phenotype: INFLORESCENCE Flowering Time-Late Flowering
  misc_feature: Phenotype: SENESCENCE TIME Senescence Time-Late Senescence
  misc_feature: Phenotype: ROSETTE LEAVES Disorganized Rosette-Disorganized Rosette
  misc_feature: Phenotype: ROSETTE LEAVES Shape-Lanceolate
  misc_feature: Phenotype: ROSETTE LEAVES Other
  misc_feature: Phenotype: ROSETTE LEAVES Other
  misc_feature: Phenotype: WHOLE PLANT Color-Dark Green
  misc_feature: Phenotype: WHOLE PLANT Color-Dark Green
  misc_feature: Phenotype: WHOLE PLANT Color-Dark Green
  misc_feature: Phenotype: WHOLE PLANT Rosette Shape-Bushy
  misc_feature: Phenotype: WHOLE PLANT Size-Small
  misc_feature: Phenotype: WHOLE PLANT Size-Small
  misc_feature: Phenotype: WHOLE PLANT Size-Small
  misc_feature: Phenotype: CAULINE LEAVES Size-Small
  misc_feature: Phenotype: CAULINE LEAVES Other
  misc_feature: Phenotype: FLOWERS Size-Small
  misc_feature: Phenotype: INFLORESCENCE Branching-No Branching
  misc_feature: Phenotype: INFLORESCENCE Branching-Reduced Apical Dominance
  misc_feature: Phenotype: INFLORESCENCE Flowering Time-Late Flowering
  misc_feature: Phenotype: INFLORESCENCE Flowering Time-Late Flowering
  misc_feature: Phenotype: INFLORESCENCE Flowering Time-Late Flowering
  misc_feature: Phenotype: INFLORESCENCE Height-Short
  misc_feature: Phenotype: INFLORESCENCE Internode Length-Short Internode
  misc_feature: Phenotype: INFLORESCENCE Other
  misc_feature: Phenotype: FERTILITY Fertility-Reduced
  misc_feature: Phenotype: SENESCENCE TIME Senescence Time-Late Senescence
  misc_feature: Phenotype: WHOLE PLANT Rosette Shape-Standing
  misc_feature: Phenotype: WHOLE PLANT Size-Small
  misc_feature: Phenotype: INFLORESCENCE Flowering Time-Late Flowering
  misc_feature: Phenotype: ROSETTE LEAVES Curled-Curled 1
  misc_feature: Phenotype: WHOLE PLANT Color-Dark Green
  misc_feature: Phenotype: WHOLE PLANT Size-Small
  misc_feature: Phenotype: ROSETTE LEAVES Other
  misc_feature: Phenotype: WHOLE PLANT Color-Dark Green
  misc_feature: Phenotype: WHOLE PLANT Color-Dark Green
  misc_feature: Phenotype: WHOLE PLANT Size-Small
  misc_feature: Phenotype: WHOLE PLANT Size-Small
  misc_feature: Phenotype: CAULINE LEAVES Size-Small
  misc_feature: Phenotype: FLOWERS Other
  misc_feature: Phenotype: INFLORESCENCE Branching-Reduced Apical Dominance
  misc_feature: Phenotype: INFLORESCENCE Flowering Time-Late Flowering
  misc_feature: Phenotype: INFLORESCENCE Internode Length-Short Internode
  misc_feature: Phenotype: INFLORESCENCE Other
  misc_feature: Phenotype: FERTILITY Fertility-Reduced
  misc_feature: Phenotype: ROSETTE LEAVES Disorganized Rosette-Disorganized Rosette
  misc_feature: Phenotype: ROSETTE LEAVES Petiole Length-Long Petioles
  misc_feature: Phenotype: ROSETTE LEAVES Other
  misc_feature: Phenotype: WHOLE PLANT Color-Dark Green
  misc_feature: Phenotype: WHOLE PLANT Size-Small
  misc_feature: Phenotype: CAULINE LEAVES Other
  misc_feature: Phenotype: INFLORESCENCE Branching-No Branching
  misc_feature: Phenotype: INFLORESCENCE Flowering Time-Late Flowering
  misc_feature: Phenotype: INFLORESCENCE Flowering Time-Late Flowering
  misc_feature: Phenotype: ROSETTE LEAVES Disorganized Rosette-Disorganized Rosette
  misc_feature: Phenotype: ROSETTE LEAVES Other
  misc_feature: Phenotype: WHOLE PLANT Color-Dark Green
  misc_feature: Phenotype: WHOLE PLANT Color-Dark Green
  misc_feature: Phenotype: WHOLE PLANT Rosette Shape-Bushy
  misc_feature: Phenotype: WHOLE PLANT Size-Small
  misc_feature: Phenotype: WHOLE PLANT Size-Small
  misc_feature: Phenotype: CAULINE LEAVES Size-Small
  misc_feature: Phenotype: CAULINE LEAVES Other
  misc_feature: Phenotype: FLOWERS Size-Small
  misc_feature: Phenotype: INFLORESCENCE Branching-No Branching
  misc_feature: Phenotype: INFLORESCENCE Branching-Reduced Apical Dominance
  misc_feature: Phenotype: INFLORESCENCE Flowering Time-Late Flowering
  misc_feature: Phenotype: INFLORESCENCE Flowering Time-Late Flowering
  misc_feature: Phenotype: INFLORESCENCE Height-Short
  misc_feature: Phenotype: INFLORESCENCE Internode Length-Short Internode
  misc_feature: Phenotype: INFLORESCENCE Other
  misc_feature: Phenotype: FERTILITY Fertility-Reduced
  misc_feature: Phenotype: SENESCENCE TIME Senescence Time-Late Senescence
  misc_feature: Phenotype: WHOLE PLANT Color-Dark Green
  misc_feature: Phenotype: INFLORESCENCE Height-Short
  misc_feature: Phenotype: WHOLE PLANT Size-Small
  misc_feature: Phenotype: INFLORESCENCE Height-Short
  misc_feature: Phenotype: ROSETTE LEAVES Other
  misc_feature: Phenotype: WHOLE PLANT Color-Dark Green
  misc_feature: Phenotype: WHOLE PLANT Color-High Anthocyanin
  misc_feature: Phenotype: WHOLE PLANT Size-Small
  misc_feature: Phenotype: INFLORESCENCE Flowering Time-Late Flowering
  misc_feature: Phenotype: WHOLE PLANT Size-Small
  misc_feature: Phenotype: CAULINE LEAVES Other
  misc_feature: Phenotype: INFLORESCENCE Flowering Time-Late Flowering
  misc_feature: Phenotype: SILIQUES Length-Short
attacatgagctctctctctctctccttctccttctctcttctccttccttgttcttagagattgatcctaacttgtttttcctttcttggaattgaagagcttcttgttccataaacagtagagagagaaagcttcaaagagagaatcgtgctaatcagtgaagttaggcaaaaacccacttgccatttttgtataattaggtcaatctcatccaccaccatactcaattctcttccttctgaaattagggttttttttatctcctcctctctctttcttgtctaccaaaaaaggttttatcgaattactctcaaatcgtatggtgaggaagtcaaaatcttgagagatctgagattgtaagaagatgaatcaagaagataaagagaagcctattgaagaagcttcttcatcaatggagagagaacacatgttcgacaaagtagtaacaccaagcgacgttggcaaactaaaccgactcgtgatccctaagcaacacgcagagagatacttcccattagataactccacaacaaacgacagcaacaaaggtttgcttctaaacttcgaagatcgaagtggaaactcatggaggttccgttactcttactggaacagtagtcaaagctatgtcatgactaaaggttggagccgttttgtcaaagacaagaagcttgatgctggagacatcgtttcttttcagagagattcttgtaataaagacaagctttacatcgattggaggagacgacctaagattcccgatcatcatcatcagcaattcgccggagctatgttccctaggttttacacttttcctcatcctcagatgccgacaaattacgaaactcacaacctttatcatcgatttcatcaacgagatctaggaattggatactatgtgaggtcaatggagaggagtcatccaacggctgtgattgaatctgtgccggtgatgatgcaaaggagagcacaagtggcttcaatggcttcgagaggagagaagcggttaaggctgtttggtgtagatatggagtgcggaggaggaggagggagtgtgaatagtacggaggaagagtcgtcgtcttccggtggtagtataccacgtggcagagtttctatggttggtgctggttctctcctccagttgaggttagtgagcagtgatgataagtctttagtagcaatggaagctgcaagtcttgaggatcatcacttctttacaaagaaaggaaaaccttctttgtcttttgatttggataggtgatgattatcatgagattaatcactatttaaaaatgcatatatatgataatttataccatatattatatatgacacaaagatgtctttcaagatttaatgatattatcaagaaataacatgttct

SEQ ID NO: 29310 - protein, 299 aa, Arabidopsis thaliana
  peptide (1)..(299): Ceres Seq. ID no. 13486877
  misc_feature (22)..(131): Pfam Name: B3 DNA binding domain Pfam Description: B3 DNA binding domain
  misc_feature (19)..(128): Homolog of NCBI NO: 15239984 NR Description: DNA-binding protein, putative [Arabidopsis
  misc_feature (18)..(226): Homolog of NCBI NO: 30681787 NR Description: DNA-binding protein, putative [Arabidopsis
  misc_feature (3)..(169): Homolog of NCBI NO: 37536454 NR Description: putative DNA-binding protein
  misc_feature (15)..(131): Homolog of NCBI NO: 34902226 NR Description: Putative RAV-like B3 domain DNA binding protein
  misc_feature (17)..(138): Homolog of NCBI NO: 32492293 NR Description: OSJNBa0088A01.1 [Oryza sativa (japonica
  misc_feature (18)..(181): Homolog of NCBI NO: 15223284 NR Description: DNA-binding protein, putative [Arabidopsis
  misc_feature (1)..(299): Homolog of NCBI NO: 18407193 NR Description: DNA-binding protein, putative [Arabidopsis
  misc_feature (17)..(299): Homolog of NCBI NO: 21618252 NR Description: RAV-like protein [Arabidopsis thaliana]
  misc_feature (1)..(299): Homolog of NCBI NO: 15228649 NR Description: DNA-binding protein, putative [Arabidopsis
  misc_feature (1)..(299): Homolog of NCBI NO: 26450371 NR Description: putative RAV [Arabidopsis thaliana]
MNQEDKEKPIEEASSSMEREHMFDKVVTPSDVGKLNRLVIPKQHAERYFPLDNSTTNDSNKGLLLNFEDRSGNSWRFRYSYWNSSQSYVMTKGWSRFVKDKKLDAGDIVSFQRDSCNKDKLYIDWRRRPKIPDHHHQQFAGAMFPRFYTFPHPQMPTNYETHNLYHRFHQRDLGIGYYVRSMERSHPTAVIESVPVMMQRRAQVASMASRGEKRLRLFGVDMECGGGGGSVNSTEEESSSSGGSIPRGRVSMVGAGSLLQLRLVSSDDKSLVAMEAASLEDHHFFTKKGKPSLSFDLDR

SEQ ID NO: 29311 - protein, 283 aa, Arabidopsis thaliana
  peptide (1)..(283): Ceres Seq. ID no. 13486878
  misc_feature (6)..(115): Pfam Name: B3 DNA binding domain Pfam Description: B3 DNA binding domain
  misc_feature (3)..(112): Homolog of NCBI NO: 15239984 NR Description: DNA-binding protein, putative [Arabidopsis
  misc_feature (2)..(210): Homolog of NCBI NO: 30681787 NR Description: DNA-binding protein, putative [Arabidopsis
  misc_feature (1)..(153): Homolog of NCBI NO: 37536454 NR Description: putative DNA-binding protein
  misc_feature (1)..(115): Homolog of NCBI NO: 34902226 NR Description: Putative RAV-like B3 domain DNA binding protein
  misc_feature (1)..(122): Homolog of NCBI NO: 32492293 NR Description: OSJNBa0088A01.1 [Oryza sativa (japonica
  misc_feature (2)..(165): Homolog of NCBI NO: 15223284 NR Description: DNA-binding protein, putative [Arabidopsis
  misc_feature (1)..(283): Homolog of NCBI NO: 18407193 NR Description: DNA-binding protein, putative [Arabidopsis
  misc_feature (1)..(283): Homolog of NCBI NO: 21618252 NR Description: RAV-like protein [Arabidopsis thaliana]
  misc_feature (1)..(283): Homolog of NCBI NO: 15228649 NR Description: DNA-binding protein, putative [Arabidopsis
  misc_feature (1)..(283): Homolog of NCBI NO: 26450371 NR Description: putative RAV [Arabidopsis thaliana]
MEREHMFDKVVTPSDVGKLNRLVIPKQHAERYFPLDNSTTNDSNKGLLLNFEDRSGNSWRFRYSYWNSSQSYVMTKGWSRFVKDKKLDAGDIVSFQRDSCNKDKLYIDWRRRPKIPDHHHQQFAGAMFPRFYTFPHPQMPTNYETHNLYHRFHQRDLGIGYYVRSMERSHPTAVIESVPVMMQRRAQVASMASRGEKRLRLFGVDMECGGGGGSVNSTEEESSSSGGSIPRGRVSMVGAGSLLQLRLVSSDDKSLVAMEAASLEDHHFFTKKGKPSLSFDLDR

SEQ ID NO: 29312 - protein, 278 aa, Arabidopsis thaliana
  peptide (1)..(278): Ceres Seq. ID no. 13486879
  misc_feature (1)..(110): Pfam Name: B3 DNA binding domain Pfam Description: B3 DNA binding domain
  misc_feature (1)..(107): Homolog of NCBI NO: 15239984 NR Description: DNA-binding protein, putative [Arabidopsis
  misc_feature (1)..(205): Homolog of NCBI NO: 30681787 NR Description: DNA-binding protein, putative [Arabidopsis
  misc_feature (1)..(148): Homolog of NCBI NO: 37536454 NR Description: putative DNA-binding protein
  misc_feature (1)..(110): Homolog of NCBI NO: 34902226 NR Description: Putative RAV-like B3 domain DNA binding protein
  misc_feature (1)..(117): Homolog of NCBI NO: 32492293 NR Description: OSJNBa0088A01.1 [Oryza sativa (japonica
  misc_feature (1)..(160): Homolog of NCBI NO: 15223284 NR Description: DNA-binding protein, putative [Arabidopsis
  misc_feature (1)..(278): Homolog of NCBI NO: 18407193 NR Description: DNA-binding protein, putative [Arabidopsis
  misc_feature (1)..(278): Homolog of NCBI NO: 21618252 NR Description: RAV-like protein [Arabidopsis thaliana]
  misc_feature (1)..(278): Homolog of NCBI NO: 15228649 NR Description: DNA-binding protein, putative [Arabidopsis
  misc_feature (1)..(278): Homolog of NCBI NO: 26450371 NR Description: putative RAV [Arabidopsis thaliana]
MFDKVVTPSDVGKLNRLVIPKQHAERYFPLDNSTTNDSNKGLLLNFEDRSGNSWRFRYSYWNSSQSYVMTKGWSRFVKDKKLDAGDIVSFQRDSCNKDKLYIDWRRRPKIPDHHHQQFAGAMFPRFYTFPHPQMPTNYETHNLYHRFHQRDLGIGYYVRSMERSHPTAVIESVPVMMQRRAQVASMASRGEKRLRLFGVDMECGGGGGSVNSTEEESSSSGGSIPRGRVSMVGAGSLLQLRLVSSDDKSLVAMEAASLEDHHFFTKKGKPSLSFDLDR

SEQ ID NO: 29313 - DNA, 1558 bp, Arabidopsis thaliana
  misc_feature (1)..(1558): Ceres Seq. ID no. 12321966
  misc_feature: MA Experiment ID: 108434 Result: Down-regulated in Transcription
  misc_feature: MA Experiment 108434 PARAMETER Experiment Name: At_Root_Tips_cDNA_P Parameter: Tissue Value: Root Tips
  misc_feature: MA Experiment ID: 108594 Result: Up-regulated in Transcription
  misc_feature: MA Experiment 108594 PARAMETER Experiment Name: At_Ler-rhl_Root_cDNA_P Parameter: Plant Line Value: null
  misc_feature: MA Experiment ID: 108595 Result: Up-regulated in Transcription
  misc_feature: MA Experiment 108595 PARAMETER Experiment Name: At_Ler-pi_Ovule_cDNA_P Parameter: Plant Line Value: null
  misc_feature: MA Experiment ID: 108608 Result: Down-regulated in Transcription
  misc_feature: MA Experiment 108608 PARAMETER Experiment Name: At_100uM_ABA_cDNA_P Parameter: Timepoint (hr) Value: 1
  misc_feature: MA Experiment 108608 PARAMETER Experiment Name: At_100uM_ABA_cDNA_P Parameter: Tissue Value: Aerial
  misc_feature: MA Experiment 108608 PARAMETER Experiment Name: At_100uM_ABA_cDNA_P Parameter: Treatment Value: 100uM ABA vs. No Treatment
  misc_feature: MA Experiment ID: 20000111 Result: Down-regulated in Transcription
  misc_feature: MA Experiment 20000111 PARAMETER Experiment Name: At_42deg_Heat_cDNA_P Parameter: Temperature (deg C) Value: 42 vs. 22
  misc_feature: MA Experiment 20000111 PARAMETER Experiment Name: At_42deg_Heat_cDNA_P Parameter: Timepoint (hr) Value: 6
  misc_feature: MA Experiment 20000111 PARAMETER Experiment Name: At_42deg_Heat_cDNA_P Parameter: Tissue Value: Aerial
  misc_feature: MA Experiment ID: 20000166 Result: Down-regulated in Transcription
  misc_feature: MA Experiment 20000166 PARAMETER Experiment Name: At_100uM_ABA_P Parameter: Age (day) Value: 14
  misc_feature: MA Experiment 20000166 PARAMETER Experiment Name: At_100uM_ABA_P Parameter: Organism Value: A. thaliana
  misc_feature: MA Experiment 20000166 PARAMETER Experiment Name: At_100uM_ABA_P Parameter: Plant Line Value: WS
  misc_feature: MA Experiment 20000166 PARAMETER Experiment Name: At_100uM_ABA_P Parameter: Timepoint (hr) Value: 1
  misc_feature: MA Experiment 20000166 PARAMETER Experiment Name: At_100uM_ABA_P Parameter: Tissue Value: Aerial
  misc_feature: MA Experiment 20000166 PARAMETER Experiment Name: At_100uM_ABA_P Parameter: Treatment Value: 100uM ABA vs. No Treatment
  misc_feature: MA Experiment ID: 20000173 Result: Down-regulated in Transcription
  misc_feature: MA Experiment 20000173 PARAMETER Experiment Name: At_42deg_Heat_P Parameter: Age (day) Value: 14
  misc_feature: MA Experiment 20000173 PARAMETER Experiment Name: At_42deg_Heat_P Parameter: Organism Value: A. thaliana
  misc_feature: MA Experiment 20000173 PARAMETER Experiment Name: At_42deg_Heat_P Parameter: Plant Line Value: WS
  misc_feature: MA Experiment 20000173 PARAMETER Experiment Name: At_42deg_Heat_P Parameter: Temperature (deg C) Value: 42 vs. 22
  misc_feature: MA Experiment 20000173 PARAMETER Experiment Name: At_42deg_Heat_P Parameter: Timepoint (hr) Value: 6
  misc_feature: MA Experiment 20000173 PARAMETER Experiment Name: At_42deg_Heat_P Parameter: Tissue Value: Aerial
  misc_feature: MA Experiment ID: 20000184 Result: Down-regulated in Transcription
  misc_feature: MA Experiment 20000184 PARAMETER Experiment Name: At_Shoots__P Parameter: Age (day) Value: 7
  misc_feature: MA Experiment 20000184 PARAMETER Experiment Name: At_Shoots__P Parameter: Tissue Value: Shoots vs. Whole Plant
  misc_feature: MA Experiment ID: 20000213 Result: Up-regulated in Transcription
  misc_feature: MA Experiment 20000213 PARAMETER Experiment Name: At_4deg_Cold_P Parameter: Timepoint (hr) Value: 2
  misc_feature: MA Experiment ID: 20000437 Result: Down-regulated in Transcription
  misc_feature: MA Experiment 20000437 PARAMETER Experiment Name: At_Drought_P Parameter: Age (day) Value: 8
  misc_feature: MA Experiment 20000437 PARAMETER Experiment Name: At_Drought_P Parameter: Organism Value: A. thaliana
  misc_feature: MA Experiment 20000437 PARAMETER Experiment Name: At_Drought_P Parameter: Plant Line Value: WS
  misc_feature: MA Experiment 20000437 PARAMETER Experiment Name: At_Drought_P Parameter: Timepoint (hr) Value: 24
  misc_feature: MA Experiment 20000437 PARAMETER Experiment Name: At_Drought_P Parameter: Tissue Value: Whole Plant
  misc_feature: MA Experiment 20000437 PARAMETER Experiment Name: At_Drought_P Parameter: Treatment Value: Drought vs. No Drought
  misc_feature: MA Experiment ID: 20000438 Result: Down-regulated in Transcription
  misc_feature: MA Experiment 20000438 PARAMETER Experiment Name: At_Shoots__P Parameter: Age (day) Value: 14
  misc_feature: MA Experiment 20000438 PARAMETER Experiment Name: At_Shoots__P Parameter: Tissue Value: Shoots vs. Whole Plant
  misc_feature: MA Experiment ID: 20001557 Result: Up-regulated in Transcription
  misc_feature: MA Experiment 20001557 PARAMETER Experiment Name: At_Drought_Soil_Dry_P Parameter: Age (day) Value: 27
  misc_feature: MA Experiment 20001557 PARAMETER Experiment Name: At_Drought_Soil_Dry_P Parameter: Organism Value: A. thaliana
  misc_feature: MA Experiment 20001557 PARAMETER Experiment Name: At_Drought_Soil_Dry_P Parameter: Plant Line Value: WS
  misc_feature: MA Experiment 20001557 PARAMETER Experiment Name: At_Drought_Soil_Dry_P Parameter: Post Timepoint (hr) Value: 3
  misc_feature: MA Experiment 20001557 PARAMETER Experiment Name: At_Drought_Soil_Dry_P Parameter: Post-Treatment Value: Re-Water vs. No Drought
  misc_feature: MA Experiment 20001557 PARAMETER Experiment Name: At_Drought_Soil_Dry_P Parameter: Timepoint (day) Value: 13
  misc_feature: MA Experiment 20001557 PARAMETER Experiment Name: At_Drought_Soil_Dry_P Parameter: Treatment Value: Drought vs. No Drought
  misc_feature: MA Experiment ID: 20001558 Result: Up-regulated in Transcription
  misc_feature: MA Experiment 20001558 PARAMETER Experiment Name: At_Drought_Soil_Dry_P Parameter: Age (day) Value: 27
  misc_feature: MA Experiment 20001558 PARAMETER Experiment Name: At_Drought_Soil_Dry_P Parameter: Organism Value: A. thaliana
  misc_feature: MA Experiment 20001558 PARAMETER Experiment Name: At_Drought_Soil_Dry_P Parameter: Plant Line Value: WS
  misc_feature: MA Experiment 20001558 PARAMETER Experiment Name: At_Drought_Soil_Dry_P Parameter: Post Timepoint (hr) Value: 6
  misc_feature: MA Experiment 20001558 PARAMETER Experiment Name: At_Drought_Soil_Dry_P Parameter: Post-Treatment Value: Re-Water vs. No Drought
  misc_feature: MA Experiment 20001558 PARAMETER Experiment Name: At_Drought_Soil_Dry_P Parameter: Timepoint (day) Value: 13
  misc_feature: MA Experiment 20001558 PARAMETER Experiment Name: At_Drought_Soil_Dry_P Parameter: Treatment Value: Drought vs. No Drought
  misc_feature: MA Experiment ID: 20001911 Result: Down-regulated in Transcription
  misc_feature: MA Experiment 20001911 PARAMETER Experiment Name: At_Drought_Reproduction_P Parameter: Age (day) Value: 40
  misc_feature: MA Experiment 20001911 PARAMETER Experiment Name: At_Drought_Reproduction_P Parameter: Organism Value: A. thaliana
  misc_feature: MA Experiment 20001911 PARAMETER Experiment Name: At_Drought_Reproduction_P Parameter: Plant Line Value: WS
  misc_feature: MA Experiment 20001911 PARAMETER Experiment Name: At_Drought_Reproduction_P Parameter: Timepoint (day) Value: 10
  misc_feature: MA Experiment 20001911 PARAMETER Experiment Name: At_Drought_Reproduction_P Parameter: Tissue Value: Flowers
  misc_feature: MA Experiment 20001911 PARAMETER Experiment Name: At_Drought_Reproduction_P Parameter: Treatment Value: Drought vs. No Drought
acaaaacccattttaatggcggacgttagaaaccctacaaaaaatcatcatggtcatcatcatcttcatgctctcttgatcccatatccatttcaagggcatgtaaacccatttgtacacttagccatcaagctcgcgtcacaggggatcaccgtcactttcgtcaacactcattacatccaccaccagatcacaaacggctccgatggagatattttcgctggagttaggtcagagtctggccttgacataaggtacgcgacggtttccgatggtttaccggtcggatttgaccggtcgttgaaccatgacacgtaccaatcgtcgctgttgcacgtgttctatgcgcatgtggaagagcttgtggcgagtcttgttggaggagacgacggtgtgaatgtgatgatcgccgacacattctttgtttggccgtctgtggtggctaggaagtttggtttggtttgtgtctcgttttggaccgaagctgctttagtattttcactttattaccatatggatctgcttcggattcatggccattttggtgctcaagaaacccgcggcgatctaatcgactacattcccggagtcgccgcaattaacccaaaagacacggcgtcgtatcttcaagaaaccgacacgtcatcagtagttcatcaaatcatcttcaaagcattcgaagacgtgaaaaaagtcgattttgtactctgcaacacaattcagcaattcgaagacaaaacaatcaaagccctaaacacaaaaatcccattttacgcaatcggaccaatcataccattcaataaccaaaccggttcagtcacaacctcactctggtctgaatcagattgtacacaatggctcaacactaaaccaaaaagctccgtactttatatctcctttggtagttacgctcatgtcacaaagaaggatcttgttgagatagctcacgggattttgttgagtaaagttaatttcgtttgggtggtgagaccagacattgttagttcagacgaaaccaatccattaccagaagggtttgaaacagaagctggagatcgtgggattgtaataccatggtgttgtcaaatgacggttttgtcacatgagagtgttggtgggtttttgacacattgtggttggaactcgatattggagacgatttggtgtgaggttcctgtgttgtgttttccattgttgactgatcaggttacgaataggaagcttgtggttgatgattgggagattgggattaatctttgtgaagataagagtgattttggtagagatgaagttgggaggaatattaaccgtttgatgtgtggtgtttcgaaagagaagatcggacgggttaaaatgagtttggaaggtgcggtgagaaacagtggatcttcttcggagatgaatttaggtttgtttattgatggacttttgtctaaggttggtttatctaatgggaaagcttaaattctatgaaaactaaaaaaaaaaaaaatgtatgaatttttgtcaaattttttatttggggatgtctcttaaatttaaatttacttttttcttt

SEQ ID NO: 29314 - protein, 487 aa, Arabidopsis thaliana
  peptide (1)..(487): Ceres Seq. ID no. 12321967
  misc_feature (23)..(441): Homolog of NCBI NO: 19911203 NR Description: glucosyltransferase-10 [Vigna angularis]
  misc_feature (23)..(478): Homolog of NCBI NO: 15218268 NR Description: UDP-glucose glucosyltransferase, putative
  misc_feature (17)..(477): Homolog of NCBI NO: 15219876 NR Description: UDP-glucose glucosyltransferase, putative
  misc_feature (23)..(477): Homolog of NCBI NO: 25286821 NR Description: T16E15.2 protein - Arabidopsis thaliana
  misc_feature (17)..(484): Homolog of NCBI NO: 15219867 NR Description: UDP-glucose glucosyltransferase, putative
  misc_feature (23)..(78): Homolog of NCBI NO: 37534766 NR Description: putative putative glucosyltransferase
  misc_feature (80)..(486): Homolog of NCBI NO: 37534766 NR Description: putative putative glucosyltransferase
  misc_feature (23)..(480): Homolog of NCBI NO: 15228063 NR Description: putative glucosyltransferase
  misc_feature (6)..(487): Homolog of NCBI NO: 15226332 NR Description: putative glucosyltransferase
  misc_feature (6)..(487): Homolog of NCBI NO: 21537408 NR Description: putative glucosyltransferase [Arabidopsis
TKPILMADVRNPTKNHHGHHHLHALLIPYPFQGHVNPFVHLAIKLASQGITVTFVNTHYIHHQITNGSDGDIFAGVRSESGLDIRYATVSDGLPVGFDRSLNHDTYQSSLLHVFYAHVEELVASLVGGDDGVNVMIADTFFVWPSVVARKFGLVCVSFWTEAALVFSLYYHMDLLRIHGHFGAQETRGDLIDYIPGVAAINPKDTASYLQETDTSSVVHQIIFKAFEDVKKVDFVLCNTIQQFEDKTIKALNTKIPFYAIGPIIPFNNQTGSVTTSLWSESDCTQWLNTKPKSSVLYISFGSYAHVTKKDLVEIAHGILLSKVNFVWVVRPDIVSSDETNPLPEGFETEAGDRGIVIPWCCQMTVLSHESVGGFLTHCGWNSILETIWCEVPVLCFPLLTDQVTNRKLVVDDWEIGINLCEDKSDFGRDEVGRNINRLMCGVSKEKIGRVKMSLEGAVRNSGSSSEMNLGLFIDGLLSKVGLSNGKA

SEQ ID NO: 29315 - protein, 482 aa, Arabidopsis thaliana
  peptide (1)..(482): Ceres Seq. ID no. 12321968
  misc_feature (18)..(436): Homolog of NCBI NO: 19911203 NR Description: glucosyltransferase-10 [Vigna angularis]
  misc_feature (18)..(473): Homolog of NCBI NO: 15218268 NR Description: UDP-glucose glucosyltransferase, putative
  misc_feature (12)..(472): Homolog of NCBI NO: 15219876 NR Description: UDP-glucose glucosyltransferase, putative
  misc_feature (18)..(472): Homolog of NCBI NO: 25286821 NR Description: T16E15.2 protein - Arabidopsis thaliana
  misc_feature (12)..(479): Homolog of NCBI NO: 15219867 NR Description: UDP-glucose glucosyltransferase, putative
  misc_feature (18)..(73): Homolog of NCBI NO: 37534766 NR Description: putative putative glucosyltransferase
  misc_feature (75)..(481): Homolog of NCBI NO: 37534766 NR Description: putative putative glucosyltransferase
  misc_feature (18)..(475): Homolog of NCBI NO: 15228063 NR Description: putative glucosyltransferase
  misc_feature (1)..(482): Homolog of NCBI NO: 15226332 NR Description: putative glucosyltransferase
  misc_feature (1)..(482): Homolog of NCBI NO: 21537408 NR Description: putative glucosyltransferase [Arabidopsis
MADVRNPTKNHHGHHHLHALLIPYPFQGHVNPFVHLAIKLASQGITVTFVNTHYIHHQITNGSDGDIFAGVRSESGLDIRYATVSDGLPVGFDRSLNHDTYQSSLLHVFYAHVEELVASLVGGDDGVNVMIADTFFVWPSVVARKFGLVCVSFWTEAALVFSLYYHMDLLRIHGHFGAQETRGDLIDYIPGVAAINPKDTASYLQETDTSSVVHQIIFKAFEDVKKVDFVLCNTIQQFEDKTIKALNTKIPFYAIGPIIPFNNQTGSVTTSLWSESDCTQWLNTKPKSSVLYISFGSYAHVTKKDLVEIAHGILLSKVNFVWVVRPDIVSSDETNPLPEGFETEAGDRGIVIPWCCQMTVLSHESVGGFLTHCGWNSILETIWCEVPVLCFPLLTDQVTNRKLVVDDWEIGINLCEDKSDFGRDEVGRNINRLMCGVSKEKIGRVKMSLEGAVRNSGSSSEMNLGLFIDGLLSKVGLSNGKA

SEQ ID NO: 29316 - protein, 353 aa, Arabidopsis thaliana
  peptide (1)..(353): Ceres Seq. ID no. 12321969
  misc_feature (1)..(343): Homolog of NCBI NO: 15219870 NR Description: UDP-glucose glucosyltransferase
  misc_feature (1)..(307): Homolog of NCBI NO: 19911203 NR Description: glucosyltransferase-10 [Vigna angularis]
  misc_feature (1)..(344): Homolog of NCBI NO: 15218268 NR Description: UDP-glucose glucosyltransferase, putative
  misc_feature (1)..(343): Homolog of NCBI NO: 15219876 NR Description: UDP-glucose glucosyltransferase, putative
  misc_feature (1)..(343): Homolog of NCBI NO: 25286821 NR Description: T16E15.2 protein - Arabidopsis thaliana
  misc_feature (1)..(350): Homolog of NCBI NO: 15219867 NR Description: UDP-glucose glucosyltransferase, putative
  misc_feature (1)..(352): Homolog of NCBI NO: 37534766 NR Description: putative putative glucosyltransferase
  misc_feature (1)..(346): Homolog of NCBI NO: 15228063 NR Description: putative glucosyltransferase
  misc_feature (1)..(353): Homolog of NCBI NO: 15226332 NR Description: putative glucosyltransferase
  misc_feature (1)..(353): Homolog of NCBI NO: 21537408 NR Description: putative glucosyltransferase [Arabidopsis
MIADTFFVWPSVVARKFGLVCVSFWTEAALVFSLYYHMDLLRIHGHFGAQETRGDLIDYIPGVAAINPKDTASYLQETDTSSVVHQIIFKAFEDVKKVDFVLCNTIQQFEDKTIKALNTKIPFYAIGPIIPFNNQTGSVTTSLWSESDCTQWLNTKPKSSVLYISFGSYAHVTKKDLVEIAHGILLSKVNFVWVVRPDIVSSDETNPLPEGFETEAGDRGIVIPWCCQMTVLSHESVGGFLTHCGWNSILETIWCEVPVLCFPLLTDQVTNRKLVVDDWEIGINLCEDKSDFGRDEVGRNINRLMCGVSKEKIGRVKMSLEGAVRNSGSSSEMNLGLFIDGLLSKVGLSNGKA

SEQ ID NO: 29317 - DNA, 1190 bp, Arabidopsis thaliana
  misc_feature (1)..(1190): Ceres Seq. ID no. 12562676
  misc_feature: MA Experiment ID: 108434 Result: Up-regulated in Transcription
  misc_feature: MA Experiment 108434 PARAMETER Experiment Name: At_Root_Tips_cDNA_P Parameter: Tissue Value: Root Tips
  misc_feature: MA Experiment ID: 108435 Result: Up-regulated in Transcription
  misc_feature: MA Experiment 108435 PARAMETER Experiment Name: At_stm_Mutants_cDNA_P Parameter: Plant Line Value: wt Landsburg vs stm
  misc_feature: MA Experiment 108435 PARAMETER Experiment Name: At_stm_Mutants_cDNA_P Parameter: Tissue Value: Shoot Apical Meristem Region
  misc_feature: MA Experiment ID: 108461 Result: Down-regulated in Transcription
  misc_feature: MA Experiment 108461 PARAMETER Experiment Name: At_Germinating_Seeds_cDNA_P Parameter: Age (day) Value: 1 vs. 0
  misc_feature: MA Experiment 108461 PARAMETER Experiment Name: At_Germinating_Seeds_cDNA_P Parameter: Tissue Value: Germinating Seeds
  misc_feature: MA Experiment ID: 108462 Result: Down-regulated in Transcription
  misc_feature: MA Experiment 108462 PARAMETER Experiment Name: At_Germinating_Seeds_cDNA_P Parameter: Age (day) Value: 2 vs. 0
  misc_feature: MA Experiment 108462 PARAMETER Experiment Name: At_Germinating_Seeds_cDNA_P Parameter: Tissue Value: Germinating Seeds
  misc_feature: MA Experiment ID: 108463 Result: Down-regulated in Transcription
  misc_feature: MA Experiment 108463 PARAMETER Experiment Name: At_Germinating_Seeds_cDNA_P Parameter: Age (day) Value: 3 vs. 0
  misc_feature: MA Experiment 108463 PARAMETER Experiment Name: At_Germinating_Seeds_cDNA_P Parameter: Tissue Value: Germinating Seeds
  misc_feature: MA Experiment ID: 108464 Result: Down-regulated in Transcription
  misc_feature: MA Experiment 108464 PARAMETER Experiment Name: At_Germinating_Seeds_cDNA_P Parameter: Age (day) Value: 4 vs. 0
  misc_feature: MA Experiment 108464 PARAMETER Experiment Name: At_Germinating_Seeds_cDNA_P Parameter: Tissue Value: Germinating Seeds
  misc_feature: MA Experiment ID: 20000180 Result: Down-regulated in Transcription
  misc_feature: MA Experiment 20000180 PARAMETER Experiment Name: At_Germinating_Seeds_P Parameter: Age (hr) Value: 24 vs. 0
  misc_feature: MA Experiment 20000180 PARAMETER Experiment Name: At_Germinating_Seeds_P Parameter: Tissue Value: Germinating Seeds
  misc_feature: MA Experiment ID: 20000214 Result: Down-regulated in Transcription
  misc_feature: MA Experiment 20000214 PARAMETER Experiment Name: At_4deg_Cold_P Parameter: Timepoint (hr) Value: 6
  misc_feature: MA Experiment ID: 20000224 Result: Down-regulated in Transcription
  misc_feature: MA Experiment ID: 20000307 Result: Down-regulated in Transcription
  misc_feature: MA Experiment 20000307 PARAMETER Experiment Name: At_Germinating_Seeds_Sub_P Parameter: Age (hr) Value: 24 vs. 0
  misc_feature: MA Experiment 20000307 PARAMETER Experiment Name: At_Germinating_Seeds_Sub_P Parameter: Organism Value: A. thaliana
  misc_feature: MA Experiment 20000307 PARAMETER Experiment Name: At_Germinating_Seeds_Sub_P Parameter: Plant Line Value: WS
  misc_feature: MA Experiment 20000307 PARAMETER Experiment Name: At_Germinating_Seeds_Sub_P Parameter: Tissue Value: Germinating Seeds
  misc_feature: MA Experiment ID: 20000328 Result: Up-regulated in Transcription
  misc_feature: MA Experiment 20000328 PARAMETER Experiment Name: At_42deg_Heat_Sub_P Parameter: Age (day) Value: 14
  misc_feature: MA Experiment 20000328 PARAMETER Experiment Name: At_42deg_Heat_Sub_P Parameter: Organism Value: A. thaliana
  misc_feature: MA Experiment 20000328 PARAMETER Experiment Name: At_42deg_Heat_Sub_P Parameter: Plant Line Value: WS
  misc_feature: MA Experiment 20000328 PARAMETER Experiment Name: At_42deg_Heat_Sub_P Parameter: Temperature (deg C) Value: 42 vs. 22
  misc_feature: MA Experiment 20000328 PARAMETER Experiment Name: At_42deg_Heat_Sub_P Parameter: Timepoint (hr) Value: 6
  misc_feature: MA Experiment 20000328 PARAMETER Experiment Name: At_42deg_Heat_Sub_P Parameter: Tissue Value: Aerial
  misc_feature: MA Experiment ID: 20001450 Result: Up-regulated in Transcription
  misc_feature: MA Experiment 20001450 PARAMETER Experiment Name: At_Far-red-induction_P Parameter: Age (day) Value: 7
  misc_feature: MA Experiment 20001450 PARAMETER Experiment Name: At_Far-red-induction_P Parameter: Light Value: Far-red vs. White
  misc_feature: MA Experiment 20001450 PARAMETER Experiment Name: At_Far-red-induction_P Parameter: Organism Value: A. thaliana
  misc_feature: MA Experiment 20001450 PARAMETER Experiment Name: At_Far-red-induction_P Parameter: Plant Line Value: Columbia
  misc_feature: MA Experiment 20001450 PARAMETER Experiment Name: At_Far-red-induction_P Parameter: Timepoint (hr) Value: 8
  misc_feature: MA Experiment 20001450 PARAMETER Experiment Name: At_Far-red-induction_P Parameter: Tissue Value: Whole Plant
  misc_feature: MA Experiment ID: 20001451 Result: Up-regulated in Transcription
  misc_feature: MA Experiment 20001451 PARAMETER Experiment Name: At_Far-red-induction_P Parameter: Age (day) Value: 7
  misc_feature: MA Experiment 20001451 PARAMETER Experiment Name: At_Far-red-induction_P Parameter: Light Value: Far-red vs. White
  misc_feature: MA Experiment 20001451 PARAMETER Experiment Name: At_Far-red-induction_P Parameter: Organism Value: A. thaliana
  misc_feature: MA Experiment 20001451 PARAMETER Experiment Name: At_Far-red-induction_P Parameter: Plant Line Value: Columbia
  misc_feature: MA Experiment 20001451 PARAMETER Experiment Name: At_Far-red-induction_P Parameter: Timepoint (hr) Value: 24
  misc_feature: MA Experiment 20001451 PARAMETER Experiment Name: At_Far-red-induction_P Parameter: Tissue Value: Whole Plant
aactaaattcccaaattgcggaggctgagagatctcaaatcgacgaccaacaggaagaatgagcagtcgttcgagtagaaccgtgtacgtcggaaaccttcctggcgatatccgtgagagagaggtcgaagatttgttcagtaagtatggacctgttgttcaaattgatttgaaggttcctccaaggcctcctggttatgcattcgttgagtttgatgatgctcgggatgctgaagatgctattcatggtcgtgatggctatgactttgatgggcatcgtttgagggtggaattggcgcatggtgggaggcgttcatcagatgatactcggggtagtttcaatggtggtggccgtggtggtggtcgcggccgtggtgatggccgtggtgatggtggtagtcgtgggccatctaggagatcagagtttcgtgttctagtcacaggcttgccttcatctgcttcttggcaagatctcaaggatcacatgcgtaaaggaggcgatgtctgtttctcgcaagtgtaccgtgatgctagagggacaactggagttgttgattacacctgctatgaggacatgaagtatgcgctgaaaaagctcgacgacacagagtttcgaaatgcgttttcgaatggatatgtccgggttagagaatatgattcaaggaaggattctaggagtcctagccggggaagatcctattctaagagccgcagccgcagccgtggacgaagcgtgagccgaagcaggagcagaagcaggagcaggagcagaagtcccaaggcaaagtcttcacgtaggtcccctgcaaaatctacatcaagatctcctggcccccgctcgaagtcaaggtcaccgtctccaagaagatcgcgttcaagatcaagatctcctctaccttctgttcagaaggaaggaagcaagagccctagcaagccaagtccagccaagagtcctatccacactaggagtccatcgaggtaaaatgggagatatccaggtgaaaagagaagagagaagcatcttcttgctactcaaaacaaattctactttcttgaagtggattatatctgaacgcttattgactgtagaagatgcgacaagtttgatttgcactatcattttgtaatattcttgccattcttcgtcttctggatccctttacttttgagaatgatgtttttttttgaag

SEQ ID NO: 29318 - protein, 307 aa, Arabidopsis thaliana
  peptide (1)..(307): Ceres Seq. ID no. 12562677
  misc_feature (9)..(77): Pfam Name: RNA recognition motif. (a.k.a. RRM, RBD, or RNP domain) Pfam Description: RNA recognition motif. (a.k.a. RRM, RBD, or RNP
  misc_feature (1)..(276): Homolog of NCBI NO: 22331714 NR Description: arginine/serine-rich splicing factor (atSRp34),
  misc_feature (1)..(307): Homolog of NCBI NO: 33146854 NR Description: putative pre-mRNA splicing factor SF2
  misc_feature (1)..(211): Homolog of NCBI NO: 5815238 NR Description: splicing factor SR1D [Arabidopsis thaliana]
  misc_feature (1)..(270): Homolog of NCBI NO: 2443473 NR Description: ASF/SF2 homolog [Arabidopsis thaliana]
  misc_feature (1)..(270): Homolog of NCBI NO: 5815239 NR Description: splicing factor SR1E [Arabidopsis thaliana]
  misc_feature (1)..(270): Homolog of NCBI NO: 5815237 NR Description: splicing factor SR1C [Arabidopsis thaliana]
  misc_feature (1)..(270): Homolog of NCBI NO: 5815236 NR Description: splicing factor SR1B [Arabidopsis thaliana]
  misc_feature (1)..(307): Homolog of NCBI NO: 2129717 NR Description: splicing factor SF-2 homolog - Arabidopsis
  misc_feature (1)..(307): Homolog of NCBI NO: 30678391 NR Description: pre-mRNA splicing factor SF2 (SR1 protein)
  misc_feature (1)..(307): Homolog of NCBI NO: 5815235 NR Description: splicing factor SR1 [Arabidopsis thaliana]
MSSRSSRTVYVGNLPGDIREREVEDLFSKYGPVVQIDLKVPPRPPGYAFVEFDDARDAEDAIHGRDGYDFDGHRLRVELAHGGRRSSDDTRGSFNGGGRGGGRGRGDGRGDGGSRGPSRRSEFRVLVTGLPSSASWQDLKDHMRKGGDVCFSQVYRDARGTTGVVDYTCYEDMKYALKKLDDTEFRNAFSNGYVRVREYDSRKDSRSPSRGRSYSKSRSRSRGRSVSRSRSRSRSRSRSPKAKSSRRSPAKSTSRSPGPRSKSRSPSPRRSRSRSRSPLPSVQKEGSKSPSKPSPAKSPIHTRSPSR

SEQ ID NO: 29319 - protein, 165 aa, Arabidopsis thaliana
  peptide (1)..(165): Ceres Seq. ID no. 12562678
  misc_feature (1)..(134): Homolog of NCBI NO: 22331714 NR Description: arginine/serine-rich splicing factor (atSRp34),
  misc_feature (1)..(165): Homolog of NCBI NO: 33146854 NR Description: putative pre-mRNA splicing factor SF2
  misc_feature (1)..(69): Homolog of NCBI NO: 5815238 NR Description: splicing factor SR1D [Arabidopsis thaliana]
  misc_feature (1)..(128): Homolog of NCBI NO: 2443473 NR Description: ASF/SF2 homolog [Arabidopsis thaliana]
  misc_feature (1)..(128): Homolog of NCBI NO: 5815237 NR Description: splicing factor SR1C [Arabidopsis thaliana]
  misc_feature (1)..(128): Homolog of NCBI NO: 5815239 NR Description: splicing factor SR1E [Arabidopsis thaliana]
  misc_feature (1)..(128): Homolog of NCBI NO: 5815236 NR Description: splicing factor SR1B [Arabidopsis thaliana]
  misc_feature (1)..(165): Homolog of NCBI NO: 2129717 NR Description: splicing factor SF-2 homolog - Arabidopsis
  misc_feature (1)..(165): Homolog of NCBI NO: 30678391 NR Description: pre-mRNA splicing factor SF2 (SR1 protein)
  misc_feature (1)..(165): Homolog of NCBI NO: 5815235 NR Description: splicing factor SR1 [Arabidopsis thaliana]
MRKGGDVCFSQVYRDARGTTGVVDYTCYEDMKYALKKLDDTEFRNAFSNGYVRVREYDSRKDSRSPSRGRSYSKSRSRSRGRSVSRSRSRSRSRSRSPKAKSSRRSPAKSTSRSPGPRSKSRSPSPRRSRSRSRSPLPSVQKEGSKSPSKPSPAKSPIHTRSPSR

SEQ ID NO: 29320 - DNA, 1302 bp, Arabidopsis thaliana
  misc_feature (1)..(1302): Ceres Seq. ID no. 13622021
  misc_feature: MA Experiment ID: 20000180 Result: Up-regulated in Transcription
  misc_feature: MA Experiment 20000180 PARAMETER Experiment Name: At_Germinating_Seeds_P Parameter: Age (hr) Value: 24 vs. 0
  misc_feature: MA Experiment 20000180 PARAMETER Experiment Name: At_Germinating_Seeds_P Parameter: Tissue Value: Germinating Seeds
  misc_feature: MA Experiment ID: 20000182 Result: Up-regulated in Transcription
  misc_feature: MA Experiment 20000182 PARAMETER Experiment Name: At_2mM_SA_P Parameter: Age (day) Value: 14
  misc_feature: MA Experiment 20000182 PARAMETER Experiment Name: At_2mM_SA_P Parameter: Organism Value: A. thaliana
  misc_feature: MA Experiment 20000182 PARAMETER Experiment Name: At_2mM_SA_P Parameter: Plant Line Value: WS
  misc_feature: MA Experiment 20000182 PARAMETER Experiment Name: At_2mM_SA_P Parameter: Timepoint (hr) Value: 6
  misc_feature: MA Experiment 20000182 PARAMETER Experiment Name: At_2mM_SA_P Parameter: Tissue Value: Aerial
  misc_feature: MA Experiment 20000182 PARAMETER Experiment Name: At_2mM_SA_P Parameter: Treatment Value: 2mM SA vs. No Treatment
  misc_feature: MA Experiment ID: 20000227 Result: Up-regulated in Transcription
  misc_feature: MA Experiment 20000227 PARAMETER Experiment Name: At_Root-Tips-vs-Tops_P Parameter: Tissue Value: Root Tips vs. Root Tops
  misc_feature: MA Experiment ID: 20000234 Result: Up-regulated in Transcription
  misc_feature: MA Experiment 20000234 PARAMETER Experiment Name: At_Siliques_P Parameter: Age (day) Value: 21
  misc_feature: MA Experiment 20000234 PARAMETER Experiment Name: At_Siliques_P Parameter: Organism Value: A. thaliana
  misc_feature: MA Experiment 20000234 PARAMETER Experiment Name: At_Siliques_P Parameter: Plant Line Value: WS
  misc_feature: MA Experiment 20000234 PARAMETER Experiment Name: At_Siliques_P Parameter: Tissue Value: Less Than 5mm Siliques vs. Whole Plant
  misc_feature: MA Experiment ID: 20000495 Result: Up-regulated in Transcription
  misc_feature: MA Experiment 20000495 PARAMETER Experiment Name: At_Guard_Cells_P Parameter: Harvest Date Value: 8/2/2002
  misc_feature: MA Experiment 20000495 PARAMETER Experiment Name: At_Guard_Cells_P Parameter: Organism Value: A. thaliana
  misc_feature: MA Experiment 20000495 PARAMETER Experiment Name: At_Guard_Cells_P Parameter: Tissue Value: Guard Cells vs. Leaves
ttggagagaagaacgttttaataaacagagagcagagcacttgttctaaagatcaaagcttaagtgagaagcagaaaaaaaaatggcgaaatctcagatctggtttggttttgcgttactcgcgttgcttctggtttcagccgtagctgacgatgtggttgttttgactgacgatagcttcgaaaaggaagttggtaaagataaaggagctctcgtcgagttttacgctccctggtgtggtcactgcaagaaacttgctccagagtatgaaaagctaggggcaagcttcaagaaggctaagtctgtgttgattgcaaaggttgattgtgatgagcaaaagagtgtctgtactaaatatggtgttagtggatacccaaccattcagtggtttcctaaaggatctcttgaacctcaaaagtatgagggtccacgcaatgctgaagctttggctgaatacgtgaacaaggaaggaggcaccaacgtaaaattagctgcagttccacaaaacgtggttgttttgacacctgacaatttcgatgagattgttctggatcaaaacaaagatgtcctagtcgaattttatgcaccatggtgtggccactgcaaatcactcgctcccacatacgaaaaggtagccacagtgtttaaacaggaagaaggtgtagtcatcgccaatttggatgctgatgcacacaaagcccttggcgagaaatatggagtgagtggattcccaacattgaaattcttcccaaaggacaacaaagctggtcacgattatgacggtggcagggatttagatgactttgtaagcttcatcaacgagaaatctgggaccagcagggacagtaaagggcagcttacttcaaaggctggtatagtcgaaagcttagatgctttggtaaaagagttagttgcagctagtgaagatgagaagaaggcagtgttgtctcgcatagaagaggaagcaagtacccttaagggctccaccacgaggtatggaaagctttacttgaaactcgcaaagagctacatagaaaaaggttcagactatgctagcaaagaaacggagaggcttggacgggtgcttgggaagtcgataagtccagtgaaagctgatgaactcactctcaagagaaatatcctaaccacgttcgttgcttcttcttaaaagtcatatagcttgaagctaagagaataggagtcgagagagtttataactgatactgttttgagattttatgtttgtcaagatcaagaacgtctgtggttatttctggttagttctgaaactcttttgaaccc

SEQ ID NO: 29321 - protein, 361 aa, Arabidopsis thaliana
  peptide (1)..(361): Ceres Seq. ID no. 13622022
  misc_feature (17)..(358): Homolog of NCBI NO: 2501210 NR Description: PUTATIVE DISULFIDE ISOMERASE TIGA PRECURSOR
  misc_feature (10)..(358): Homolog of NCBI NO: 19114496 NR Description: putative protein disulfide isomerase (EC 5.3.4.1)
  misc_feature (165)..(361): Homolog of NCBI NO: 10180029 NR Description: putative protein disulfide-isomerase [Prunus
  misc_feature (13)..(357): Homolog of NCBI NO: 2627440 NR Description: protein disulfide isomerase; PDI; P5-like
  misc_feature (13)..(357): Homolog of NCBI NO: 28829383 NR Description: similar to Dictyostelium discoideum (Slime mold).
  misc_feature (14)..(357): Homolog of NCBI NO: 34897646 NR Description: putative disulfide-isomerase precursor [Oryza
  misc_feature (10)..(357): Homolog of NCBI NO: 34894982 NR Description: putative protein disulfide isomerase
  misc_feature (1)..(357): Homolog of NCBI NO: 7489183 NR Description: probable protein disulfide-isomerase (EC 5.3.4.1)
  misc_feature (1)..(357): Homolog of NCBI NO: 729442 NR Description: PROBABLE PROTEIN DISULFIDE ISOMERASE P5 PRECURSOR
  misc_feature (1)..(361): Homolog of NCBI NO: 15226610 NR Description: protein disulfide isomerase family [Arabidopsis
MAKSQIWFGFALLALLLVSAVADDVVVLTDDSFEKEVGKDKGALVEFYAPWCGHCKKLAPEYEKLGASFKKAKSVLIAKVDCDEQKSVCTKYGVSGYPTIQWFPKGSLEPQKYEGPRNAEALAEYVNKEGGTNVKLAAVPQNVVVLTPDNFDEIVLDQNKDVLVEFYAPWCGHCKSLAPTYEKVATVFKQEEGVVIANLDADAHKALGEKYGVSGFPTLKFFPKDNKAGHDYDGGRDLDDFVSFINEKSGTSRDSKGQLTSKAGIVESLDALVKELVAASEDEKKAVLSRIEEEASTLKGSTTRYGKLYLKLAKSYIEKGSDYASKETERLGRVLGKSISPVKADELTLKRNILTTFVASS

SEQ ID NO: 29322 - DNA, 1522 bp, Arabidopsis thaliana
  misc_feature (1)..(1522): Ceres Seq. ID no. 13621932
  misc_feature: MA Experiment ID: 108434 Result: Up-regulated in Transcription
  misc_feature: MA Experiment 108434 PARAMETER Experiment Name: At_Root_Tips_cDNA_P Parameter: Tissue Value: Root Tips
  misc_feature: MA Experiment ID: 108461 Result: Up-regulated in Transcription
  misc_feature: MA Experiment 108461 PARAMETER Experiment Name: At_Germinating_Seeds_cDNA_P Parameter: Age (day) Value: 1 vs. 0
  misc_feature: MA Experiment 108461 PARAMETER Experiment Name: At_Germinating_Seeds_cDNA_P Parameter: Tissue Value: Germinating Seeds
  misc_feature: MA Experiment ID: 108462 Result: Up-regulated in Transcription
  misc_feature: MA Experiment 108462 PARAMETER Experiment Name: At_Germinating_Seeds_cDNA_P Parameter: Age (day) Value: 2 vs. 0
  misc_feature: MA Experiment 108462 PARAMETER Experiment Name: At_Germinating_Seeds_cDNA_P Parameter: Tissue Value: Germinating Seeds
  misc_feature: MA Experiment ID: 108473 Result: Down-regulated in Transcription
  misc_feature: MA Experiment 108473 PARAMETER Experiment Name: At_Drought_Flowers_cDNA_P Parameter: Timepoint (hr) Value: 7 d
  misc_feature: MA Experiment 108473 PARAMETER Experiment Name: At_Drought_Flowers_cDNA_P Parameter: Tissue Value: Flower
  misc_feature: MA Experiment 108473 PARAMETER Experiment Name: At_Drought_Flowers_cDNA_P Parameter: Treatment Value: Drought vs. No Drought
  misc_feature: MA Experiment ID: 108489 Result: Down-regulated in Transcription
  misc_feature: MA Experiment ID: 108561 Result: Down-regulated in Transcription
  misc_feature: MA Experiment 108561 PARAMETER Experiment Name: At_100uM_ABA_cDNA_P Parameter: Timepoint (hr) Value: 6
  misc_feature: MA Experiment 108561 PARAMETER Experiment Name: At_100uM_ABA_cDNA_P Parameter: Tissue Value: Aerial
  misc_feature: MA Experiment 108561 PARAMETER Experiment Name: At_100uM_ABA_cDNA_P Parameter: Treatment Value: 100uM ABA vs. No Treatment
  misc_feature: MA Experiment ID: 108569 Result: Up-regulated in Transcription
  misc_feature: MA Experiment 108569 PARAMETER Experiment Name: At_0.001%_MeJA__cDNA_P Parameter: Timepoint (hr) Value: 6
  misc_feature: MA Experiment 108569 PARAMETER Experiment Name: At_0.001%_MeJA__cDNA_P Parameter: Tissue Value: Aerial
  misc_feature: MA Experiment 108569 PARAMETER Experiment Name: At_0.001%_MeJA__cDNA_P Parameter: Treatment Value: 0.001% MeJA vs. No Treatment
  misc_feature: MA Experiment ID: 108573 Result: Down-regulated in Transcription
  misc_feature: MA Experiment 108573 PARAMETER Experiment Name: At_Drought_cDNA_P Parameter: Timepoint (hr) Value: 6
  misc_feature: MA Experiment 108573 PARAMETER Experiment Name: At_Drought_cDNA_P Parameter: Tissue Value: Aerial
  misc_feature: MA Experiment 108573 PARAMETER Experiment Name: At_Drought_cDNA_P Parameter: Treatment Value: Drought vs. No Drought
  misc_feature: MA Experiment ID: 108574 Result: Up-regulated in Transcription
  misc_feature: MA Experiment 108574 PARAMETER Experiment Name: At_Wounding__cDNA_P Parameter: Timepoint (hr) Value: 1
  misc_feature: MA Experiment 108574 PARAMETER Experiment Name: At_Wounding__cDNA_P Parameter: Tissue Value: Aerial
  misc_feature: MA Experiment 108574 PARAMETER Experiment Name: At_Wounding__cDNA_P Parameter: Treatment Value: Wounding vs. No Wounding
  misc_feature: MA Experiment ID: 108576 Result: Down-regulated in Transcription
  misc_feature: MA Experiment 108576 PARAMETER Experiment Name: At_42deg_Heat_cDNA_P Parameter: Temperature (deg C) Value: 42 vs. 22
  misc_feature: MA Experiment 108576 PARAMETER Experiment Name: At_42deg_Heat_cDNA_P Parameter: Timepoint (hr) Value: 1
  misc_feature: MA Experiment 108576 PARAMETER Experiment Name: At_42deg_Heat_cDNA_P Parameter: Tissue Value: Aerial
  misc_feature: MA Experiment ID: 108579 Result: Up-regulated in Transcription
  misc_feature: MA Experiment 108579 PARAMETER Experiment Name: At_4deg_Cold_cDNA_P Parameter: Temperature (deg C) Value: 4 vs. 22
  misc_feature: MA Experiment 108579 PARAMETER Experiment Name: At_4deg_Cold_cDNA_P Parameter: Timepoint (hr) Value: 6
  misc_feature: MA Experiment 108579 PARAMETER Experiment Name: At_4deg_Cold_cDNA_P Parameter: Tissue Value: Aerial
  misc_feature: MA Experiment ID: 108585 Result: Down-regulated in Transcription
  misc_feature: MA Experiment 108585 PARAMETER Experiment Name: At_5mM_NaNP_cDNA_P Parameter: Timepoint (hr) Value: 6
  misc_feature: MA Experiment 108585 PARAMETER Experiment Name: At_5mM_NaNP_cDNA_P Parameter: Tissue Value: Aerial
  misc_feature: MA Experiment 108585 PARAMETER Experiment Name: At_5mM_NaNP_cDNA_P Parameter: Treatment Value: null
  misc_feature: MA Experiment ID: 20000111 Result: Down-regulated in Transcription
  misc_feature: MA Experiment 20000111 PARAMETER Experiment Name: At_42deg_Heat_cDNA_P Parameter: Temperature (deg C) Value: 42 vs. 22
  misc_feature: MA Experiment 20000111 PARAMETER Experiment Name: At_42deg_Heat_cDNA_P Parameter: Timepoint (hr) Value: 6
  misc_feature: MA Experiment 20000111 PARAMETER Experiment Name: At_42deg_Heat_cDNA_P Parameter: Tissue Value: Aerial
  misc_feature: MA Experiment ID: 20000113 Result: Down-regulated in Transcription
  misc_feature: MA Experiment 20000113 PARAMETER Experiment Name: At_42deg_Heat_cDNA_P Parameter: Temperature (deg C) Value: 42 vs. 22
  misc_feature: MA Experiment 20000113 PARAMETER Experiment Name: At_42deg_Heat_cDNA_P Parameter: Timepoint (hr) Value: 8
  misc_feature: MA Experiment 20000113 PARAMETER Experiment Name: At_42deg_Heat_cDNA_P Parameter: Tissue Value: Aerial
  misc_feature: MA Experiment ID: 20000171 Result: Down-regulated in Transcription
  misc_feature: MA Experiment 20000171 PARAMETER Experiment Name: At_42deg_Heat_P Parameter: Age (day) Value: 14
  misc_feature: MA Experiment 20000171 PARAMETER Experiment Name: At_42deg_Heat_P Parameter: Organism Value: A. thaliana
  misc_feature: MA Experiment 20000171 PARAMETER Experiment Name: At_42deg_Heat_P Parameter: Plant Line Value: WS
  misc_feature: MA Experiment 20000171 PARAMETER Experiment Name: At_42deg_Heat_P Parameter: Temperature (deg C) Value: 42 vs. 22
  misc_feature: MA Experiment 20000171 PARAMETER Experiment Name: At_42deg_Heat_P Parameter: Timepoint (hr) Value: 1
  misc_feature: MA Experiment 20000171 PARAMETER Experiment Name: At_42deg_Heat_P Parameter: Tissue Value: Aerial
  misc_feature: MA Experiment ID: 20000173 Result: Down-regulated in Transcription
  misc_feature: MA Experiment 20000173 PARAMETER Experiment Name: At_42deg_Heat_P Parameter: Age (day) Value: 14
  misc_feature: MA Experiment 20000173 PARAMETER Experiment Name: At_42deg_Heat_P Parameter: Organism Value: A. thaliana
  misc_feature: MA Experiment 20000173 PARAMETER Experiment Name: At_42deg_Heat_P Parameter: Plant Line Value: WS
  misc_feature: MA Experiment 20000173 PARAMETER Experiment Name: At_42deg_Heat_P Parameter: Temperature (deg C) Value: 42 vs. 22
  misc_feature: MA Experiment 20000173 PARAMETER Experiment Name: At_42deg_Heat_P Parameter: Timepoint (hr) Value: 6
  misc_feature: MA Experiment 20000173 PARAMETER Experiment Name: At_42deg_Heat_P Parameter: Tissue Value: Aerial
  misc_feature: MA Experiment ID: 20000180 Result: Up-regulated in Transcription
  misc_feature: MA Experiment 20000180 PARAMETER Experiment Name: At_Germinating_Seeds_P Parameter: Age (hr) Value: 24 vs. 0
  misc_feature: MA Experiment 20000180 PARAMETER Experiment Name: At_Germinating_Seeds_P Parameter: Tissue Value: Germinating Seeds
  misc_feature: MA Experiment ID: 20000234 Result: Up-regulated in Transcription
  misc_feature: MA Experiment 20000234 PARAMETER Experiment Name: At_Siliques_P Parameter: Age (day) Value: 21
  misc_feature: MA Experiment 20000234 PARAMETER Experiment Name: At_Siliques_P Parameter: Organism Value: A. thaliana
  misc_feature: MA Experiment 20000234 PARAMETER Experiment Name: At_Siliques_P Parameter: Plant Line Value: WS
  misc_feature: MA Experiment 20000234 PARAMETER Experiment Name: At_Siliques_P Parameter: Tissue Value: Less Than 5mm Siliques vs. Whole Plant
  misc_feature: MA Experiment ID: 20000264 Result: Up-regulated in Transcription
  misc_feature: MA Experiment 20000264 PARAMETER Experiment Name: At_Open_Flower_P Parameter: Age (day) Value: 21
  misc_feature: MA Experiment 20000264 PARAMETER Experiment Name: At_Open_Flower_P Parameter: Plant Line Value: WS
  misc_feature: MA Experiment 20000264 PARAMETER Experiment Name: At_Open_Flower_P Parameter: Tissue Value: Open Flower vs. Whole Plant
  misc_feature: MA Experiment ID: 20000265 Result: Up-regulated in Transcription
  misc_feature: MA Experiment 20000265 PARAMETER Experiment Name: At_Open_Flower_P Parameter: Age (day) Value: 21
  misc_feature: MA Experiment 20000265 PARAMETER Experiment Name: At_Open_Flower_P Parameter: Plant Line Value: WS
  misc_feature: MA Experiment 20000265 PARAMETER Experiment Name: At_Open_Flower_P Parameter: Tissue Value: Closed Flower vs. Whole Plant
  misc_feature: MA Experiment ID: 20000286 Result: Up-regulated in Transcription
  misc_feature: MA Experiment 20000286 PARAMETER Experiment Name: At_Open_Flower_P Parameter: Age (day) Value: 21
  misc_feature: MA Experiment 20000286 PARAMETER Experiment Name: At_Open_Flower_P Parameter: Plant Line Value: WS
  misc_feature: MA Experiment 20000286 PARAMETER Experiment Name: At_Open_Flower_P Parameter: Tissue Value: Half Open vs. Whole Plant
  misc_feature: MA Experiment ID: 20000438 Result: Up-regulated in Transcription
  misc_feature: MA Experiment 20000438 PARAMETER Experiment Name: At_Shoots__P Parameter: Age (day) Value: 14
  misc_feature: MA Experiment 20000438 PARAMETER Experiment Name: At_Shoots__P Parameter: Tissue Value: Shoots vs. Whole Plant
  misc_feature: MA Experiment ID: 20000452 Result: Up-regulated in Transcription
  misc_feature: MA Experiment 20000452 PARAMETER Experiment Name: At_CS6879_Shoots-Roots_P Parameter: Age (day) Value: 14
  misc_feature: MA Experiment 20000452 PARAMETER Experiment Name: At_CS6879_Shoots-Roots_P Parameter: Organism Value: A. thaliana
  misc_feature: MA Experiment 20000452 PARAMETER Experiment Name: At_CS6879_Shoots-Roots_P Parameter: Plant Line Value: CS6879 vs. WS
  misc_feature: MA Experiment 20000452 PARAMETER Experiment Name: At_CS6879_Shoots-Roots_P Parameter: Tissue Value: Shoots
  misc_feature: MA Experiment ID: 20000573 Result: Down-regulated in Transcription
  misc_feature: MA Experiment 20000573 PARAMETER Experiment Name: At_100uM_ABA_Mutants__P Parameter: Organism Value: A. thaliana
  misc_feature: MA Experiment 20000573 PARAMETER Experiment Name: At_100uM_ABA_Mutants__P Parameter: Plant Line Value: CS22 vs. Ler wt
  misc_feature: MA Experiment 20000573 PARAMETER Experiment Name: At_100uM_ABA_Mutants__P Parameter: Timepoint (hr) Value: N/A
  misc_feature: MA Experiment 20000573 PARAMETER Experiment Name: At_100uM_ABA_Mutants__P Parameter: Tissue Value: Whole Plant
  misc_feature: MA Experiment 20000573 PARAMETER Experiment Name: At_100uM_ABA_Mutants__P Parameter: Treatment Value: None
  misc_feature: MA Experiment ID: 20000574 Result: Down-regulated in Transcription
  misc_feature: MA Experiment 20000574 PARAMETER Experiment Name: At_100uM_ABA_Mutants__P Parameter: Organism Value: A. thaliana
  misc_feature: MA Experiment 20000574 PARAMETER Experiment Name: At_100uM_ABA_Mutants__P Parameter: Plant Line Value: CS23 vs. Ler wt
  misc_feature: MA Experiment 20000574 PARAMETER Experiment Name: At_100uM_ABA_Mutants__P Parameter: Timepoint (hr) Value: N/A
  misc_feature: MA Experiment 20000574 PARAMETER Experiment Name: At_100uM_ABA_Mutants__P Parameter: Tissue Value: Whole Plant
  misc_feature: MA Experiment 20000574 PARAMETER Experiment Name: At_100uM_ABA_Mutants__P Parameter: Treatment Value: None
  misc_feature: MA Experiment ID: 20000794 Result: Up-regulated in Transcription
  misc_feature: MA Experiment 20000794 PARAMETER Experiment Name: At_Petals_P Parameter: Age (day) Value: 23-25 days
  misc_feature: MA Experiment 20000794 PARAMETER Experiment Name: At_Petals_P Parameter: Plant Line Value: WS
  misc_feature: MA Experiment 20000794 PARAMETER Experiment Name: At_Petals_P Parameter: Tissue Value: Petals vs. Whole plant
  misc_feature: MA Experiment ID: 20001247 Result: Down-regulated in Transcription
  misc_feature: MA Experiment 20001247 PARAMETER Experiment Name: At_Far-red-induction_P Parameter: Age (day) Value: 7
  misc_feature: MA Experiment 20001247 PARAMETER Experiment Name: At_Far-red-induction_P Parameter: Light Value: Far-red vs. White
  misc_feature: MA Experiment 20001247 PARAMETER Experiment Name: At_Far-red-induction_P Parameter: Organism Value: A. thaliana
  misc_feature: MA Experiment 20001247 PARAMETER Experiment Name: At_Far-red-induction_P Parameter: Plant Line Value: Columbia
  misc_feature: MA Experiment 20001247 PARAMETER Experiment Name: At_Far-red-induction_P Parameter: Timepoint (hr) Value: 1
  misc_feature: MA Experiment 20001247 PARAMETER Experiment Name: At_Far-red-induction_P Parameter: Tissue Value: Whole Plant
  misc_feature: MA Experiment ID: 20001248 Result: Down-regulated in Transcription
  misc_feature: MA Experiment 20001248 PARAMETER Experiment Name: At_Far-red-induction_P Parameter: Age (day) Value: 7
  misc_feature: MA Experiment 20001248 PARAMETER Experiment Name: At_Far-red-induction_P Parameter: Light Value: Far-red vs. White
  misc_feature: MA Experiment 20001248 PARAMETER Experiment Name: At_Far-red-induction_P Parameter: Organism Value: A. thaliana
  misc_feature: MA Experiment 20001248 PARAMETER Experiment Name: At_Far-red-induction_P Parameter: Plant Line Value: Columbia
  misc_feature: MA Experiment 20001248 PARAMETER Experiment Name: At_Far-red-induction_P Parameter: Timepoint (hr) Value: 4
  misc_feature: MA Experiment 20001248 PARAMETER Experiment Name: At_Far-red-induction_P Parameter: Tissue Value: Whole Plant
  misc_feature: MA Experiment ID: 20001450 Result: Down-regulated in Transcription
  misc_feature: MA Experiment 20001450 PARAMETER Experiment Name: At_Far-red-induction_P Parameter: Age (day) Value: 7
  misc_feature: MA Experiment 20001450 PARAMETER Experiment Name: At_Far-red-induction_P Parameter: Light Value: Far-red vs. White
  misc_feature: MA Experiment 20001450 PARAMETER Experiment Name: At_Far-red-induction_P Parameter: Organism Value: A. thaliana
  misc_feature: MA Experiment 20001450 PARAMETER Experiment Name: At_Far-red-induction_P Parameter: Plant Line Value: Columbia
  misc_feature: MA Experiment 20001450 PARAMETER Experiment Name: At_Far-red-induction_P Parameter: Timepoint (hr) Value: 8
  misc_feature: MA Experiment 20001450 PARAMETER Experiment Name: At_Far-red-induction_P Parameter: Tissue Value: Whole Plant
  misc_feature: MA Experiment ID: 20001558 Result: Down-regulated in Transcription
  misc_feature: MA Experiment 20001558 PARAMETER Experiment Name: At_Drought_Soil_Dry_P Parameter: Age (day) Value: 27
  misc_feature: MA Experiment 20001558 PARAMETER Experiment Name: At_Drought_Soil_Dry_P Parameter: Organism Value: A. thaliana
  misc_feature: MA Experiment 20001558 PARAMETER Experiment Name: At_Drought_Soil_Dry_P Parameter: Plant Line Value: WS
  misc_feature: MA Experiment 20001558 PARAMETER Experiment Name: At_Drought_Soil_Dry_P Parameter: Post Timepoint (hr) Value: 6
  misc_feature: MA Experiment 20001558 PARAMETER Experiment Name: At_Drought_Soil_Dry_P Parameter: Post-Treatment Value: Re-Water vs. No Drought
  misc_feature: MA Experiment 20001558 PARAMETER Experiment Name: At_Drought_Soil_Dry_P Parameter: Timepoint (day) Value: 13
  misc_feature: MA Experiment 20001558 PARAMETER Experiment Name: At_Drought_Soil_Dry_P Parameter: Treatment Value: Drought vs. No Drought
  misc_feature: MA Experiment ID: 20001757 Result: Down-regulated in Transcription
  misc_feature: MA Experiment 20001757 PARAMETER Experiment Name: At_50mM_NH4NO3_L-to-H_P Parameter: Timepoint (hr) Value: 6
  misc_feature: MA Experiment 20001757 PARAMETER Experiment Name: At_50mM_NH4NO3_L-to-H_P Parameter: Tissue Value: Leaf
  misc_feature: MA Experiment 20001757 PARAMETER Experiment Name: At_50mM_NH4NO3_L-to-H_P Parameter: Treatment Value: 50mM NH4NO3 vs 100mM Mannitol
attttttgcatattgtctacttttagattttgatatctattggaactcttactagctcattcatccgtcggcctgtgaattgtgtttctgaagtttccccaatggctgcttttggagatgacattgtgattgtagcggcatatcgtaccgccatttgcaaagcgagacgtggaggtttcaaagacactcttcctgatgatcttcttgcttctgttcttaaggctgtagtggaaagaacatctttggatccaagtgaagttggtgatatcgttgttggtaccgtgatagcgcctggttctcagagagcaatggagtgtagagttgcagcttattttgctggttttcctgactccgtgccagttagaactgtcaatagacaatgctcatcaggactacaagcagttgctgatgttgctgcttccattagagctggttattacgacattggtattggtgctggagtggaatcaatgtcaactgatcatattcctggaggcggctttcatggctctaatccaagagcacaggatttcccaaaagcccgtgattgtttgcttccaatgggaattacttctgaaaacgttgcagaaaggttcggtgtcacaagagaagagcaagatatggctgcggtggagtctcacaaacgcgctgcagctgcaatcgcgtctggtaaactcaaggatgaaatcattcctgttgctactaagattgtggaccctgagactaaagcagagaaggcaatcgtcgtatctgttgatgacggtgtacgtccaaactcaaacatggcagatttggcaaagctgaagactgtctttaaacagaacggttccaccacagctggcaatgctagtcagatcagtgatggtgctggagcagtactgctaatgaagagaagtttggctatgaagaagggacttcccattcttggagtattcaggagttttgctgttactggtgtggaaccatctgtaatgggtattggtccagctgttgccattcccgctgcaactaagctcgcagggctcaacgtcagcgatattgatctattcgagatcaatgaggcatttgcatctcagtatgtgtactcttgcaagaagttagagctggatatggaaaaggtcaatgttaatggaggagccattgctattggccatcccctgggtgctacaggagctcgatgtgttgcgacattgttgcacgagatgaagcggagaggaaaagattgccgctttggagtaatctcaatgtgcataggcactggaatgggagctgcagctgtttttgagaggggagactctgttgataacttgtccaacgctcgtgtggctaacggggatagtcattagaacatcgaagagagcttgaataagtagaagtaatgatgcattgagtctaataaatatgatgctttagctctttcacattgctgaacaatgaaaacttttgtcattctgagtttaaaatcaactacttttctctgaacaaagtgttaaatctaaaaccaaaagttacatccttccgc

SEQ ID NO: 29323 - protein, 414 aa, Arabidopsis thaliana
  peptide (1)..(414): Ceres Seq. ID no. 13621933
  misc_feature (5)..(265): Pfam Name: Thiolase, N-terminal domain Pfam Description: Thiolase, N-terminal domain
  misc_feature (1)..(407): Homolog of NCBI NO: 21537268 NR Description: putative acetyl-CoA acyltransferase [Arabidopsis
  misc_feature (4)..(414): Homolog of NCBI NO: 7433644 NR Description: acetyl-CoA C-acyltransferase (EC 2.3.1.16)
  misc_feature (1)..(407): Homolog of NCBI NO: 15219797 NR Description: acetyl-CoA C-acyltransferase (3-ketoacyl-CoA
  misc_feature (4)..(407): Homolog of NCBI NO: 15225798 NR Description: acetyl-CoA C-acyltransferase (3-ketoacyl-CoA
  misc_feature (2)..(407): Homolog of NCBI NO: 29367431 NR Description: 3-ketoacyl-CoA thiolase-like protein
  misc_feature (2)..(411): Homolog of NCBI NO: 421810 NR Description: acetyl-CoA C-acyltransferase (EC 2.3.1.16)
  misc_feature (2)..(411): Homolog of NCBI NO: 7433647 NR Description: acetyl-CoA C-acyltransferase (EC 2.3.1.16)
  misc_feature (2)..(411): Homolog of NCBI NO: 393707 NR Description: 3-ketoacyl-CoA thiolase; acetyl-CoA
  misc_feature (1)..(414): Homolog of NCBI NO: 30695561 NR Description: acetyl-CoA C-acyltransferase 1 (3-ketoacyl-CoA
  misc_feature (1)..(414): Homolog of NCBI NO: 30695564 NR Description: acetyl-CoA C-acyltransferase 1 (3-ketoacyl-CoA
MAAFGDDIVIVAAYRTAICKARRGGFKDTLPDDLLASVLKAVVERTSLDPSEVGDIVVGTVIAPGSQRAMECRVAAYFAGFPDSVPVRTVNRQCSSGLQAVADVAASIRAGYYDIGIGAGVESMSTDHIPGGGFHGSNPRAQDFPKARDCLLPMGITSENVAERFGVTREEQDMAAVESHKRAAAAIASGKLKDEIIPVATKIVDPETKAEKAIVVSVDDGVRPNSNMADLAKLKTVFKQNGSTTAGNASQISDGAGAVLLMKRSLAMKKGLPILGVFRSFAVTGVEPSVMGIGPAVAIPAATKLAGLNVSDIDLFEINEAFASQYVYSCKKLELDMEKVNVNGGAIAIGHPLGATGARCVATLLHEMKRRGKDCRFGVISMCIGTGMGAAAVFERGDSVDNLSNARVANGDSH

SEQ ID NO: 29324 - protein, 345 aa, Arabidopsis thaliana
  peptide (1)..(345): Ceres Seq. ID no. 13621934
  misc_feature (1)..(196): Pfam Name: Thiolase, N-terminal domain Pfam Description: Thiolase, N-terminal domain
  misc_feature (1)..(338): Homolog of NCBI NO: 21537268 NR Description: putative acetyl-CoA acyltransferase [Arabidopsis
  misc_feature (1)..(345): Homolog of NCBI NO: 7433644 NR Description: acetyl-CoA C-acyltransferase (EC 2.3.1.16)
  misc_feature (1)..(338): Homolog of NCBI NO: 15219797 NR Description: acetyl-CoA C-acyltransferase (3-ketoacyl-CoA
  misc_feature (1)..(338): Homolog of NCBI NO: 15225798 NR Description: acetyl-CoA C-acyltransferase (3-ketoacyl-CoA
  misc_feature (1)..(338): Homolog of NCBI NO: 29367431 NR Description: 3-ketoacyl-CoA thiolase-like protein
  misc_feature (1)..(342): Homolog of NCBI NO: 421810 NR Description: acetyl-CoA C-acyltransferase (EC 2.3.1.16)
  misc_feature (1)..(342): Homolog of NCBI NO: 7433647 NR Description: acetyl-CoA C-acyltransferase (EC 2.3.1.16)
  misc_feature (1)..(342): Homolog of NCBI NO: 393707 NR Description: 3-ketoacyl-CoA thiolase; acetyl-CoA
  misc_feature (1)..(345): Homolog of NCBI NO: 30695561 NR Description: acetyl-CoA C-acyltransferase 1 (3-ketoacyl-CoA
  misc_feature (1)..(345): Homolog of NCBI NO: 30695564 NR Description: acetyl-CoA C-acyltransferase 1 (3-ketoacyl-CoA
MECRVAAYFAGFPDSVPVRTVNRQCSSGLQAVADVAASIRAGYYDIGIGAGVESMSTDHIPGGGFHGSNPRAQDFPKARDCLLPMGITSENVAERFGVTREEQDMAAVESHKRAAAAIASGKLKDEIIPVATKIVDPETKAEKAIVVSVDDGVRPNSNMADLAKLKTVFKQNGSTTAGNASQISDGAGAVLLMKRSLAMKKGLPILGVFRSFAVTGVEPSVMGIGPAVAIPAATKLAGLNVSDIDLFEINEAFASQYVYSCKKLELDMEKVNVNGGAIAIGHPLGATGARCVATLLHEMKRRGKDCRFGVISMCIGTGMGAAAVFERGDSVDNLSNARVANGDSH

SEQ ID NO: 29325 - protein, 291 aa, Arabidopsis thaliana
  peptide (1)..(291): Ceres Seq. ID no. 13621935
  misc_feature (1)..(142): Pfam Name: Thiolase, N-terminal domain Pfam Description: Thiolase, N-terminal domain
  misc_feature (1)..(284): Homolog of NCBI NO: 21537268 NR Description: putative acetyl-CoA acyltransferase [Arabidopsis
  misc_feature (1)..(291): Homolog of NCBI NO: 7433644 NR Description: acetyl-CoA C-acyltransferase (EC 2.3.1.16)
  misc_feature (1)..(284): Homolog of NCBI NO: 15219797 NR Description: acetyl-CoA C-acyltransferase (3-ketoacyl-CoA
  misc_feature (1)..(284): Homolog of NCBI NO: 15225798 NR Description: acetyl-CoA C-acyltransferase (3-ketoacyl-CoA
  misc_feature (1)..(284): Homolog of NCBI NO: 29367431 NR Description: 3-ketoacyl-CoA thiolase-like protein
  misc_feature (1)..(288): Homolog of NCBI NO: 421810 NR Description: acetyl-CoA C-acyltransferase (EC 2.3.1.16)
  misc_feature (1)..(288): Homolog of NCBI NO: 7433647 NR Description: acetyl-CoA C-acyltransferase (EC 2.3.1.16)
  misc_feature (1)..(288): Homolog of NCBI NO: 393707 NR Description: 3-ketoacyl-CoA thiolase; acetyl-CoA
  misc_feature (1)..(291): Homolog of NCBI NO: 30695561 NR Description: acetyl-CoA C-acyltransferase 1 (3-ketoacyl-CoA
  misc_feature (1)..(291): Homolog of NCBI NO: 30695564 NR Description: acetyl-CoA C-acyltransferase 1 (3-ketoacyl-CoA
MSTDHIPGGGFHGSNPRAQDFPKARDCLLPMGITSENVAERFGVTREEQDMAAVESHKRAAAAIASGKLKDEIIPVATKIVDPETKAEKAIVVSVDDGVRPNSNMADLAKLKTVFKQNGSTTAGNASQISDGAGAVLLMKRSLAMKKGLPILGVFRSFAVTGVEPSVMGIGPAVAIPAATKLAGLNVSDIDLFEINEAFASQYVYSCKKLELDMEKVNVNGGAIAIGHPLGATGARCVATLLHEMKRRGKDCRFGVISMCIGTGMGAAAVFERGDSVDNLSNARVANGDSH

SEQ ID NO: 29326 - DNA, 903 bp, Arabidopsis thaliana
  misc_feature (1)..(903): Ceres Seq. ID no. 12348734
  misc_feature: MA Experiment ID: 108463 Result: Up-regulated in Transcription
  misc_feature: MA Experiment 108463 PARAMETER Experiment Name: At_Germinating_Seeds_cDNA_P Parameter: Age (day) Value: 3 vs. 0
  misc_feature: MA Experiment 108463 PARAMETER Experiment Name: At_Germinating_Seeds_cDNA_P Parameter: Tissue Value: Germinating Seeds
  misc_feature: MA Experiment ID: 108464 Result: Up-regulated in Transcription
  misc_feature: MA Experiment 108464 PARAMETER Experiment Name: At_Germinating_Seeds_cDNA_P Parameter: Age (day) Value: 4 vs. 0
  misc_feature: MA Experiment 108464 PARAMETER Experiment Name: At_Germinating_Seeds_cDNA_P Parameter: Tissue Value: Germinating Seeds
  misc_feature: MA Experiment ID: 108572 Result: Up-regulated in Transcription
  misc_feature: MA Experiment 108572 PARAMETER Experiment Name: At_Drought_cDNA_P Parameter: Timepoint (hr) Value: 1
  misc_feature: MA Experiment 108572 PARAMETER Experiment Name: At_Drought_cDNA_P Parameter: Tissue Value: Aerial
  misc_feature: MA Experiment 108572 PARAMETER Experiment Name: At_Drought_cDNA_P Parameter: Treatment Value: Drought vs. No Drought
  misc_feature: MA Experiment ID: 108594 Result: Down-regulated in Transcription
  misc_feature: MA Experiment 108594 PARAMETER Experiment Name: At_Ler-rhl_Root_cDNA_P Parameter: Plant Line Value: null
  misc_feature: MA Experiment ID: 20000068 Result: Up-regulated in Transcription
  misc_feature: MA Experiment ID: 20000070 Result: Up-regulated in Transcription
  misc_feature: MA Experiment 20000070 PARAMETER Experiment Name: At_100uM_ABA_Mutants_cDNA_P Parameter: Plant Line Value: CS24
  misc_feature: MA Experiment 20000070 PARAMETER Experiment Name: At_100uM_ABA_Mutants_cDNA_P Parameter: Timepoint (hr) Value: 6
  misc_feature: MA Experiment 20000070 PARAMETER Experiment Name: At_100uM_ABA_Mutants_cDNA_P Parameter: Tissue Value: Aerial
  misc_feature: MA Experiment 20000070 PARAMETER Experiment Name: At_100uM_ABA_Mutants_cDNA_P Parameter: Treatment Value: 100uM ABA vs. No Treatment
  misc_feature: MA Experiment ID: 20000182 Result: Up-regulated in Transcription
  misc_feature: MA Experiment 20000182 PARAMETER Experiment Name: At_2mM_SA_P Parameter: Age (day) Value: 14
  misc_feature: MA Experiment 20000182 PARAMETER Experiment Name: At_2mM_SA_P Parameter: Organism Value: A. thaliana
  misc_feature: MA Experiment 20000182 PARAMETER Experiment Name: At_2mM_SA_P Parameter: Plant Line Value: WS
  misc_feature: MA Experiment 20000182 PARAMETER Experiment Name: At_2mM_SA_P Parameter: Timepoint (hr) Value: 6
  misc_feature: MA Experiment 20000182 PARAMETER Experiment Name: At_2mM_SA_P Parameter: Tissue Value: Aerial
  misc_feature: MA Experiment 20000182 PARAMETER Experiment Name: At_2mM_SA_P Parameter: Treatment Value: 2mM SA vs. No Treatment
  misc_feature: MA Experiment ID: 20000227 Result: Down-regulated in Transcription
  misc_feature: MA Experiment 20000227 PARAMETER Experiment Name: At_Root-Tips-vs-Tops_P Parameter: Tissue Value: Root Tips vs. Root Tops
  misc_feature: MA Experiment ID: 20000235 Result: Down-regulated in Transcription
  misc_feature: MA Experiment 20000235 PARAMETER Experiment Name: At_Siliques_P Parameter: Age (day) Value: 21
  misc_feature: MA Experiment 20000235 PARAMETER Experiment Name: At_Siliques_P Parameter: Organism Value: A. thaliana
  misc_feature: MA Experiment 20000235 PARAMETER Experiment Name: At_Siliques_P Parameter: Plant Line Value: WS
  misc_feature: MA Experiment 20000235 PARAMETER Experiment Name: At_Siliques_P Parameter: Tissue Value: 5-10mm Siliques vs. Whole Plant
  misc_feature: MA Experiment ID: 20000308 Result: Up-regulated in Transcription
  misc_feature: MA Experiment 20000308 PARAMETER Experiment Name: At_100mM_NaCl__P Parameter: Age (day) Value: 17
  misc_feature: MA Experiment 20000308 PARAMETER Experiment Name: At_100mM_NaCl__P Parameter: Organism Value: A. thaliana
  misc_feature: MA Experiment 20000308 PARAMETER Experiment Name: At_100mM_NaCl__P Parameter: Plant Line Value: WS
  misc_feature: MA Experiment 20000308 PARAMETER Experiment Name: At_100mM_NaCl__P Parameter: Timepoint (hr) Value: 72
  misc_feature: MA Experiment 20000308 PARAMETER Experiment Name: At_100mM_NaCl__P Parameter: Tissue Value: Whole Plant
  misc_feature: MA Experiment 20000308 PARAMETER Experiment Name: At_100mM_NaCl__P Parameter: Treatment Value: 100mM NaCl vs. No Treatment
  misc_feature: MA Experiment ID: 20000436 Result: Up-regulated in Transcription
  misc_feature: MA Experiment 20000436 PARAMETER Experiment Name: At_Drought_P Parameter: Age (day) Value: 7
  misc_feature: MA Experiment 20000436 PARAMETER Experiment Name: At_Drought_P Parameter: Organism Value: A. thaliana
  misc_feature: MA Experiment 20000436 PARAMETER Experiment Name: At_Drought_P Parameter: Plant Line Value: WS
  misc_feature: MA Experiment 20000436 PARAMETER Experiment Name: At_Drought_P Parameter: Timepoint (hr) Value: 12
  misc_feature: MA Experiment 20000436 PARAMETER Experiment Name: At_Drought_P Parameter: Tissue Value: Whole Plant
  misc_feature: MA Experiment 20000436 PARAMETER Experiment Name: At_Drought_P Parameter: Treatment Value: Drought vs. No Drought
  misc_feature: MA Experiment ID: 20000439 Result: Up-regulated in Transcription
  misc_feature: MA Experiment 20000439 PARAMETER Experiment Name: At_Roots__P Parameter: Age (day) Value: 14 vs. 21
  misc_feature: MA Experiment 20000439 PARAMETER Experiment Name: At_Roots__P Parameter: Organism Value: A. thaliana
  misc_feature: MA Experiment 20000439 PARAMETER Experiment Name: At_Roots__P Parameter: Tissue Value: Roots vs. Whole Plant
  misc_feature: MA Experiment ID: 20000453 Result: Up-regulated in Transcription
  misc_feature: MA Experiment 20000453 PARAMETER Experiment Name: At_100uM_ABA_P Parameter: Age (day) Value: 15
  misc_feature: MA Experiment 20000453 PARAMETER Experiment Name: At_100uM_ABA_P Parameter: Organism Value: A. thaliana
  misc_feature: MA Experiment 20000453 PARAMETER Experiment Name: At_100uM_ABA_P Parameter: Plant Line Value: WS
  misc_feature: MA Experiment 20000453 PARAMETER Experiment Name: At_100uM_ABA_P Parameter: Timepoint (hr) Value: 24
  misc_feature: MA Experiment 20000453 PARAMETER Experiment Name: At_100uM_ABA_P Parameter: Tissue Value: Aerial
  misc_feature: MA Experiment 20000453 PARAMETER Experiment Name: At_100uM_ABA_P Parameter: Treatment Value: 100uM ABA vs. No Treatment
  misc_feature: MA Experiment ID: 20000527 Result: Down-regulated in Transcription
  misc_feature: MA Experiment 20000527 PARAMETER Experiment Name: At_10percent_PEG_P Parameter: Age (day) Value: 20
  misc_feature: MA Experiment 20000527 PARAMETER Experiment Name: At_10percent_PEG_P Parameter: Organism Value: A. thaliana
  misc_feature: MA Experiment 20000527 PARAMETER Experiment Name: At_10percent_PEG_P Parameter: Plant Line Value: WS
  misc_feature: MA Experiment 20000527 PARAMETER Experiment Name: At_10percent_PEG_P Parameter: Timepoint (day) Value: 20
  misc_feature: MA Experiment 20000527 PARAMETER Experiment Name: At_10percent_PEG_P Parameter: Tissue Value: Whole Plant
  misc_feature: MA Experiment 20000527 PARAMETER Experiment Name: At_10percent_PEG_P Parameter: Treatment Value: 10percent PEG vs. No Treatment
  misc_feature: MA Experiment ID: 20000794 Result: Down-regulated in Transcription
  misc_feature: MA Experiment 20000794 PARAMETER Experiment Name: At_Petals_P Parameter: Age (day) Value: 23-25 days
  misc_feature: MA Experiment 20000794 PARAMETER Experiment Name: At_Petals_P Parameter: Plant Line Value: WS
  misc_feature: MA Experiment 20000794 PARAMETER Experiment Name: At_Petals_P Parameter: Tissue Value: Petals vs. Whole plant
  misc_feature: MA Experiment ID: 20001556 Result: Down-regulated in Transcription
  misc_feature: MA Experiment 20001556 PARAMETER Experiment Name: At_Drought_Soil_Dry_P Parameter: Age (day) Value: 26
  misc_feature: MA Experiment 20001556 PARAMETER Experiment Name: At_Drought_Soil_Dry_P Parameter: Organism Value: A. thaliana
  misc_feature: MA Experiment 20001556 PARAMETER Experiment Name: At_Drought_Soil_Dry_P Parameter: Plant Line Value: WS
  misc_feature: MA Experiment 20001556 PARAMETER Experiment Name: At_Drought_Soil_Dry_P Parameter: Post Timepoint (hr) Value: None
  misc_feature: MA Experiment 20001556 PARAMETER Experiment Name: At_Drought_Soil_Dry_P Parameter: Post-Treatment Value: None
  misc_feature: MA Experiment 20001556 PARAMETER Experiment Name: At_Drought_Soil_Dry_P Parameter: Timepoint (day) Value: 12
  misc_feature: MA Experiment 20001556 PARAMETER Experiment Name: At_Drought_Soil_Dry_P Parameter: Treatment Value: Drought vs. No Drought
  misc_feature: MA Experiment ID: 20001557 Result: Down-regulated in Transcription
  misc_feature: MA Experiment 20001557 PARAMETER Experiment Name: At_Drought_Soil_Dry_P Parameter: Age (day) Value: 27
  misc_feature: MA Experiment 20001557 PARAMETER Experiment Name: At_Drought_Soil_Dry_P Parameter: Organism Value: A. thaliana
  misc_feature: MA Experiment 20001557 PARAMETER Experiment Name: At_Drought_Soil_Dry_P Parameter: Plant Line Value: WS
  misc_feature: MA Experiment 20001557 PARAMETER Experiment Name: At_Drought_Soil_Dry_P Parameter: Post Timepoint (hr) Value: 3
  misc_feature: MA Experiment 20001557 PARAMETER Experiment Name: At_Drought_Soil_Dry_P Parameter: Post-Treatment Value: Re-Water vs. No Drought
  misc_feature: MA Experiment 20001557 PARAMETER Experiment Name: At_Drought_Soil_Dry_P Parameter: Timepoint (day) Value: 13
  misc_feature: MA Experiment 20001557 PARAMETER Experiment Name: At_Drought_Soil_Dry_P Parameter: Treatment Value: Drought vs. No Drought
  misc_feature: MA Experiment ID: 20001558 Result: Down-regulated in Transcription
  misc_feature: MA Experiment 20001558 PARAMETER Experiment Name: At_Drought_Soil_Dry_P Parameter: Age (day) Value: 27
  misc_feature: MA Experiment 20001558 PARAMETER Experiment Name: At_Drought_Soil_Dry_P Parameter: Organism Value: A. thaliana
  misc_feature: MA Experiment 20001558 PARAMETER Experiment Name: At_Drought_Soil_Dry_P Parameter: Plant Line Value: WS
  misc_feature: MA Experiment 20001558 PARAMETER Experiment Name: At_Drought_Soil_Dry_P Parameter: Post Timepoint (hr) Value: 6
  misc_feature: MA Experiment 20001558 PARAMETER Experiment Name: At_Drought_Soil_Dry_P Parameter: Post-Treatment Value: Re-Water vs. No Drought
  misc_feature: MA Experiment 20001558 PARAMETER Experiment Name: At_Drought_Soil_Dry_P Parameter: Timepoint (day) Value: 13
  misc_feature: MA Experiment 20001558 PARAMETER Experiment Name: At_Drought_Soil_Dry_P Parameter: Treatment Value: Drought vs. No Drought
  misc_feature: MA Experiment ID: 20001560 Result: Down-regulated in Transcription
  misc_feature: MA Experiment 20001560 PARAMETER Experiment Name: At_Drought_Soil_Dry_P Parameter: Age (day) Value: 28
  misc_feature: MA Experiment 20001560 PARAMETER Experiment Name: At_Drought_Soil_Dry_P Parameter: Organism Value: A. thaliana
  misc_feature: MA Experiment 20001560 PARAMETER Experiment Name: At_Drought_Soil_Dry_P Parameter: Plant Line Value: WS
  misc_feature: MA Experiment 20001560 PARAMETER Experiment Name: At_Drought_Soil_Dry_P Parameter: Post Timepoint (hr) Value: None
  misc_feature: MA Experiment 20001560 PARAMETER Experiment Name: At_Drought_Soil_Dry_P Parameter: Post-Treatment Value: None
  misc_feature: MA Experiment 20001560 PARAMETER Experiment Name: At_Drought_Soil_Dry_P Parameter: Timepoint (day) Value: 14
  misc_feature: MA Experiment 20001560 PARAMETER Experiment Name: At_Drought_Soil_Dry_P Parameter: Treatment Value: Drought vs. No Drought
  misc_feature: MA Experiment ID: 20001757 Result: Up-regulated in Transcription
  misc_feature: MA Experiment 20001757 PARAMETER Experiment Name: At_50mM_NH4NO3_L-to-H_P Parameter: Timepoint (hr) Value: 6
  misc_feature: MA Experiment 20001757 PARAMETER Experiment Name: At_50mM_NH4NO3_L-to-H_P Parameter: Tissue Value: Leaf
  misc_feature: MA Experiment 20001757 PARAMETER Experiment Name: At_50mM_NH4NO3_L-to-H_P Parameter: Treatment Value: 50mM NH4NO3 vs 100mM Mannitol
aacacacatacataaaagtagtagaactaaaaaatggcaaacctcttggtctctactttcatattttccgcacttttgctcatctccaccgcaacagccgccacattcgaaatcctaaaccaatgtagttacaccgtgtgggctgccgcaagccctggaggtggccgacgtctagatgctggccaatcatggaggctagatgtcgcggcgggcactaaaatggcacggatttggggtaggaccaattgtaactttgactcctcaggtcgtggccgatgccaaactggtgactgcagtggtggactccaatgtactggctggggacagccaccaaacacgttggctgagtacgctttgaaccaattcaacaacttagacttctacgatatctcacttgtcgatggatttaacatacctatggagtttagcccaactagttcgaactgccatcggatactatgtaccgcagacataaacggacaatgtccaaacgtgttgagagccccaggtggatgcaacaacccgtgtactgtatttcagacgaaccaatactgttgtacgaacggtcagggatcatgtagcgatactgtgtactcaagattctttaagcagagatgccctgacgcttacagctatccacaagatgacccgactagcactttcacttgcaccaacactaactacagggtcgtgttttgtccaaggtctaggctcggtgctactggatcccaccagctcccgatcaagatggtcaccgaggagaattaatagactcgtatctactgtatgtgtgtgtgtgtgagggtgtacgtagatatgcgtacgtgtgacgtgattatatatacgttaccataaacacttaatggattataataaggcatgcaataataattacgttagtcg

SEQ ID NO: 29327 - protein, 244 aa, Arabidopsis thaliana
  peptide (1)..(244): Ceres Seq. ID no. 12348735
  misc_feature (29)..(223): Pfam Name: Thaumatin family Pfam Description: Thaumatin family
  misc_feature (5)..(239): Homolog of NCBI NO: 15419836 NR Description: thaumatin-like protein [Capsicum annuum]
  misc_feature (5)..(239): Homolog of NCBI NO: 1709493 NR Description: OSMOTIN-LIKE PROTEIN OSML13 PRECURSOR (PA13)
  misc_feature (1)..(223): Homolog of NCBI NO: 14290151 NR Description: thaumatin-like protein [Sambucus nigra]
  misc_feature (1)..(223): Homolog of NCBI NO: 14290147 NR Description: thaumatin-like protein [Sambucus nigra]
  misc_feature (1)..(223): Homolog of NCBI NO: 5881239 NR Description: thaumatin [Vitis riparia]
  misc_feature (5)..(229): Homolog of NCBI NO: 3549691 NR Description: thaumatin-like protein PR-5b [Cicer arietinum]
  misc_feature (1)..(244): Homolog of NCBI NO: 33589680 NR Description: At4g11650 [Arabidopsis thaliana]
  misc_feature (1)..(244): Homolog of NCBI NO: 21537409 NR Description: osmotin precursor [Arabidopsis thaliana]
  misc_feature (1)..(244): Homolog of NCBI NO: 15234263 NR Description: osmotin precursor
  misc_feature (1)..(244): Homolog of NCBI NO: 887390 NR Description: osmotin [Arabidopsis thaliana]
MANLLVSTFIFSALLLISTATAATFEILNQCSYTVWAAASPGGGRRLDAGQSWRLDVAAGTKMARIWGRTNCNFDSSGRGRCQTGDCSGGLQCTGWGQPPNTLAEYALNQFNNLDFYDISLVDGFNIPMEFSPTSSNCHRILCTADINGQCPNVLRAPGGCNNPCTVFQTNQYCCTNGQGSCSDTVYSRFFKQRCPDAYSYPQDDPTSTFTCTNTNYRVVFCPRSRLGATGSHQLPIKMVTEEN

SEQ ID NO: 29328 - protein, 182 aa, Arabidopsis thaliana
  peptide (1)..(182): Ceres Seq. ID no. 12348736
  misc_feature (1)..(161): Pfam Name: Thaumatin family Pfam Description: Thaumatin family
  misc_feature (1)..(177): Homolog of NCBI NO: 15419836 NR Description: thaumatin-like protein [Capsicum annuum]
  misc_feature (1)..(177): Homolog of NCBI NO: 1709493 NR Description: OSMOTIN-LIKE PROTEIN OSML13 PRECURSOR (PA13)
  misc_feature (1)..(161): Homolog of NCBI NO: 14290151 NR Description: thaumatin-like protein [Sambucus nigra]
  misc_feature (1)..(161): Homolog of NCBI NO: 14290147 NR Description: thaumatin-like protein [Sambucus nigra]
  misc_feature (1)..(161): Homolog of NCBI NO: 5881239 NR Description: thaumatin [Vitis riparia]
  misc_feature (1)..(167): Homolog of NCBI NO: 3549691 NR Description: thaumatin-like protein PR-5b [Cicer arietinum]
  misc_feature (1)..(182): Homolog of NCBI NO: 33589680 NR Description: At4g11650 [Arabidopsis thaliana]
  misc_feature (1)..(182): Homolog of NCBI NO: 21537409 NR Description: osmotin precursor [Arabidopsis thaliana]
  misc_feature (1)..(182): Homolog of NCBI NO: 15234263 NR Description: osmotin precursor
  misc_feature (1)..(182): Homolog of NCBI NO: 887390 NR Description: osmotin [Arabidopsis thaliana]
MARIWGRTNCNFDSSGRGRCQTGDCSGGLQCTGWGQPPNTLAEYALNQFNNLDFYDISLVDGFNIPMEFSPTSSNCHRILCTADINGQCPNVLRAPGGCNNPCTVFQTNQYCCTNGQGSCSDTVYSRFFKQRCPDAYSYPQDDPTSTFTCTNTNYRVVFCPRSRLGATGSHQLPIKMVTEEN

SEQ ID NO: 29329 - DNA, 1206 bp, Arabidopsis thaliana
  misc_feature (1)..(1206): Ceres Seq. ID no. 12601145
  misc_feature: MA Experiment ID: 108561 Result: Down-regulated in Transcription
  misc_feature: MA Experiment 108561 PARAMETER Experiment Name: At_100uM_ABA_cDNA_P Parameter: Timepoint (hr) Value: 6
  misc_feature: MA Experiment 108561 PARAMETER Experiment Name: At_100uM_ABA_cDNA_P Parameter: Tissue Value: Aerial
  misc_feature: MA Experiment 108561 PARAMETER Experiment Name: At_100uM_ABA_cDNA_P Parameter: Treatment Value: 100uM ABA vs. No Treatment
  misc_feature: MA Experiment ID: 108585 Result: Down-regulated in Transcription
  misc_feature: MA Experiment 108585 PARAMETER Experiment Name: At_5mM_NaNP_cDNA_P Parameter: Timepoint (hr) Value: 6
  misc_feature: MA Experiment 108585 PARAMETER Experiment Name: At_5mM_NaNP_cDNA_P Parameter: Tissue Value: Aerial
  misc_feature: MA Experiment 108585 PARAMETER Experiment Name: At_5mM_NaNP_cDNA_P Parameter: Treatment Value: null
  misc_feature: MA Experiment ID: 20000180 Result: Up-regulated in Transcription
  misc_feature: MA Experiment 20000180 PARAMETER Experiment Name: At_Germinating_Seeds_P Parameter: Age (hr) Value: 24 vs. 0
  misc_feature: MA Experiment 20000180 PARAMETER Experiment Name: At_Germinating_Seeds_P Parameter: Tissue Value: Germinating Seeds
  misc_feature: MA Experiment ID: 20000185 Result: Down-regulated in Transcription
  misc_feature: MA Experiment 20000185 PARAMETER Experiment Name: At_Roots__P Parameter: Age (day) Value: 7 vs. 21
  misc_feature: MA Experiment 20000185 PARAMETER Experiment Name: At_Roots__P Parameter: Organism Value: A. thaliana
  misc_feature: MA Experiment 20000185 PARAMETER Experiment Name: At_Roots__P Parameter: Tissue Value: Roots vs. Whole Plant
  misc_feature: MA Experiment ID: 20000234 Result: Up-regulated in Transcription
  misc_feature: MA Experiment 20000234 PARAMETER Experiment Name: At_Siliques_P Parameter: Age (day) Value: 21
  misc_feature: MA Experiment 20000234 PARAMETER Experiment Name: At_Siliques_P Parameter: Organism Value: A. thaliana
  misc_feature: MA Experiment 20000234 PARAMETER Experiment Name: At_Siliques_P Parameter: Plant Line Value: WS
  misc_feature: MA Experiment 20000234 PARAMETER Experiment Name: At_Siliques_P Parameter: Tissue Value: Less Than 5mm Siliques vs. Whole Plant
  misc_feature: MA Experiment ID: 20000436 Result: Down-regulated in Transcription
  misc_feature: MA Experiment 20000436 PARAMETER Experiment Name: At_Drought_P Parameter: Age (day) Value: 7
  misc_feature: MA Experiment 20000436 PARAMETER Experiment Name: At_Drought_P Parameter: Organism Value: A. thaliana
  misc_feature: MA Experiment 20000436 PARAMETER Experiment Name: At_Drought_P Parameter: Plant Line Value: WS
  misc_feature: MA Experiment 20000436 PARAMETER Experiment Name: At_Drought_P Parameter: Timepoint (hr) Value: 12
  misc_feature: MA Experiment 20000436 PARAMETER Experiment Name: At_Drought_P Parameter: Tissue Value: Whole Plant
  misc_feature: MA Experiment 20000436 PARAMETER Experiment Name: At_Drought_P Parameter: Treatment Value: Drought vs. No Drought
  misc_feature: MA Experiment ID: 20000437 Result: Down-regulated in Transcription
  misc_feature: MA Experiment 20000437 PARAMETER Experiment Name: At_Drought_P Parameter: Age (day) Value: 8
  misc_feature: MA Experiment 20000437 PARAMETER Experiment Name: At_Drought_P Parameter: Organism Value: A. thaliana
  misc_feature: MA Experiment 20000437 PARAMETER Experiment Name: At_Drought_P Parameter: Plant Line Value: WS
  misc_feature: MA Experiment 20000437 PARAMETER Experiment Name: At_Drought_P Parameter: Timepoint (hr) Value: 24
  misc_feature: MA Experiment 20000437 PARAMETER Experiment Name: At_Drought_P Parameter: Tissue Value: Whole Plant
  misc_feature: MA Experiment 20000437 PARAMETER Experiment Name: At_Drought_P Parameter: Treatment Value: Drought vs. No Drought
  misc_feature: MA Experiment ID: 20000439 Result: Down-regulated in Transcription
  misc_feature: MA Experiment 20000439 PARAMETER Experiment Name: At_Roots__P Parameter: Age (day) Value: 14 vs. 21
  misc_feature: MA Experiment 20000439 PARAMETER Experiment Name: At_Roots__P Parameter: Organism Value: A. thaliana
  misc_feature: MA Experiment 20000439 PARAMETER Experiment Name: At_Roots__P Parameter: Tissue Value: Roots vs. Whole Plant
  misc_feature: MA Experiment ID: 20000794 Result: Down-regulated in Transcription
  misc_feature: MA Experiment 20000794 PARAMETER Experiment Name: At_Petals_P Parameter: Age (day) Value: 23-25 days
  misc_feature: MA Experiment 20000794 PARAMETER Experiment Name: At_Petals_P Parameter: Plant Line Value: WS
  misc_feature: MA Experiment 20000794 PARAMETER Experiment Name: At_Petals_P Parameter: Tissue Value: Petals vs. Whole plant
  misc_feature: MA Experiment ID: 20001248 Result: Down-regulated in Transcription
  misc_feature: MA Experiment 20001248 PARAMETER Experiment Name: At_Far-red-induction_P Parameter: Age (day) Value: 7
  misc_feature: MA Experiment 20001248 PARAMETER Experiment Name: At_Far-red-induction_P Parameter: Light Value: Far-red vs. White
  misc_feature: MA Experiment 20001248 PARAMETER Experiment Name: At_Far-red-induction_P Parameter: Organism Value: A. thaliana
  misc_feature: MA Experiment 20001248 PARAMETER Experiment Name: At_Far-red-induction_P Parameter: Plant Line Value: Columbia
  misc_feature: MA Experiment 20001248 PARAMETER Experiment Name: At_Far-red-induction_P Parameter: Timepoint (hr) Value: 4
  misc_feature: MA Experiment 20001248 PARAMETER Experiment Name: At_Far-red-induction_P Parameter: Tissue Value: Whole Plant
  misc_feature: MA Experiment ID: 20001450 Result: Down-regulated in Transcription
  misc_feature: MA Experiment 20001450 PARAMETER Experiment Name: At_Far-red-induction_P Parameter: Age (day) Value: 7
  misc_feature: MA Experiment 20001450 PARAMETER Experiment Name: At_Far-red-induction_P Parameter: Light Value: Far-red vs. White
  misc_feature: MA Experiment 20001450 PARAMETER Experiment Name: At_Far-red-induction_P Parameter: Organism Value: A. thaliana
  misc_feature: MA Experiment 20001450 PARAMETER Experiment Name: At_Far-red-induction_P Parameter: Plant Line Value: Columbia
  misc_feature: MA Experiment 20001450 PARAMETER Experiment Name: At_Far-red-induction_P Parameter: Timepoint (hr) Value: 8
  misc_feature: MA Experiment 20001450 PARAMETER Experiment Name: At_Far-red-induction_P Parameter: Tissue Value: Whole Plant
  misc_feature: MA Experiment ID: 20001560 Result: Up-regulated in Transcription
  misc_feature: MA Experiment 20001560 PARAMETER Experiment Name: At_Drought_Soil_Dry_P Parameter: Age (day) Value: 28
  misc_feature: MA Experiment 20001560 PARAMETER Experiment Name: At_Drought_Soil_Dry_P Parameter: Organism Value: A. thaliana
  misc_feature: MA Experiment 20001560 PARAMETER Experiment Name: At_Drought_Soil_Dry_P Parameter: Plant Line Value: WS
  misc_feature: MA Experiment 20001560 PARAMETER Experiment Name: At_Drought_Soil_Dry_P Parameter: Post Timepoint (hr) Value: None
  misc_feature: MA Experiment 20001560 PARAMETER Experiment Name: At_Drought_Soil_Dry_P Parameter: Post-Treatment Value: None
  misc_feature: MA Experiment 20001560 PARAMETER Experiment Name: At_Drought_Soil_Dry_P Parameter: Timepoint (day) Value: 14
  misc_feature: MA Experiment 20001560 PARAMETER Experiment Name: At_Drought_Soil_Dry_P Parameter: Treatment Value: Drought vs. No Drought
  misc_feature: MA Experiment ID: 20001757 Result: Up-regulated in Transcription
  misc_feature: MA Experiment 20001757 PARAMETER Experiment Name: At_50mM_NH4NO3_L-to-H_P Parameter: Timepoint (hr) Value: 6
  misc_feature: MA Experiment 20001757 PARAMETER Experiment Name: At_50mM_NH4NO3_L-to-H_P Parameter: Tissue Value: Leaf
  misc_feature: MA Experiment 20001757 PARAMETER Experiment Name: At_50mM_NH4NO3_L-to-H_P Parameter: Treatment Value: 50mM NH4NO3 vs 100mM Mannitol
  misc_feature: MA Experiment ID: 20001905 Result: Down-regulated in Transcription
  misc_feature: MA Experiment 20001905 PARAMETER Experiment Name: At_Drought_Reproduction_P Parameter: Age (day) Value: 40
  misc_feature: MA Experiment 20001905 PARAMETER Experiment Name: At_Drought_Reproduction_P Parameter: Organism Value: A. thaliana
  misc_feature: MA Experiment 20001905 PARAMETER Experiment Name: At_Drought_Reproduction_P Parameter: Plant Line Value: WS
  misc_feature: MA Experiment 20001905 PARAMETER Experiment Name: At_Drought_Reproduction_P Parameter: Timepoint (day) Value: 10
  misc_feature: MA Experiment 20001905 PARAMETER Experiment Name: At_Drought_Reproduction_P Parameter: Tissue Value: Rosettes
  misc_feature: MA Experiment 20001905 PARAMETER Experiment Name: At_Drought_Reproduction_P Parameter: Treatment Value: Drought vs. No Drought
aaggtgacgtggcgaaaatcggaaattttgcgatatttctcactctctcgtcttcttcgtctgagctatcaaactccagtcaatggcgatgatgacgacgacgacgacaacattcttccatccactacttcctgctaacacttacaaatccggagctgtagcttcttcctttgtctcagttcctcgttcgtcgtctctccaatttcgctcacttgtgtcagattctacgtcgatttgtggtccaagtaagttcaccggaaaaaacagaagagtatcggttaccgtttccgccgccgcaacaactgaacctctcaccgtcctcgttaccggtgccggtggaagaacaggacaaattgtgtataagaaattgaaggagaggtcggagcagttcgtggcaaggggtttagtgaggacaaaggagagtaaggagaagatcaatggagaggatgaagtattcattggagatattagagatactgcatcaattgctcctgctgttgaagggattgatgctttggtcattcttactagcgctgttccgcagatgaagcccggttttgatcctagtaaaggaggaagacctgagttcttctttgatgatggagcttatccagaacaggttgactggattggtcagaagaatcagatagacgctgctaaggctgcaggagttaagcagattgttttggttgggtcgatgggaggaacaaacattaatcaccctctcaatagtattggcaatgctaacattctggtctggaagagaaaggctgagcaatacttggctgattccggtattccatacaccatcatcagggctggaggtctgcaggacaaggacggtggcattcgagaattacttgtgggaaaagatgacgagctacttgagacagaaacaagaacaatcgcaagagctgatgttgcagaagtctgtgttcaggcattgcagcttgaggaggcaaaattcaaagctcttgacctggcctcaaagcccgagggaacaggcaccccaacaaaggatttcaaggcgcttttcactcaagtaaccactaagttctgattaagtatttttttgttccctttgtcattgtagcaaagtcctagaattgacactgagagggatgagttctttatgtgtctgaaccggctctttctatttctcaagatgtcttgccctagaatctctaagtaacatcaaaagctttt

SEQ ID NO: 29330 - protein, 325 aa, Arabidopsis thaliana
  peptide (1)..(325): Ceres Seq. ID no. 12601146
  misc_feature (164)..(320): Homolog of NCBI NO: 17230243 NR Description: hypothetical protein [Nostoc sp. PCC 7120]
  misc_feature (170)..(311): Homolog of NCBI NO: 37523053 NR Description: hypothetical protein gll3484 [Gloeobacter
  misc_feature (164)..(321): Homolog of NCBI NO: 16330694 NR Description: hypothetical protein [Synechocystis sp. PCC 6803]
  misc_feature (3)..(324): Homolog of NCBI NO: 30689062 NR Description: expressed protein [Arabidopsis thaliana]
  misc_feature (78)..(320): Homolog of NCBI NO: 11358410 NR Description: hypothetical protein T7H20.290 - Arabidopsis
  misc_feature (78)..(325): Homolog of NCBI NO: 18413869 NR Description: putative protein
  misc_feature (78)..(325): Homolog of NCBI NO: 34897418 NR Description: unknown protein [Oryza sativa (japonica
  misc_feature (62)..(325): Homolog of NCBI NO: 14719331 NR Description: putative 3-beta hydroxysteroid
  misc_feature (1)..(325): Homolog of NCBI NO: 7485430 NR Description: hypothetical protein At2g37660 [imported] -
  misc_feature (1)..(325): Homolog of NCBI NO: 18404496 NR Description: expressed protein
  misc_feature (164)..(320): Homolog of NCBI NO: 17230243 NR Description: hypothetical protein [Nostoc sp. PCC 7120]
  misc_feature (170)..(311): Homolog of NCBI NO: 37523053 NR Description: hypothetical protein gll3484 [Gloeobacter
  misc_feature (164)..(321): Homolog of NCBI NO: 16330694 NR Description: hypothetical protein [Synechocystis sp. PCC 6803]
  misc_feature (3)..(324): Homolog of NCBI NO: 30689062 NR Description: expressed protein [Arabidopsis thaliana]
  misc_feature (78)..(320): Homolog of NCBI NO: 11358410 NR Description: hypothetical protein T7H20.290 - Arabidopsis
  misc_feature (78)..(325): Homolog of NCBI NO: 18413869 NR Description: putative protein
  misc_feature (78)..(325): Homolog of NCBI NO: 34897418 NR Description: unknown protein [Oryza sativa (japonica
  misc_feature (62)..(325): Homolog of NCBI NO: 14719331 NR Description: putative 3-beta hydroxysteroid
  misc_feature (1)..(325): Homolog of NCBI NO: 7485430 NR Description: hypothetical protein At2g37660 [imported] -
  misc_feature (1)..(325): Homolog of NCBI NO: 18404496 NR Description: expressed protein
  misc_feature (164)..(320): Homolog of NCBI NO: 17230243 NR Description: hypothetical protein [Nostoc sp. PCC 7120]
  misc_feature (170)..(311): Homolog of NCBI NO: 37523053 NR Description: hypothetical protein gll3484 [Gloeobacter
  misc_feature (164)..(321): Homolog of NCBI NO: 16330694 NR Description: hypothetical protein [Synechocystis sp. PCC 6803]
  misc_feature (3)..(324): Homolog of NCBI NO: 30689062 NR Description: expressed protein [Arabidopsis thaliana]
  misc_feature (78)..(320): Homolog of NCBI NO: 11358410 NR Description: hypothetical protein T7H20.290 - Arabidopsis
  misc_feature (78)..(325): Homolog of NCBI NO: 18413869 NR Description: putative protein
  misc_feature (78)..(325): Homolog of NCBI NO: 34897418 NR Description: unknown protein [Oryza sativa (japonica
  misc_feature (62)..(325): Homolog of NCBI NO: 14719331 NR Description: putative 3-beta hydroxysteroid
  misc_feature (1)..(325): Homolog of NCBI NO: 7485430 NR Description: hypothetical protein At2g37660 [imported] -
  misc_feature (1)..(325): Homolog of NCBI NO: 18404496 NR Description: expressed protein
  misc_feature (164)..(320): Homolog of NCBI NO: 17230243 NR Description: hypothetical protein [Nostoc sp. PCC 7120]
  misc_feature (170)..(311): Homolog of NCBI NO: 37523053 NR Description: hypothetical protein gll3484 [Gloeobacter
  misc_feature (164)..(321): Homolog of NCBI NO: 16330694 NR Description: hypothetical protein [Synechocystis sp. PCC 6803]
  misc_feature (3)..(324): Homolog of NCBI NO: 30689062 NR Description: expressed protein [Arabidopsis thaliana]
  misc_feature (78)..(320): Homolog of NCBI NO: 11358410 NR Description: hypothetical protein T7H20.290 - Arabidopsis
  misc_feature (78)..(325): Homolog of NCBI NO: 18413869 NR Description: putative protein
  misc_feature (78)..(325): Homolog of NCBI NO: 34897418 NR Description: unknown protein [Oryza sativa (japonica
  misc_feature (62)..(325): Homolog of NCBI NO: 14719331 NR Description: putative 3-beta hydroxysteroid
  misc_feature (1)..(325): Homolog of NCBI NO: 7485430 NR Description: hypothetical protein At2g37660 [imported] -
  misc_feature (1)..(325): Homolog of NCBI NO: 18404496 NR Description: expressed protein
MAMMTTTTTTFFHPLLPANTYKSGAVASSFVSVPRSSSLQFRSLVSDSTSICGPSKFTGKNRRVSVTVSAAATTEPLTVLVTGAGGRTGQIVYKKLKERSEQFVARGLVRTKESKEKINGEDEVFIGDIRDTASIAPAVEGIDALVILTSAVPQMKPGFDPSKGGRPEFFFDDGAYPEQVDWIGQKNQIDAAKAAGVKQIVLVGSMGGTNINHPLNSIGNANILVWKRKAEQYLADSGIPYTIIRAGGLQDKDGGIRELLVGKDDELLETETRTIARADVAEVCVQALQLEEAKFKALDLASKPEGTGTPTKDFKALFTQVTTKF

SEQ ID NO: 29331 - protein, 323 aa, Arabidopsis thaliana
  peptide (1)..(323): Ceres Seq. ID no. 12601147
  misc_feature (162)..(318): Homolog of NCBI NO: 17230243 NR Description: hypothetical protein [Nostoc sp. PCC 7120]
  misc_feature (168)..(309): Homolog of NCBI NO: 37523053 NR Description: hypothetical protein gll3484 [Gloeobacter
  misc_feature (162)..(319): Homolog of NCBI NO: 16330694 NR Description: hypothetical protein [Synechocystis sp. PCC 6803]
  misc_feature (1)..(322): Homolog of NCBI NO: 30689062 NR Description: expressed protein [Arabidopsis thaliana]
  misc_feature (76)..(318): Homolog of NCBI NO: 11358410 NR Description: hypothetical protein T7H20.290 - Arabidopsis
  misc_feature (76)..(323): Homolog of NCBI NO: 18413869 NR Description: putative protein
  misc_feature (76)..(323): Homolog of NCBI NO: 34897418 NR Description: unknown protein [Oryza sativa (japonica
  misc_feature (60)..(323): Homolog of NCBI NO: 14719331 NR Description: putative 3-beta hydroxysteroid
  misc_feature (1)..(323): Homolog of NCBI NO: 7485430 NR Description: hypothetical protein At2g37660 [imported] -
  misc_feature (1)..(323): Homolog of NCBI NO: 18404496 NR Description: expressed protein
  misc_feature (162)..(318): Homolog of NCBI NO: 17230243 NR Description: hypothetical protein [Nostoc sp. PCC 7120]
  misc_feature (168)..(309): Homolog of NCBI NO: 37523053 NR Description: hypothetical protein gll3484 [Gloeobacter
  misc_feature (162)..(319): Homolog of NCBI NO: 16330694 NR Description: hypothetical protein [Synechocystis sp. PCC 6803]
  misc_feature (1)..(322): Homolog of NCBI NO: 30689062 NR Description: expressed protein [Arabidopsis thaliana]
  misc_feature (76)..(318): Homolog of NCBI NO: 11358410 NR Description: hypothetical protein T7H20.290 - Arabidopsis
  misc_feature (76)..(323): Homolog of NCBI NO: 18413869 NR Description: putative protein
  misc_feature (76)..(323): Homolog of NCBI NO: 34897418 NR Description: unknown protein [Oryza sativa (japonica
  misc_feature (60)..(323): Homolog of NCBI NO: 14719331 NR Description: putative 3-beta hydroxysteroid
  misc_feature (1)..(323): Homolog of NCBI NO: 7485430 NR Description: hypothetical protein At2g37660 [imported] -
  misc_feature (1)..(323): Homolog of NCBI NO: 18404496 NR Description: expressed protein
  misc_feature (162)..(318): Homolog of NCBI NO: 17230243 NR Description: hypothetical protein [Nostoc sp. PCC 7120]
  misc_feature (168)..(309): Homolog of NCBI NO: 37523053 NR Description: hypothetical protein gll3484 [Gloeobacter
  misc_feature (162)..(319): Homolog of NCBI NO: 16330694 NR Description: hypothetical protein [Synechocystis sp. PCC 6803]
  misc_feature (1)..(322): Homolog of NCBI NO: 30689062 NR Description: expressed protein [Arabidopsis thaliana]
  misc_feature (76)..(318): Homolog of NCBI NO: 11358410 NR Description: hypothetical protein T7H20.290 - Arabidopsis
  misc_feature (76)..(323): Homolog of NCBI NO: 18413869 NR Description: putative protein
  misc_feature (76)..(323): Homolog of NCBI NO: 34897418 NR Description: unknown protein [Oryza sativa (japonica
  misc_feature (60)..(323): Homolog of NCBI NO: 14719331 NR Description: putative 3-beta hydroxysteroid
  misc_feature (1)..(323): Homolog of NCBI NO: 7485430 NR Description: hypothetical protein At2g37660 [imported] -
  misc_feature (1)..(323): Homolog of NCBI NO: 18404496 NR Description: expressed protein
  misc_feature (162)..(318): Homolog of NCBI NO: 17230243 NR Description: hypothetical protein [Nostoc sp. PCC 7120]
  misc_feature (168)..(309): Homolog of NCBI NO: 37523053 NR Description: hypothetical protein gll3484 [Gloeobacter
  misc_feature (162)..(319): Homolog of NCBI NO: 16330694 NR Description: hypothetical protein [Synechocystis sp. PCC 6803]
  misc_feature (1)..(322): Homolog of NCBI NO: 30689062 NR Description: expressed protein [Arabidopsis thaliana]
  misc_feature (76)..(318): Homolog of NCBI NO: 11358410 NR Description: hypothetical protein T7H20.290 - Arabidopsis
  misc_feature (76)..(323): Homolog of NCBI NO: 18413869 NR Description: putative protein
  misc_feature (76)..(323): Homolog of NCBI NO: 34897418 NR Description: unknown protein [Oryza sativa (japonica
  misc_feature (60)..(323): Homolog of NCBI NO: 14719331 NR Description: putative 3-beta hydroxysteroid
  misc_feature (1)..(323): Homolog of NCBI NO: 7485430 NR Description: hypothetical protein At2g37660 [imported] -
  misc_feature (1)..(323): Homolog of NCBI NO: 18404496 NR Description: expressed protein
MMTTTTTTFFHPLLPANTYKSGAVASSFVSVPRSSSLQFRSLVSDSTSICGPSKFTGKNRRVSVTVSAAATTEPLTVLVTGAGGRTGQIVYKKLKERSEQFVARGLVRTKESKEKINGEDEVFIGDIRDTASIAPAVEGIDALVILTSAVPQMKPGFDPSKGGRPEFFFDDGAYPEQVDWIGQKNQIDAAKAAGVKQIVLVGSMGGTNINHPLNSIGNANILVWKRKAEQYLADSGIPYTIIRAGGLQDKDGGIRELLVGKDDELLETETRTIARADVAEVCVQALQLEEAKFKALDLASKPEGTGTPTKDFKALFTQVTTKF

SEQ ID NO: 29332 - protein, 322 aa, Arabidopsis thaliana
  peptide (1)..(322): Ceres Seq. ID no. 12601148
  misc_feature (161)..(317): Homolog of NCBI NO: 17230243 NR Description: hypothetical protein [Nostoc sp. PCC 7120]
  misc_feature (167)..(308): Homolog of NCBI NO: 37523053 NR Description: hypothetical protein gll3484 [Gloeobacter
  misc_feature (161)..(318): Homolog of NCBI NO: 16330694 NR Description: hypothetical protein [Synechocystis sp. PCC 6803]
  misc_feature (1)..(321): Homolog of NCBI NO: 30689062 NR Description: expressed protein [Arabidopsis thaliana]
  misc_feature (75)..(317): Homolog of NCBI NO: 11358410 NR Description: hypothetical protein T7H20.290 - Arabidopsis
  misc_feature (75)..(322): Homolog of NCBI NO: 18413869 NR Description: putative protein
  misc_feature (75)..(322): Homolog of NCBI NO: 34897418 NR Description: unknown protein [Oryza sativa (japonica
  misc_feature (59)..(322): Homolog of NCBI NO: 14719331 NR Description: putative 3-beta hydroxysteroid
  misc_feature (1)..(322): Homolog of NCBI NO: 7485430 NR Description: hypothetical protein At2g37660 [imported] -
  misc_feature (1)..(322): Homolog of NCBI NO: 18404496 NR Description: expressed protein
  misc_feature (161)..(317): Homolog of NCBI NO: 17230243 NR Description: hypothetical protein [Nostoc sp. PCC 7120]
  misc_feature (167)..(308): Homolog of NCBI NO: 37523053 NR Description: hypothetical protein gll3484 [Gloeobacter
  misc_feature (161)..(318): Homolog of NCBI NO: 16330694 NR Description: hypothetical protein [Synechocystis sp. PCC 6803]
  misc_feature (1)..(321): Homolog of NCBI NO: 30689062 NR Description: expressed protein [Arabidopsis thaliana]
  misc_feature (75)..(317): Homolog of NCBI NO: 11358410 NR Description: hypothetical protein T7H20.290 - Arabidopsis
  misc_feature (75)..(322): Homolog of NCBI NO: 18413869 NR Description: putative protein
  misc_feature (75)..(322): Homolog of NCBI NO: 34897418 NR Description: unknown protein [Oryza sativa (japonica
  misc_feature (59)..(322): Homolog of NCBI NO: 14719331 NR Description: putative 3-beta hydroxysteroid
  misc_feature (1)..(322): Homolog of NCBI NO: 7485430 NR Description: hypothetical protein At2g37660 [imported] -
  misc_feature (1)..(322): Homolog of NCBI NO: 18404496 NR Description: expressed protein
  misc_feature (161)..(317): Homolog of NCBI NO: 17230243 NR Description: hypothetical protein [Nostoc sp. PCC 7120]
  misc_feature (167)..(308): Homolog of NCBI NO: 37523053 NR Description: hypothetical protein gll3484 [Gloeobacter
  misc_feature (161)..(318): Homolog of NCBI NO: 16330694 NR Description: hypothetical protein [Synechocystis sp. PCC 6803]
  misc_feature (1)..(321): Homolog of NCBI NO: 30689062 NR Description: expressed protein [Arabidopsis thaliana]
  misc_feature (75)..(317): Homolog of NCBI NO: 11358410 NR Description: hypothetical protein T7H20.290 - Arabidopsis
  misc_feature (75)..(322): Homolog of NCBI NO: 18413869 NR Description: putative protein
  misc_feature (75)..(322): Homolog of NCBI NO: 34897418 NR Description: unknown protein [Oryza sativa (japonica
  misc_feature (59)..(322): Homolog of NCBI NO: 14719331 NR Description: putative 3-beta hydroxysteroid
  misc_feature (1)..(322): Homolog of NCBI NO: 7485430 NR Description: hypothetical protein At2g37660 [imported] -
  misc_feature (1)..(322): Homolog of NCBI NO: 18404496 NR Description: expressed protein
  misc_feature (161)..(317): Homolog of NCBI NO: 17230243 NR Description: hypothetical protein [Nostoc sp. PCC 7120]
  misc_feature (167)..(308): Homolog of NCBI NO: 37523053 NR Description: hypothetical protein gll3484 [Gloeobacter
  misc_feature (161)..(318): Homolog of NCBI NO: 16330694 NR Description: hypothetical protein [Synechocystis sp. PCC 6803]
  misc_feature (1)..(321): Homolog of NCBI NO: 30689062 NR Description: expressed protein [Arabidopsis thaliana]
  misc_feature (75)..(317): Homolog of NCBI NO: 11358410 NR Description: hypothetical protein T7H20.290 - Arabidopsis
  misc_feature (75)..(322): Homolog of NCBI NO: 18413869 NR Description: putative protein
  misc_feature (75)..(322): Homolog of NCBI NO: 34897418 NR Description: unknown protein [Oryza sativa (japonica
  misc_feature (59)..(322): Homolog of NCBI NO: 14719331 NR Description: putative 3-beta hydroxysteroid
  misc_feature (1)..(322): Homolog of NCBI NO: 7485430 NR Description: hypothetical protein At2g37660 [imported] -
  misc_feature (1)..(322): Homolog of NCBI NO: 18404496 NR Description: expressed protein
MTTTTTTFFHPLLPANTYKSGAVASSFVSVPRSSSLQFRSLVSDSTSICGPSKFTGKNRRVSVTVSAAATTEPLTVLVTGAGGRTGQIVYKKLKERSEQFVARGLVRTKESKEKINGEDEVFIGDIRDTASIAPAVEGIDALVILTSAVPQMKPGFDPSKGGRPEFFFDDGAYPEQVDWIGQKNQIDAAKAAGVKQIVLVGSMGGTNINHPLNSIGNANILVWKRKAEQYLADSGIPYTIIRAGGLQDKDGGIRELLVGKDDELLETETRTIARADVAEVCVQALQLEEAKFKALDLASKPEGTGTPTKDFKALFTQVTTKF

SEQ ID NO: 29333 - DNA, 1400 bp, Arabidopsis thaliana
  misc_feature (1)..(1400): Ceres Seq. ID no. 12396512
  misc_feature: MA Experiment ID: 108434 Result: Up-regulated in Transcription
  misc_feature: MA Experiment 108434 PARAMETER Experiment Name: At_Root_Tips_cDNA_P Parameter: Tissue Value: Root Tips
  misc_feature: MA Experiment ID: 108462 Result: Down-regulated in Transcription
  misc_feature: MA Experiment 108462 PARAMETER Experiment Name: At_Germinating_Seeds_cDNA_P Parameter: Age (day) Value: 2 vs. 0
  misc_feature: MA Experiment 108462 PARAMETER Experiment Name: At_Germinating_Seeds_cDNA_P Parameter: Tissue Value: Germinating Seeds
  misc_feature: MA Experiment ID: 108463 Result: Down-regulated in Transcription
  misc_feature: MA Experiment 108463 PARAMETER Experiment Name: At_Germinating_Seeds_cDNA_P Parameter: Age (day) Value: 3 vs. 0
  misc_feature: MA Experiment 108463 PARAMETER Experiment Name: At_Germinating_Seeds_cDNA_P Parameter: Tissue Value: Germinating Seeds
  misc_feature: MA Experiment ID: 108595 Result: Down-regulated in Transcription
  misc_feature: MA Experiment 108595 PARAMETER Experiment Name: At_Ler-pi_Ovule_cDNA_P Parameter: Plant Line Value: null
  misc_feature: MA Experiment ID: 20000234 Result: Up-regulated in Transcription
  misc_feature: MA Experiment 20000234 PARAMETER Experiment Name: At_Siliques_P Parameter: Age (day) Value: 21
  misc_feature: MA Experiment 20000234 PARAMETER Experiment Name: At_Siliques_P Parameter: Organism Value: A. thaliana
  misc_feature: MA Experiment 20000234 PARAMETER Experiment Name: At_Siliques_P Parameter: Plant Line Value: WS
  misc_feature: MA Experiment 20000234 PARAMETER Experiment Name: At_Siliques_P Parameter: Tissue Value: Less Than 5mm Siliques vs. Whole Plant
  misc_feature: MA Experiment ID: 20001557 Result: Up-regulated in Transcription
  misc_feature: MA Experiment 20001557 PARAMETER Experiment Name: At_Drought_Soil_Dry_P Parameter: Age (day) Value: 27
  misc_feature: MA Experiment 20001557 PARAMETER Experiment Name: At_Drought_Soil_Dry_P Parameter: Organism Value: A. thaliana
  misc_feature: MA Experiment 20001557 PARAMETER Experiment Name: At_Drought_Soil_Dry_P Parameter: Plant Line Value: WS
  misc_feature: MA Experiment 20001557 PARAMETER Experiment Name: At_Drought_Soil_Dry_P Parameter: Post Timepoint (hr) Value: 3
  misc_feature: MA Experiment 20001557 PARAMETER Experiment Name: At_Drought_Soil_Dry_P Parameter: Post-Treatment Value: Re-Water vs. No Drought
  misc_feature: MA Experiment 20001557 PARAMETER Experiment Name: At_Drought_Soil_Dry_P Parameter: Timepoint (day) Value: 13
  misc_feature: MA Experiment 20001557 PARAMETER Experiment Name: At_Drought_Soil_Dry_P Parameter: Treatment Value: Drought vs. No Drought
attttccgtttgtgttccttgctcatttcttatctctagaaacctgtctgatttgctccgtcgcctaaaaagtctaaaaccctaagtgtctccgcctcgtagctttacccgattcaacgaagagtgaattcgcgtgagctcaagcagtatcgaaatctaccaatcatggcgagtcaaacaccgaatctcgagtgtcggatgtacgaggcgaaatacccagaggtggatatggcggtgatgatccaggtgaagaacattgccgatatgggagcttatgtttctctcctcgagtacaacaacatcgaaggcatgatccttttctccgagctctctcgtcgtcggatccgaagtgttagcagtttgattaaggtcggaagaattgagcctgtcatggttctccgtgttgacaaagagaaaggttacattgatctgagcaaacgtagagtcagcgaggaagatattcagacttgtgaagagaggtataacaagagcaaacttgttcattctatcatgcgccatgttgctgagactctttcaattgatttggaggacttgtatgtgaacattggttggcctttgtatcgacgacatggtcatgcttttgaggctttcaagatcttagtgacggatcctgattcagtgttgggtcctctcacccgtgagatcaaagaagttgggcctgatgggcaagaggtgactaaggttgtacctgctgttacggaagaagtgaaagatgcacttgtgaagaacattaggaggagaatgacaccacaaccaatgaaaatccgggctgatatcgaattgaagtgttttcagtttgatggagttgttcacattaaggaggctatgaaaaatgctgaagccgctggaaatgaagactgtcctgttaagattaaattggttgctccacctctgtatgtccttactactcagacacttgacaaggaacaagggattgaaattctaaacaaagccatagcagcatgcactgagacaattgagacacacaaaggcaagcttgtcgttaaggagggggctagagctgtgagtgaacgtgatgaaaagatgctgacagaacacatggctaagctacgtcttgacaatgaagaaatgagcggcgatgaagatagcggagacgaagaagaggacactggtatgggcgaagtggatctcgatgcaggtgccggaatcatcgagtaagattgccggatttttctttccattaaatctacccaatctcaacagtcccagtattttggtttaagctttgacaaggcagtagaaaaacctccgagaggatttatgtgctttttgatgactctgaggcattttattttacccatagggggtggttacatatcaatcatacattcatggttttataaaagatttgattcttt

SEQ ID NO: 29334 - protein, 344 aa, Arabidopsis thaliana [sequence omitted]

SEQ ID NO: 29335 - protein, 333 aa, Arabidopsis thaliana
  peptide (1)..(333): Ceres Seq. ID no. 12396514
  misc_feature (6)..(81): Pfam Name: S1 RNA binding domain Pfam Description: S1 RNA binding domain
  misc_feature (1)..(315): Homolog of NCBI NO: 12711655 NR Description: eukaryotic initiation factor 2 alpha subunit
  misc_feature (166)..(333): Homolog of NCBI NO: 4588003 NR Description: hypothetical EIF-2-Alpha [Arabidopsis thaliana]
  misc_feature (171)..(314): Homolog of NCBI NO: 19114993 NR Description: eukaryotic translation initiation factor 2 alpha
  misc_feature (1)..(148): Homolog of NCBI NO: 19114993 NR Description: eukaryotic translation initiation factor 2 alpha
  misc_feature (1)..(330): Homolog of NCBI NO: 34898218 NR Description: putative eukaryotic translation initiation factor
  misc_feature (1)..(268): Homolog of NCBI NO: 4588003 NR Description: hypothetical EIF-2-Alpha [Arabidopsis thaliana]
  misc_feature (1)..(333): Homolog of NCBI NO: 13549160 NR Description: protein synthesis initiation factor eIF2 alpha
  misc_feature (1)..(333): Homolog of NCBI NO: 15239135 NR Description: eukaryotic translation initiation factor 2 alpha
  misc_feature (1)..(333): Homolog of NCBI NO: 21537411 NR Description: putative eukaryotic translation initiation factor
  misc_feature (1)..(333): Homolog of NCBI NO: 18405334 NR Description: putative eukaryotic translation initiation factor
MYEAKYPEVDMAVMIQVKNIADMGAYVSLLEYNNIEGMILFSELSRRRIRSVSSLIKVGRIEPVMVLRVDKEKGYIDLSKRRVSEEDIQTCEERYNKSKLVHSIMRHVAETLSIDLEDLYVNIGWPLYRRHGHAFEAFKILVTDPDSVLGPLTREIKEVGPDGQEVTKVVPAVTEEVKDALVKNIRRRMTPQPMKIRADIELKCFQFDGVVHIKEAMKNAEAAGNEDCPVKIKLVAPPLYVLTTQTLDKEQGIEILNKAIAACTETIETHKGKLVVKEGARAVSERDEKMLTEHMAKLRLDNEEMSGDEDSGDEEEDTGMGEVDLDAGAGIIE

SEQ ID NO: 29336 - protein, 323 aa, Arabidopsis thaliana
  peptide (1)..(323): Ceres Seq. ID no. 12396515
  misc_feature (1)..(71): Pfam Name: S1 RNA binding domain Pfam Description: S1 RNA binding domain
  misc_feature (1)..(305): Homolog of NCBI NO: 12711655 NR Description: eukaryotic initiation factor 2 alpha subunit
  misc_feature (156)..(323): Homolog of NCBI NO: 4588003 NR Description: hypothetical EIF-2-Alpha [Arabidopsis thaliana]
  misc_feature (161)..(304): Homolog of NCBI NO: 19114993 NR Description: eukaryotic translation initiation factor 2 alpha
  misc_feature (1)..(138): Homolog of NCBI NO: 19114993 NR Description: eukaryotic translation initiation factor 2 alpha
  misc_feature (1)..(320): Homolog of NCBI NO: 34898218 NR Description: putative eukaryotic translation initiation factor
  misc_feature (1)..(258): Homolog of NCBI NO: 4588003 NR Description: hypothetical EIF-2-Alpha [Arabidopsis thaliana]
  misc_feature (1)..(323): Homolog of NCBI NO: 13549160 NR Description: protein synthesis initiation factor eIF2 alpha
  misc_feature (1)..(323): Homolog of NCBI NO: 15239135 NR Description: eukaryotic translation initiation factor 2 alpha
  misc_feature (1)..(323): Homolog of NCBI NO: 21537411 NR Description: putative eukaryotic translation initiation factor
  misc_feature (1)..(323): Homolog of NCBI NO: 18405334 NR Description: putative eukaryotic translation initiation factor
MAVMIQVKNIADMGAYVSLLEYNNIEGMILFSELSRRRIRSVSSLIKVGRIEPVMVLRVDKEKGYIDLSKRRVSEEDIQTCEERYNKSKLVHSIMRHVAETLSIDLEDLYVNIGWPLYRRHGHAFEAFKILVTDPDSVLGPLTREIKEVGPDGQEVTKVVPAVTEEVKDALVKNIRRRMTPQPMKIRADIELKCFQFDGVVHIKEAMKNAEAAGNEDCPVKIKLVAPPLYVLTTQTLDKEQGIEILNKAIAACTETIETHKGKLVVKEGARAVSERDEKMLTEHMAKLRLDNEEMSGDEDSGDEEEDTGMGEVDLDAGAGIIE

SEQ ID NO: 29337 - DNA, 1489 bp, Arabidopsis thaliana
  misc_feature (1)..(1489): Ceres Seq. ID no. 12371848
  misc_feature: MA Experiment ID: 108433 Result: Down-regulated in Transcription
  misc_feature: MA Experiment 108433 PARAMETER Experiment Name: At_rhl_Mutant2_cDNA_P Parameter: Age (day) Value: 7
  misc_feature: MA Experiment 108433 PARAMETER Experiment Name: At_rhl_Mutant2_cDNA_P Parameter: Organism Value: A. thaliana
  misc_feature: MA Experiment 108433 PARAMETER Experiment Name: At_rhl_Mutant2_cDNA_P Parameter: Plant Line Value: rhl Mutant vs. wt landsburg
  misc_feature: MA Experiment 108433 PARAMETER Experiment Name: At_rhl_Mutant2_cDNA_P Parameter: Tissue Value: Roots
  misc_feature: MA Experiment ID: 20000315 Result: Down-regulated in Transcription
  misc_feature: MA Experiment 20000315 PARAMETER Experiment Name: At_14day_Shoots-Roots_Sub_P Parameter: Age (day) Value: 14
  misc_feature: MA Experiment 20000315 PARAMETER Experiment Name: At_14day_Shoots-Roots_Sub_P Parameter: Organism Value: A. thaliana
  misc_feature: MA Experiment 20000315 PARAMETER Experiment Name: At_14day_Shoots-Roots_Sub_P Parameter: Plant Line Value: WS
  misc_feature: MA Experiment 20000315 PARAMETER Experiment Name: At_14day_Shoots-Roots_Sub_P Parameter: Tissue Value: Shoots vs. Whole Plant
  misc_feature: MA Experiment ID: 20000328 Result: Down-regulated in Transcription
  misc_feature: MA Experiment 20000328 PARAMETER Experiment Name: At_42deg_Heat_Sub_P Parameter: Age (day) Value: 14
  misc_feature: MA Experiment 20000328 PARAMETER Experiment Name: At_42deg_Heat_Sub_P Parameter: Organism Value: A. thaliana
  misc_feature: MA Experiment 20000328 PARAMETER Experiment Name: At_42deg_Heat_Sub_P Parameter: Plant Line Value: WS
  misc_feature: MA Experiment 20000328 PARAMETER Experiment Name: At_42deg_Heat_Sub_P Parameter: Temperature (deg C) Value: 42 vs. 22
  misc_feature: MA Experiment 20000328 PARAMETER Experiment Name: At_42deg_Heat_Sub_P Parameter: Timepoint (hr) Value: 6
  misc_feature: MA Experiment 20000328 PARAMETER Experiment Name: At_42deg_Heat_Sub_P Parameter: Tissue Value: Aerial
aaagataacagaaaaacaaaaacaaaaaatttctgctttgaagaagaagagtcgatccataatcaccactttcagatttccagattctggggaaatatcttcaacgatggcgactgagaatctcaccgataagaatgttgttttcagaaagctgaaatcaaaatccgagaacaaggtttgctttgattgtagtgcgaagaatccaacatgggcttctgttccttatgggatcttcctatgcatcgattgttctgctgttcatcgaagtctaggtgttcatatcagcttcgtcaggtcaacgaacttagactcgtggagtcctgagcagctaagaacaatgatgtttggagggaacaatcgagctcaggtgttttttaagcaacatggatggaatgatggtggtaagattgaggctaagtatacttcaagagctgctgatatgtatagacagactcttgctaaagaagttgctaaagccatggctgaagaaactgttttaccgtcgttatcctctgttgctacttctcagccagtggaatcatctgaaaatgggtttacttctgaatctccgaaagagagttctttggttaagcaagaagcagctgttgtctcttcaccaaaagcttctcagaaagttgttgctagtacgtttaagaaacctcttgtttcgcgaaagtctgggaagactggtggtcttggtgctcgtaagcttactactaagtcaaaggataacctctatgagcagaagcctgaagaacctgtacctgtgattcctgctgcttctccaaccaatgacacatcagcagctggatcatcatttgcctctcgatttgagtactttgatgatgagcaatctggtgggcaaagtggcacacgggtgcttagccatgttgctccaccaaagtcatcaaatttctttaatgaatttggaatggacagtgctttccccaagaagtcaagctcaagctcatccaaagctcaggttgaagaaacagatgaagcaagaaagaagttttcaaacgccaaatcgatttcctctgcccaatttttcggaaatcagaacagagatgccgatcttgactcaaaagctacccttcagaagttctcgggttcagcagctatttcaagttctgatctttttggccacggaccagatgattccaacatcgatatcactgcaagcgatctcatcaaccgaatttctttccaggcgcagcaagatatgtcatctattgctaacttagctgaggaaacaaagaataagctgggaacatttgcctctagtatattcagtgatcttcaggatagaatgctgtaagaaacatacaaaggatcttgtcttttgatttacagagaacaaattgttggatataaatgtcatttttatttttggtttgactttgtagttgaaagagtgatttttgaggtaaattgttaaatgtggaatttgataatttgatatggataaggtagaatatgttacagtatc

SEQ ID NO: 29338 - protein, 438 aa, Arabidopsis thaliana
  peptide (1)..(438): Ceres Seq. ID no. 12371849
  misc_feature (45)..(161): Pfam Name: Putative GTPase activating protein for Arf Pfam Description: Putative GTPase activating protein for Arf
  misc_feature (224)..(436): Homolog of NCBI NO: 14042190 NR Description: unnamed protein product [Homo sapiens]
  misc_feature (45)..(189): Homolog of NCBI NO: 37362182 NR Description: ADP-ribosylation factor GTPase activating protein
  misc_feature (186)..(436): Homolog of NCBI NO: 37362182 NR Description: ADP-ribosylation factor GTPase activating protein
  misc_feature (36)..(438): Homolog of NCBI NO: 29126345 NR Description: putative zinc finger protein
  misc_feature (36)..(430): Homolog of NCBI NO: 18403775 NR Description: expressed protein
  misc_feature (36)..(438): Homolog of NCBI NO: 37537094 NR Description: unknown protein [Oryza sativa (japonica
  misc_feature (34)..(438): Homolog of NCBI NO: 13430530 NR Description: unknown protein [Arabidopsis thaliana]
  misc_feature (34)..(438): Homolog of NCBI NO: 18414983 NR Description: Expressed protein; protein id: At4g17890.1
  misc_feature (34)..(438): Homolog of NCBI NO: 7487780 NR Description: hypothetical protein T6K21.70 - Arabidopsis
  misc_feature (36)..(438): Homolog of NCBI NO: 15237500 NR Description: zinc finger protein Glo3-like
KITEKQKQKISALKKKSRSIITTFRFPDSGEISSTMATENLTDKNVVFRKLKSKSENKVCFDCSAKNPTWASVPYGIFLCIDCSAVHRSLGVHISFVRSTNLDSWSPEQLRTMMFGGNNRAQVFFKQHGWNDGGKIEAKYTSRAADMYRQTLAKEVAKAMAEETVLPSLSSVATSQPVESSENGFTSESPKESSLVKQEAAVVSSPKASQKVVASTFKKPLVSRKSGKTGGLGARKLTTKSKDNLYEQKPEEPVPVIPAASPTNDTSAAGSSFASRFEYFDDEQSGGQSGTRVLSHVAPPKSSNFFNEFGMDSAFPKKSSSSSSKAQVEETDEARKKFSNAKSISSAQFFGNQNRDADLDSKATLQKFSGSAAISSSDLFGHGPDDSNIDITASDLINRISFQAQQDMSSIANLAEETKNKLGTFASSIFSDLQDRML

SEQ ID NO: 29339 - protein, 403 aa, Arabidopsis thaliana
  peptide (1)..(403): Ceres Seq. ID no. 12371850
  misc_feature (10)..(126): Pfam Name: Putative GTPase activating protein for Arf Pfam Description: Putative GTPase activating protein for Arf
  misc_feature (189)..(401): Homolog of NCBI NO: 14042190 NR Description: unnamed protein product [Homo sapiens]
  misc_feature (10)..(154): Homolog of NCBI NO: 37362182 NR Description: ADP-ribosylation factor GTPase activating protein
  misc_feature (151)..(401): Homolog of NCBI NO: 37362182 NR Description: ADP-ribosylation factor GTPase activating protein
  misc_feature (1)..(403): Homolog of NCBI NO: 29126345 NR Description: putative zinc finger protein
  misc_feature (1)..(395): Homolog of NCBI NO: 18403775 NR Description: expressed protein
  misc_feature (1)..(403): Homolog of NCBI NO: 37537094 NR Description: unknown protein [Oryza sativa (japonica
  misc_feature (1)..(403): Homolog of NCBI NO: 13430530 NR Description: unknown protein [Arabidopsis thaliana]
  misc_feature (1)..(403): Homolog of NCBI NO: 18414983 NR Description: Expressed protein; protein id: At4g17890.1
  misc_feature (1)..(403): Homolog of NCBI NO: 7487780 NR Description: hypothetical protein T6K21.70 - Arabidopsis
  misc_feature (1)..(403): Homolog of NCBI NO: 15237500 NR Description: zinc finger protein Glo3-like
MATENLTDKNVVFRKLKSKSENKVCFDCSAKNPTWASVPYGIFLCIDCSAVHRSLGVHISFVRSTNLDSWSPEQLRTMMFGGNNRAQVFFKQHGWNDGGKIEAKYTSRAADMYRQTLAKEVAKAMAEETVLPSLSSVATSQPVESSENGFTSESPKESSLVKQEAAVVSSPKASQKVVASTFKKPLVSRKSGKTGGLGARKLTTKSKDNLYEQKPEEPVPVIPAASPTNDTSAAGSSFASRFEYFDDEQSGGQSGTRVLSHVAPPKSSNFFNEFGMDSAFPKKSSSSSSKAQVEETDEARKKFSNAKSISSAQFFGNQNRDADLDSKATLQKFSGSAAISSSDLFGHGPDDSNIDITASDLINRISFQAQQDMSSIANLAEETKNKLGTFASSIFSDLQDRML

SEQ ID NO: 29340 - protein, 326 aa, Arabidopsis thaliana
  peptide (1)..(326): Ceres Seq. ID no. 12371851
  misc_feature (112)..(324): Homolog of NCBI NO: 14042190 NR Description: unnamed protein product [Homo sapiens]
  misc_feature (1)..(77): Homolog of NCBI NO: 37362182 NR Description: ADP-ribosylation factor GTPase activating protein
  misc_feature (74)..(324): Homolog of NCBI NO: 37362182 NR Description: ADP-ribosylation factor GTPase activating protein
  misc_feature (1)..(326): Homolog of NCBI NO: 29126345 NR Description: putative zinc finger protein
  misc_feature (1)..(318): Homolog of NCBI NO: 18403775 NR Description: expressed protein
  misc_feature (1)..(326): Homolog of NCBI NO: 37537094 NR Description: unknown protein [Oryza sativa (japonica
  misc_feature (1)..(326): Homolog of NCBI NO: 13430530 NR Description: unknown protein [Arabidopsis thaliana]
  misc_feature (1)..(326): Homolog of NCBI NO: 18414983 NR Description: Expressed protein; protein id: At4g17890.1
  misc_feature (1)..(326): Homolog of NCBI NO: 7487780 NR Description: hypothetical protein T6K21.70 - Arabidopsis
  misc_feature (1)..(326): Homolog of NCBI NO: 15237500 NR Description: zinc finger protein Glo3-like
MMFGGNNRAQVFFKQHGWNDGGKIEAKYTSRAADMYRQTLAKEVAKAMAEETVLPSLSSVATSQPVESSENGFTSESPKESSLVKQEAAVVSSPKASQKVVASTFKKPLVSRKSGKTGGLGARKLTTKSKDNLYEQKPEEPVPVIPAASPTNDTSAAGSSFASRFEYFDDEQSGGQSGTRVLSHVAPPKSSNFFNEFGMDSAFPKKSSSSSSKAQVEETDEARKKFSNAKSISSAQFFGNQNRDADLDSKATLQKFSGSAAISSSDLFGHGPDDSNIDITASDLINRISFQAQQDMSSIANLAEETKNKLGTFASSIFSDLQDRML

SEQ ID NO: 29341 - DNA, 1086 bp, Arabidopsis thaliana
  misc_feature (1)..(1086): Ceres Seq. ID no. 13493751
  misc_feature: MA Experiment ID: 108435 Result: Down-regulated in Transcription
  misc_feature: MA Experiment 108435 PARAMETER Experiment Name: At_stm_Mutants_cDNA_P Parameter: Plant Line Value: wt Landsburg vs stm
  misc_feature: MA Experiment 108435 PARAMETER Experiment Name: At_stm_Mutants_cDNA_P Parameter: Tissue Value: Shoot Apical Meristem Region
  misc_feature: MA Experiment ID: 108462 Result: Up-regulated in Transcription
  misc_feature: MA Experiment 108462 PARAMETER Experiment Name: At_Germinating_Seeds_cDNA_P Parameter: Age (day) Value: 2 vs. 0
  misc_feature: MA Experiment 108462 PARAMETER Experiment Name: At_Germinating_Seeds_cDNA_P Parameter: Tissue Value: Germinating Seeds
  misc_feature: MA Experiment ID: 108569 Result: Up-regulated in Transcription
  misc_feature: MA Experiment 108569 PARAMETER Experiment Name: At_0.001%_MeJA__cDNA_P Parameter: Timepoint (hr) Value: 6
  misc_feature: MA Experiment 108569 PARAMETER Experiment Name: At_0.001%_MeJA__cDNA_P Parameter: Tissue Value: Aerial
  misc_feature: MA Experiment 108569 PARAMETER Experiment Name: At_0.001%_MeJA__cDNA_P Parameter: Treatment Value: 0.001% MeJA vs. No Treatment
  misc_feature: MA Experiment ID: 108572 Result: Up-regulated in Transcription
  misc_feature: MA Experiment 108572 PARAMETER Experiment Name: At_Drought_cDNA_P Parameter: Timepoint (hr) Value: 1
  misc_feature: MA Experiment 108572 PARAMETER Experiment Name: At_Drought_cDNA_P Parameter: Tissue Value: Aerial
  misc_feature: MA Experiment 108572 PARAMETER Experiment Name: At_Drought_cDNA_P Parameter: Treatment Value: Drought vs. No Drought
  misc_feature: MA Experiment ID: 108573 Result: Up-regulated in Transcription
  misc_feature: MA Experiment 108573 PARAMETER Experiment Name: At_Drought_cDNA_P Parameter: Timepoint (hr) Value: 6
  misc_feature: MA Experiment 108573 PARAMETER Experiment Name: At_Drought_cDNA_P Parameter: Tissue Value: Aerial
  misc_feature: MA Experiment 108573 PARAMETER Experiment Name: At_Drought_cDNA_P Parameter: Treatment Value: Drought vs. No Drought
  misc_feature: MA Experiment ID: 108574 Result: Up-regulated in Transcription
  misc_feature: MA Experiment 108574 PARAMETER Experiment Name: At_Wounding__cDNA_P Parameter: Timepoint (hr) Value: 1
  misc_feature: MA Experiment 108574 PARAMETER Experiment Name: At_Wounding__cDNA_P Parameter: Tissue Value: Aerial
  misc_feature: MA Experiment 108574 PARAMETER Experiment Name: At_Wounding__cDNA_P Parameter: Treatment Value: Wounding vs. No Wounding
  misc_feature: MA Experiment ID: 108595 Result: Up-regulated in Transcription
  misc_feature: MA Experiment 108595 PARAMETER Experiment Name: At_Ler-pi_Ovule_cDNA_P Parameter: Plant Line Value: null
  misc_feature: MA Experiment ID: 20000185 Result: Down-regulated in Transcription
  misc_feature: MA Experiment 20000185 PARAMETER Experiment Name: At_Roots__P Parameter: Age (day) Value: 7 vs. 21
  misc_feature: MA Experiment 20000185 PARAMETER Experiment Name: At_Roots__P Parameter: Organism Value: A. thaliana
  misc_feature: MA Experiment 20000185 PARAMETER Experiment Name: At_Roots__P Parameter: Tissue Value: Roots vs. Whole Plant
  misc_feature: MA Experiment ID: 20000211 Result: Up-regulated in Transcription
  misc_feature: MA Experiment 20000211 PARAMETER Experiment Name: At_0.001percent_MeJA__P Parameter: Age (day) Value: 14
  misc_feature: MA Experiment 20000211 PARAMETER Experiment Name: At_0.001percent_MeJA__P Parameter: Organism Value: A. thaliana
  misc_feature: MA Experiment 20000211 PARAMETER Experiment Name: At_0.001percent_MeJA__P Parameter: Plant Line Value: WS
  misc_feature: MA Experiment 20000211 PARAMETER Experiment Name: At_0.001percent_MeJA__P Parameter: Timepoint (hr) Value: 1
  misc_feature: MA Experiment 20000211 PARAMETER Experiment Name: At_0.001percent_MeJA__P Parameter: Tissue Value: Aerial
  misc_feature: MA Experiment 20000211 PARAMETER Experiment Name: At_0.001percent_MeJA__P Parameter: Treatment Value: 0.001percent MeJA vs. No Treatment
  misc_feature: MA Experiment ID: 20000234 Result: Up-regulated in Transcription
  misc_feature: MA Experiment 20000234 PARAMETER Experiment Name: At_Siliques_P Parameter: Age (day) Value: 21
  misc_feature: MA Experiment 20000234 PARAMETER Experiment Name: At_Siliques_P Parameter: Organism Value: A. thaliana
  misc_feature: MA Experiment 20000234 PARAMETER Experiment Name: At_Siliques_P Parameter: Plant Line Value: WS
  misc_feature: MA Experiment 20000234 PARAMETER Experiment Name: At_Siliques_P Parameter: Tissue Value: Less Than 5mm Siliques vs. Whole Plant
  misc_feature: MA Experiment ID: 20000235 Result: Up-regulated in Transcription
  misc_feature: MA Experiment 20000235 PARAMETER Experiment Name: At_Siliques_P Parameter: Age (day) Value: 21
  misc_feature: MA Experiment 20000235 PARAMETER Experiment Name: At_Siliques_P Parameter: Organism Value: A. thaliana
  misc_feature: MA Experiment 20000235 PARAMETER Experiment Name: At_Siliques_P Parameter: Plant Line Value: WS
  misc_feature: MA Experiment 20000235 PARAMETER Experiment Name: At_Siliques_P Parameter: Tissue Value: 5-10mm Siliques vs. Whole Plant
  misc_feature: MA Experiment ID: 20000264 Result: Up-regulated in Transcription
  misc_feature: MA Experiment 20000264 PARAMETER Experiment Name: At_Open_Flower_P Parameter: Age (day) Value: 21
  misc_feature: MA Experiment 20000264 PARAMETER Experiment Name: At_Open_Flower_P Parameter: Plant Line Value: WS
  misc_feature: MA Experiment 20000264 PARAMETER Experiment Name: At_Open_Flower_P Parameter: Tissue Value: Open Flower vs. Whole Plant
  misc_feature: MA Experiment ID: 20000265 Result: Up-regulated in Transcription
  misc_feature: MA Experiment 20000265 PARAMETER Experiment Name: At_Open_Flower_P Parameter: Age (day) Value: 21
  misc_feature: MA Experiment 20000265 PARAMETER Experiment Name: At_Open_Flower_P Parameter: Plant Line Value: WS
  misc_feature: MA Experiment 20000265 PARAMETER Experiment Name: At_Open_Flower_P Parameter: Tissue Value: Closed Flower vs. Whole Plant
  misc_feature: MA Experiment ID: 20000439 Result: Down-regulated in Transcription
  misc_feature: MA Experiment 20000439 PARAMETER Experiment Name: At_Roots__P Parameter: Age (day) Value: 14 vs. 21
  misc_feature: MA Experiment 20000439 PARAMETER Experiment Name: At_Roots__P Parameter: Organism Value: A. thaliana
  misc_feature: MA Experiment 20000439 PARAMETER Experiment Name: At_Roots__P Parameter: Tissue Value: Roots vs. Whole Plant
  misc_feature: MA Experiment ID: 20000794 Result: Down-regulated in Transcription
  misc_feature: MA Experiment 20000794 PARAMETER Experiment Name: At_Petals_P Parameter: Age (day) Value: 23-25 days
  misc_feature: MA Experiment 20000794 PARAMETER Experiment Name: At_Petals_P Parameter: Plant Line Value: WS
  misc_feature: MA Experiment 20000794 PARAMETER Experiment Name: At_Petals_P Parameter: Tissue Value: Petals vs. Whole plant
  misc_feature: MA Experiment ID: 20001248 Result: Down-regulated in Transcription
  misc_feature: MA Experiment 20001248 PARAMETER Experiment Name: At_Far-red-induction_P Parameter: Age (day) Value: 7
  misc_feature: MA Experiment 20001248 PARAMETER Experiment Name: At_Far-red-induction_P Parameter: Light Value: Far-red vs. White
  misc_feature: MA Experiment 20001248 PARAMETER Experiment Name: At_Far-red-induction_P Parameter: Organism Value: A. thaliana
  misc_feature: MA Experiment 20001248 PARAMETER Experiment Name: At_Far-red-induction_P Parameter: Plant Line Value: Columbia
  misc_feature: MA Experiment 20001248 PARAMETER Experiment Name: At_Far-red-induction_P Parameter: Timepoint (hr) Value: 4
  misc_feature: MA Experiment 20001248 PARAMETER Experiment Name: At_Far-red-induction_P Parameter: Tissue Value: Whole Plant
  misc_feature: MA Experiment ID: 20001504 Result: Down-regulated in Transcription
  misc_feature: MA Experiment 20001504 PARAMETER Experiment Name: At_Far-red-enriched_P Parameter: Age (day) Value: 10
  misc_feature: MA Experiment 20001504 PARAMETER Experiment Name: At_Far-red-enriched_P Parameter: Light Value: Far-red enriched vs. White
  misc_feature: MA Experiment 20001504 PARAMETER Experiment Name: At_Far-red-enriched_P Parameter: Organism Value: A. thaliana
  misc_feature: MA Experiment 20001504 PARAMETER Experiment Name: At_Far-red-enriched_P Parameter: Plant Line Value: Columbia
  misc_feature: MA Experiment 20001504 PARAMETER Experiment Name: At_Far-red-enriched_P Parameter: Timepoint (day) Value: 6
  misc_feature: MA Experiment 20001504 PARAMETER Experiment Name: At_Far-red-enriched_P Parameter: Tissue Value: Whole Plant
  misc_feature: MA Experiment ID: 20001557 Result: Down-regulated in Transcription
  misc_feature: MA Experiment 20001557 PARAMETER Experiment Name: At_Drought_Soil_Dry_P Parameter: Age (day) Value: 27
  misc_feature: MA Experiment 20001557 PARAMETER Experiment Name: At_Drought_Soil_Dry_P Parameter: Organism Value: A. thaliana
  misc_feature: MA Experiment 20001557 PARAMETER Experiment Name: At_Drought_Soil_Dry_P Parameter: Plant Line Value: WS
  misc_feature: MA Experiment 20001557 PARAMETER Experiment Name: At_Drought_Soil_Dry_P Parameter: Post Timepoint (hr) Value: 3
  misc_feature: MA Experiment 20001557 PARAMETER Experiment Name: At_Drought_Soil_Dry_P Parameter: Post-Treatment Value: Re-Water vs. No Drought
  misc_feature: MA Experiment 20001557 PARAMETER Experiment Name: At_Drought_Soil_Dry_P Parameter: Timepoint (day) Value: 13
  misc_feature: MA Experiment 20001557 PARAMETER Experiment Name: At_Drought_Soil_Dry_P Parameter: Treatment Value: Drought vs. No Drought
  misc_feature: MA Experiment ID: 20001558 Result: Down-regulated in Transcription
  misc_feature: MA Experiment 20001558 PARAMETER Experiment Name: At_Drought_Soil_Dry_P Parameter: Age (day) Value: 27
  misc_feature: MA Experiment 20001558 PARAMETER Experiment Name: At_Drought_Soil_Dry_P Parameter: Organism Value: A. thaliana
  misc_feature: MA Experiment 20001558 PARAMETER Experiment Name: At_Drought_Soil_Dry_P Parameter: Plant Line Value: WS
  misc_feature: MA Experiment 20001558 PARAMETER Experiment Name: At_Drought_Soil_Dry_P Parameter: Post Timepoint (hr) Value: 6
  misc_feature: MA Experiment 20001558 PARAMETER Experiment Name: At_Drought_Soil_Dry_P Parameter: Post-Treatment Value: Re-Water vs. No Drought
  misc_feature: MA Experiment 20001558 PARAMETER Experiment Name: At_Drought_Soil_Dry_P Parameter: Timepoint (day) Value: 13
  misc_feature: MA Experiment 20001558 PARAMETER Experiment Name: At_Drought_Soil_Dry_P Parameter: Treatment Value: Drought vs. No Drought
  misc_feature: MA Experiment ID: 20001559 Result: Down-regulated in Transcription
  misc_feature: MA Experiment 20001559 PARAMETER Experiment Name: At_Drought_Soil_Dry_P Parameter: Age (day) Value: 28
  misc_feature: MA Experiment 20001559 PARAMETER Experiment Name: At_Drought_Soil_Dry_P Parameter: Organism Value: A. thaliana
  misc_feature: MA Experiment 20001559 PARAMETER Experiment Name: At_Drought_Soil_Dry_P Parameter: Plant Line Value: WS
  misc_feature: MA Experiment 20001559 PARAMETER Experiment Name: At_Drought_Soil_Dry_P Parameter: Post Timepoint (hr) Value: 29
  misc_feature: MA Experiment 20001559 PARAMETER Experiment Name: At_Drought_Soil_Dry_P Parameter: Post-Treatment Value: Re-Water vs. No Drought
  misc_feature: MA Experiment 20001559 PARAMETER Experiment Name: At_Drought_Soil_Dry_P Parameter: Timepoint (day) Value: 14
  misc_feature: MA Experiment 20001559 PARAMETER Experiment Name: At_Drought_Soil_Dry_P Parameter: Treatment Value: Drought vs. No Drought
  misc_feature: MA Experiment ID: 20001560 Result: Down-regulated in Transcription
  misc_feature: MA Experiment 20001560 PARAMETER Experiment Name: At_Drought_Soil_Dry_P Parameter: Age (day) Value: 28
  misc_feature: MA Experiment 20001560 PARAMETER Experiment Name: At_Drought_Soil_Dry_P Parameter: Organism Value: A. thaliana
  misc_feature: MA Experiment 20001560 PARAMETER Experiment Name: At_Drought_Soil_Dry_P Parameter: Plant Line Value: WS
  misc_feature: MA Experiment 20001560 PARAMETER Experiment Name: At_Drought_Soil_Dry_P Parameter: Post Timepoint (hr) Value: None
  misc_feature: MA Experiment 20001560 PARAMETER Experiment Name: At_Drought_Soil_Dry_P Parameter: Post-Treatment Value: None
  misc_feature: MA Experiment 20001560 PARAMETER Experiment Name: At_Drought_Soil_Dry_P Parameter: Timepoint (day) Value: 14
  misc_feature: MA Experiment 20001560 PARAMETER Experiment Name: At_Drought_Soil_Dry_P Parameter: Treatment Value: Drought vs. No Drought
  misc_feature: MA Experiment ID: 20001906 Result: Down-regulated in Transcription
  misc_feature: MA Experiment 20001906 PARAMETER Experiment Name: At_Drought_Reproduction_P Parameter: Age (day) Value: 35
  misc_feature: MA Experiment 20001906 PARAMETER Experiment Name: At_Drought_Reproduction_P Parameter: Organism Value: A. thaliana
  misc_feature: MA Experiment 20001906 PARAMETER Experiment Name: At_Drought_Reproduction_P Parameter: Plant Line Value: WS
  misc_feature: MA Experiment 20001906 PARAMETER Experiment Name: At_Drought_Reproduction_P Parameter: Timepoint (day) Value: 5
  misc_feature: MA Experiment 20001906 PARAMETER Experiment Name: At_Drought_Reproduction_P Parameter: Tissue Value: Siliques
  misc_feature: MA Experiment 20001906 PARAMETER Experiment Name: At_Drought_Reproduction_P Parameter: Treatment Value: Drought vs. No Drought
  misc_feature: MA Experiment ID: 20001908 Result: Down-regulated in Transcription
  misc_feature: MA Experiment 20001908 PARAMETER Experiment Name: At_Drought_Reproduction_P Parameter: Age (day) Value: 40
  misc_feature: MA Experiment 20001908 PARAMETER Experiment Name: At_Drought_Reproduction_P Parameter: Organism Value: A. thaliana
  misc_feature: MA Experiment 20001908 PARAMETER Experiment Name: At_Drought_Reproduction_P Parameter: Plant Line Value: WS
  misc_feature: MA Experiment 20001908 PARAMETER Experiment Name: At_Drought_Reproduction_P Parameter: Timepoint (day) Value: 10
  misc_feature: MA Experiment 20001908 PARAMETER Experiment Name: At_Drought_Reproduction_P Parameter: Tissue Value: Siliques
  misc_feature: MA Experiment 20001908 PARAMETER Experiment Name: At_Drought_Reproduction_P Parameter: Treatment Value: Drought vs. No Drought
  misc_feature: MA Experiment ID: 20001911 Result: Down-regulated in Transcription
  misc_feature: MA Experiment 20001911 PARAMETER Experiment Name: At_Drought_Reproduction_P Parameter: Age (day) Value: 40
  misc_feature: MA Experiment 20001911 PARAMETER Experiment Name: At_Drought_Reproduction_P Parameter: Organism Value: A. thaliana
  misc_feature: MA Experiment 20001911 PARAMETER Experiment Name: At_Drought_Reproduction_P Parameter: Plant Line Value: WS
  misc_feature: MA Experiment 20001911 PARAMETER Experiment Name: At_Drought_Reproduction_P Parameter: Timepoint (day) Value: 10
  misc_feature: MA Experiment 20001911 PARAMETER Experiment Name: At_Drought_Reproduction_P Parameter: Tissue Value: Flowers
  misc_feature: MA Experiment 20001911 PARAMETER Experiment Name: At_Drought_Reproduction_P Parameter: Treatment Value: Drought vs. No Drought
gtagcaccacaacaacaatatccacattcttcttcttttgagtattacatccaacgaaacgtctctttctttctctctgataggcaacaatggcgcagaggaagatgattgtgtttcccaccaagaatgaattgtccgaagcaatggctgagtacactgccaatctctccgccaagttcatcaaagagaaaggccttttcaccgttgttctctccggcggtgacctaatcgattggctctgcaagttggtgcaacctccttatattgattcaatcgaatggccaaaatggcacgtcttttgggtcgatgagagggtttgtgcatgggaagatccagacagtaactacaaactcgccatggagggttttctctctaaggttccgattccggataagaacatctacgcaatcgacaagcacttggcggctgatggtaacgccgagcactgcgcgacgctctacgaggagtgtctaaagaatctggtgaaagaaaagattatcccaatatcgaaaaagacagggtatcctgagtttgatctacaacttctagggatgggtcctgatggccacatggcgtctctcttcccaaaccatccacagatcaatgagaagcagaaatgggtcacttacatcaccgactctccaaaaccaccaccaaagagaatcacattcactttaccggtcatcaactctactttgtacaatcttatggccatttgtgacaaagcaccggccaaatccgtggctgagatcatgaagcacaacaacctctcgttaccttctgctcatcttagtgctcaagtcgaaaatgtttggtaccttgaccaagcagctgcctccgagctctagagaggtagcctaaacacattaatattggtgttttgtttgtagtctctacgttgctttgtgttgaataaccggttaatacatttgcgtacgtttacttcgtacaaaatgtgttgaatattcgagctagttgtttcttgtagttgtgatgtgagtccctggctatgactatatatcattataaaaatatatagtgggcttcatttaatctgtcatttcatgaatggtgtttaattaaact

SEQ ID NO: 29342 - protein, 252 aa, Arabidopsis thaliana
  peptide (1)..(252): Ceres Seq. ID no. 13493752
  misc_feature (3)..(252): Homolog of NCBI NO: 28140256 NR Description: putative 6-phosphogluconolactonase [Elaeis
  misc_feature (3)..(252): Homolog of NCBI NO: 18420789 NR Description: 6-phosphogluconolactonase-related protein
  misc_feature (3)..(252): Homolog of NCBI NO: 10177901 NR Description: 6-phosphogluconolactonase-like protein
  misc_feature (3)..(252): Homolog of NCBI NO: 21554291 NR Description: 6-phosphogluconolactonase-like protein
  misc_feature (1)..(252): Homolog of NCBI NO: 21536675 NR Description: 6-phosphogluconolactonase-like protein
  misc_feature (5)..(252): Homolog of NCBI NO: 15238523 NR Description: 6-phosphogluconolactonase-related protein
  misc_feature (1)..(252): Homolog of NCBI NO: 15229127 NR Description: 6-phosphogluconolactonase - like protein
  misc_feature (1)..(252): Homolog of NCBI NO: 14009294 NR Description: putative 6-phosphogluconolactonase [Brassica
  misc_feature (1)..(252): Homolog of NCBI NO: 21537412 NR Description: 6-phosphogluconolactonase-like protein
  misc_feature (1)..(252): Homolog of NCBI NO: 15238526 NR Description: 6-phosphogluconolactonase-related protein
MAQRKMIVFPTKNELSEAMAEYTANLSAKFIKEKGLFTVVLSGGDLIDWLCKLVQPPYIDSIEWPKWHVFWVDERVCAWEDPDSNYKLAMEGFLSKVPIPDKNIYAIDKHLAADGNAEHCATLYEECLKNLVKEKIIPISKKTGYPEFDLQLLGMGPDGHMASLFPNHPQINEKQKWVTYITDSPKPPPKRITFTLPVINSTLYNLMAICDKAPAKSVAEIMKHNNLSLPSAHLSAQVENVWYLDQAAASEL

SEQ ID NO: 29343 - protein, 247 aa, Arabidopsis thaliana
  peptide (1)..(247): Ceres Seq. ID no. 13493753
  misc_feature (1)..(247): Homolog of NCBI NO: 28140256 NR Description: putative 6-phosphogluconolactonase [Elaeis
  misc_feature (1)..(247): Homolog of NCBI NO: 18420789 NR Description: 6-phosphogluconolactonase-related protein
  misc_feature (1)..(247): Homolog of NCBI NO: 10177901 NR Description: 6-phosphogluconolactonase-like protein
  misc_feature (1)..(247): Homolog of NCBI NO: 21554291 NR Description: 6-phosphogluconolactonase-like protein
  misc_feature (1)..(247): Homolog of NCBI NO: 21536675 NR Description: 6-phosphogluconolactonase-like protein
  misc_feature (1)..(247): Homolog of NCBI NO: 15238523 NR Description: 6-phosphogluconolactonase-related protein
  misc_feature (1)..(247): Homolog of NCBI NO: 15229127 NR Description: 6-phosphogluconolactonase - like protein
  misc_feature (1)..(247): Homolog of NCBI NO: 14009294 NR Description: putative 6-phosphogluconolactonase [Brassica
  misc_feature (1)..(247): Homolog of NCBI NO: 21537412 NR Description: 6-phosphogluconolactonase-like protein
  misc_feature (1)..(247): Homolog of NCBI NO: 15238526 NR Description: 6-phosphogluconolactonase-related protein
MIVFPTKNELSEAMAEYTANLSAKFIKEKGLFTVVLSGGDLIDWLCKLVQPPYIDSIEWPKWHVFWVDERVCAWEDPDSNYKLAMEGFLSKVPIPDKNIYAIDKHLAADGNAEHCATLYEECLKNLVKEKIIPISKKTGYPEFDLQLLGMGPDGHMASLFPNHPQINEKQKWVTYITDSPKPPPKRITFTLPVINSTLYNLMAICDKAPAKSVAEIMKHNNLSLPSAHLSAQVENVWYLDQAAASEL

SEQ ID NO: 29344 - protein, 234 aa, Arabidopsis thaliana
  peptide (1)..(234): Ceres Seq. ID no. 13493754
  misc_feature (1)..(234): Homolog of NCBI NO: 28140256 NR Description: putative 6-phosphogluconolactonase [Elaeis
  misc_feature (1)..(234): Homolog of NCBI NO: 18420789 NR Description: 6-phosphogluconolactonase-related protein
  misc_feature (1)..(234): Homolog of NCBI NO: 10177901 NR Description: 6-phosphogluconolactonase-like protein
  misc_feature (1)..(234): Homolog of NCBI NO: 21554291 NR Description: 6-phosphogluconolactonase-like protein
  misc_feature (1)..(234): Homolog of NCBI NO: 21536675 NR Description: 6-phosphogluconolactonase-like protein
  misc_feature (1)..(234): Homolog of NCBI NO: 15238523 NR Description: 6-phosphogluconolactonase-related protein
  misc_feature (1)..(234): Homolog of NCBI NO: 15229127 NR Description: 6-phosphogluconolactonase - like protein
  misc_feature (1)..(234): Homolog of NCBI NO: 14009294 NR Description: putative 6-phosphogluconolactonase [Brassica
  misc_feature (1)..(234): Homolog of NCBI NO: 21537412 NR Description: 6-phosphogluconolactonase-like protein
  misc_feature (1)..(234): Homolog of NCBI NO: 15238526 NR Description: 6-phosphogluconolactonase-related protein
MAEYTANLSAKFIKEKGLFTVVLSGGDLIDWLCKLVQPPYIDSIEWPKWHVFWVDERVCAWEDPDSNYKLAMEGFLSKVPIPDKNIYAIDKHLAADGNAEHCATLYEECLKNLVKEKIIPISKKTGYPEFDLQLLGMGPDGHMASLFPNHPQINEKQKWVTYITDSPKPPPKRITFTLPVINSTLYNLMAICDKAPAKSVAEIMKHNNLSLPSAHLSAQVENVWYLDQAAASEL

SEQ ID NO: 29345 - DNA, 897 bp, Arabidopsis thaliana; identical to SEQ ID NO: 26501
  misc_feature (1)..(897): Ceres Seq. ID no. 12603175
  misc_feature: MA Experiment ID: 108434 Result: Up-regulated in Transcription
  misc_feature: MA Experiment 108434 PARAMETER Experiment Name: At_Root_Tips_cDNA_P Parameter: Tissue Value: Root Tips
  misc_feature: MA Experiment ID: 108462 Result: Down-regulated in Transcription
  misc_feature: MA Experiment 108462 PARAMETER Experiment Name: At_Germinating_Seeds_cDNA_P Parameter: Age (day) Value: 2 vs. 0
  misc_feature: MA Experiment 108462 PARAMETER Experiment Name: At_Germinating_Seeds_cDNA_P Parameter: Tissue Value: Germinating Seeds
  misc_feature: MA Experiment ID: 108463 Result: Down-regulated in Transcription
  misc_feature: MA Experiment 108463 PARAMETER Experiment Name: At_Germinating_Seeds_cDNA_P Parameter: Age (day) Value: 3 vs. 0
  misc_feature: MA Experiment 108463 PARAMETER Experiment Name: At_Germinating_Seeds_cDNA_P Parameter: Tissue Value: Germinating Seeds
  misc_feature: MA Experiment ID: 108573 Result: Down-regulated in Transcription
  misc_feature: MA Experiment 108573 PARAMETER Experiment Name: At_Drought_cDNA_P Parameter: Timepoint (hr) Value: 6
  misc_feature: MA Experiment 108573 PARAMETER Experiment Name: At_Drought_cDNA_P Parameter: Tissue Value: Aerial
  misc_feature: MA Experiment 108573 PARAMETER Experiment Name: At_Drought_cDNA_P Parameter: Treatment Value: Drought vs. No Drought
  misc_feature: MA Experiment ID: 20000224 Result: Down-regulated in Transcription
  misc_feature: MA Experiment ID: 20000227 Result: Up-regulated in Transcription
  misc_feature: MA Experiment 20000227 PARAMETER Experiment Name: At_Root-Tips-vs-Tops_P Parameter: Tissue Value: Root Tips vs. Root Tops
  misc_feature: MA Experiment ID: 20000328 Result: Up-regulated in Transcription
  misc_feature: MA Experiment 20000328 PARAMETER Experiment Name: At_42deg_Heat_Sub_P Parameter: Age (day) Value: 14
  misc_feature: MA Experiment 20000328 PARAMETER Experiment Name: At_42deg_Heat_Sub_P Parameter: Organism Value: A. thaliana
  misc_feature: MA Experiment 20000328 PARAMETER Experiment Name: At_42deg_Heat_Sub_P Parameter: Plant Line Value: WS
  misc_feature: MA Experiment 20000328 PARAMETER Experiment Name: At_42deg_Heat_Sub_P Parameter: Temperature (deg C) Value: 42 vs. 22
  misc_feature: MA Experiment 20000328 PARAMETER Experiment Name: At_42deg_Heat_Sub_P Parameter: Timepoint (hr) Value: 6
  misc_feature: MA Experiment 20000328 PARAMETER Experiment Name: At_42deg_Heat_Sub_P Parameter: Tissue Value: Aerial
  misc_feature: MA Experiment ID: 20001557 Result: Up-regulated in Transcription
  misc_feature: MA Experiment 20001557 PARAMETER Experiment Name: At_Drought_Soil_Dry_P Parameter: Age (day) Value: 27
  misc_feature: MA Experiment 20001557 PARAMETER Experiment Name: At_Drought_Soil_Dry_P Parameter: Organism Value: A. thaliana
  misc_feature: MA Experiment 20001557 PARAMETER Experiment Name: At_Drought_Soil_Dry_P Parameter: Plant Line Value: WS
  misc_feature: MA Experiment 20001557 PARAMETER Experiment Name: At_Drought_Soil_Dry_P Parameter: Post Timepoint (hr) Value: 3
  misc_feature: MA Experiment 20001557 PARAMETER Experiment Name: At_Drought_Soil_Dry_P Parameter: Post-Treatment Value: Re-Water vs. No Drought
  misc_feature: MA Experiment 20001557 PARAMETER Experiment Name: At_Drought_Soil_Dry_P Parameter: Timepoint (day) Value: 13
  misc_feature: MA Experiment 20001557 PARAMETER Experiment Name: At_Drought_Soil_Dry_P Parameter: Treatment Value: Drought vs. No Drought
  misc_feature: MA Experiment ID: 20001558 Result: Up-regulated in Transcription
  misc_feature: MA Experiment 20001558 PARAMETER Experiment Name: At_Drought_Soil_Dry_P Parameter: Age (day) Value: 27
  misc_feature: MA Experiment 20001558 PARAMETER Experiment Name: At_Drought_Soil_Dry_P Parameter: Organism Value: A. thaliana
  misc_feature: MA Experiment 20001558 PARAMETER Experiment Name: At_Drought_Soil_Dry_P Parameter: Plant Line Value: WS
  misc_feature: MA Experiment 20001558 PARAMETER Experiment Name: At_Drought_Soil_Dry_P Parameter: Post Timepoint (hr) Value: 6
  misc_feature: MA Experiment 20001558 PARAMETER Experiment Name: At_Drought_Soil_Dry_P Parameter: Post-Treatment Value: Re-Water vs. No Drought
  misc_feature: MA Experiment 20001558 PARAMETER Experiment Name: At_Drought_Soil_Dry_P Parameter: Timepoint (day) Value: 13
  misc_feature: MA Experiment 20001558 PARAMETER Experiment Name: At_Drought_Soil_Dry_P Parameter: Treatment Value: Drought vs. No Drought
  misc_feature: MA Experiment ID: 20001560 Result: Up-regulated in Transcription
  misc_feature: MA Experiment 20001560 PARAMETER Experiment Name: At_Drought_Soil_Dry_P Parameter: Age (day) Value: 28
  misc_feature: MA Experiment 20001560 PARAMETER Experiment Name: At_Drought_Soil_Dry_P Parameter: Organism Value: A. thaliana
  misc_feature: MA Experiment 20001560 PARAMETER Experiment Name: At_Drought_Soil_Dry_P Parameter: Plant Line Value: WS
  misc_feature: MA Experiment 20001560 PARAMETER Experiment Name: At_Drought_Soil_Dry_P Parameter: Post Timepoint (hr) Value: None
  misc_feature: MA Experiment 20001560 PARAMETER Experiment Name: At_Drought_Soil_Dry_P Parameter: Post-Treatment Value: None
  misc_feature: MA Experiment 20001560 PARAMETER Experiment Name: At_Drought_Soil_Dry_P Parameter: Timepoint (day) Value: 14
  misc_feature: MA Experiment 20001560 PARAMETER Experiment Name: At_Drought_Soil_Dry_P Parameter: Treatment Value: Drought vs. No Drought

SEQ ID NO: 29346 - protein, 228 aa, Arabidopsis thaliana; identical to SEQ ID NO: 26502
  peptide (1)..(228): Ceres Seq. ID no. 12603176
  misc_feature (16)..(163): Pfam Name: Ribosomal protein L19e Pfam Description: Ribosomal protein L19e
  misc_feature (16)..(163): Pfam Name: Ribosomal protein L19e Pfam Description: Ribosomal protein L19e
  misc_feature (15)..(196): Homolog of NCBI NO: 28630352 NR Description: ribosomal protein L19 [Branchiostoma lanceolatum]
  misc_feature (15)..(196): Homolog of NCBI NO: 28200276 NR Description: ribosomal protein L19 [Branchiostoma belcheri
  misc_feature (15)..(199): Homolog of NCBI NO: 32401377 NR Description: ribosomal protein L19 [Triticum aestivum]
  misc_feature (15)..(227): Homolog of NCBI NO: 29837764 NR Description: putative ribosomal protein L19
  misc_feature (15)..(228): Homolog of NCBI NO: 15228314 NR Description: putative ribosomal protein
  misc_feature (15)..(196): Homolog of NCBI NO: 28630352 NR Description: ribosomal protein L19 [Branchiostoma lanceolatum]
  misc_feature (15)..(199): Homolog of NCBI NO: 32401377 NR Description: ribosomal protein L19 [Triticum aestivum]
  misc_feature (15)..(228): Homolog of NCBI NO: 15228314 NR Description: putative ribosomal protein
  misc_feature (15)..(228): Homolog of NCBI NO: 15218602 NR Description: ribosomal protein L19, putative
  misc_feature (15)..(228): Homolog of NCBI NO: 18087585 NR Description: At1g02780/T14P4_3 [Arabidopsis thaliana]
  misc_feature (15)..(228): Homolog of NCBI NO: 15235290 NR Description: putative ribosomal protein L19
  misc_feature (15)..(214): Homolog of NCBI NO: 7440943 NR Description: ribosomal protein L19.T2H3.3 - Arabidopsis
  misc_feature (15)..(225): Homolog of NCBI NO: 40287526 NR Description: 60S ribosomal protein L19 [Capsicum annuum]
  misc_feature (15)..(227): Homolog of NCBI NO: 29837764 NR Description: putative ribosomal protein L19
  misc_feature (15)..(196): Homolog of NCBI NO: 28200276 NR Description: ribosomal protein L19 [Branchiostoma belcheri
  misc_feature (15)..(225): Homolog of NCBI NO: 40287526 NR Description: 60S ribosomal protein L19 [Capsicum annuum]
  misc_feature (15)..(214): Homolog of NCBI NO: 7440943 NR Description: ribosomal protein L19.T2H3.3 - Arabidopsis
  misc_feature (15)..(228): Homolog of NCBI NO: 15235290 NR Description: putative ribosomal protein L19
  misc_feature (15)..(228): Homolog of NCBI NO: 18087585 NR Description: At1g02780/T14P4_3 [Arabidopsis thaliana]
  misc_feature (15)..(228): Homolog of NCBI NO: 15218602 NR Description: ribosomal protein L19, putative

SEQ ID NO: 29347 - protein, 214 aa, Arabidopsis thaliana [sequence omitted]

SEQ ID NO: 29348 - protein, 200 aa, Arabidopsis thaliana; identical to SEQ ID NO: 26504
  peptide (1)..(200): Ceres Seq. ID no. 12603178
  misc_feature (1)..(135): Pfam Name: Ribosomal protein L19e Pfam Description: Ribosomal protein L19e
  misc_feature (1)..(135): Pfam Name: Ribosomal protein L19e Pfam Description: Ribosomal protein L19e
  misc_feature (1)..(168): Homolog of NCBI NO: 28630352 NR Description: ribosomal protein L19 [Branchiostoma lanceolatum]
  misc_feature (1)..(168): Homolog of NCBI NO: 28200276 NR Description: ribosomal protein L19 [Branchiostoma belcheri
  misc_feature (1)..(171): Homolog of NCBI NO: 32401377 NR Description: ribosomal protein L19 [Triticum aestivum]
  misc_feature (1)..(199): Homolog of NCBI NO: 29837764 NR Description: putative ribosomal protein L19
  misc_feature (1)..(200): Homolog of NCBI NO: 15228314 NR Description: putative ribosomal protein
  misc_feature (1)..(168): Homolog of NCBI NO: 28630352 NR Description: ribosomal protein L19 [Branchiostoma lanceolatum]
  misc_feature (1)..(171): Homolog of NCBI NO: 32401377 NR Description: ribosomal protein L19 [Triticum aestivum]
  misc_feature (1)..(200): Homolog of NCBI NO: 15228314 NR Description: putative ribosomal protein
  misc_feature (1)..(200): Homolog of NCBI NO: 15218602 NR Description: ribosomal protein L19, putative
  misc_feature (1)..(200): Homolog of NCBI NO: 18087585 NR Description: At1g02780/T14P4_3 [Arabidopsis thaliana]
  misc_feature (1)..(200): Homolog of NCBI NO: 15235290 NR Description: putative ribosomal protein L19
  misc_feature (1)..(186): Homolog of NCBI NO: 7440943 NR Description: ribosomal protein L19.T2H3.3 - Arabidopsis
  misc_feature (1)..(197): Homolog of NCBI NO: 40287526 NR Description: 60S ribosomal protein L19 [Capsicum annuum]
  misc_feature (1)..(199): Homolog of NCBI NO: 29837764 NR Description: putative ribosomal protein L19
  misc_feature (1)..(168): Homolog of NCBI NO: 28200276 NR Description: ribosomal protein L19 [Branchiostoma belcheri
  misc_feature (1)..(197): Homolog of NCBI NO: 40287526 NR Description: 60S ribosomal protein L19 [Capsicum annuum]
  misc_feature (1)..(186): Homolog of NCBI NO: 7440943 NR Description: ribosomal protein L19.T2H3.3 - Arabidopsis
  misc_feature (1)..(200): Homolog of NCBI NO: 15235290 NR Description: putative ribosomal protein L19
  misc_feature (1)..(200): Homolog of NCBI NO: 18087585 NR Description: At1g02780/T14P4_3 [Arabidopsis thaliana]
  misc_feature (1)..(200): Homolog of NCBI NO: 15218602 NR Description: ribosomal protein L19, putative

SEQ ID NO: 29349 - DNA, 648 bp, Arabidopsis thaliana
  misc_feature (1)..(648): Ceres Seq. ID no. 13491518
  misc_feature: MA Experiment ID: 108434 Result: Down-regulated in Transcription
  misc_feature: MA Experiment 108434 PARAMETER Experiment Name: At_Root_Tips_cDNA_P Parameter: Tissue Value: Root Tips
  misc_feature: MA Experiment ID: 108464 Result: Up-regulated in Transcription
  misc_feature: MA Experiment 108464 PARAMETER Experiment Name: At_Germinating_Seeds_cDNA_P Parameter: Age (day) Value: 4 vs. 0
  misc_feature: MA Experiment 108464 PARAMETER Experiment Name: At_Germinating_Seeds_cDNA_P Parameter: Tissue Value: Germinating Seeds
  misc_feature: MA Experiment ID: 108585 Result: Up-regulated in Transcription
  misc_feature: MA Experiment 108585 PARAMETER Experiment Name: At_5mM_NaNP_cDNA_P Parameter: Timepoint (hr) Value: 6
  misc_feature: MA Experiment 108585 PARAMETER Experiment Name: At_5mM_NaNP_cDNA_P Parameter: Tissue Value: Aerial
  misc_feature: MA Experiment 108585 PARAMETER Experiment Name: At_5mM_NaNP_cDNA_P Parameter: Treatment Value: null
  misc_feature: MA Experiment ID: 108607 Result: Up-regulated in Transcription
  misc_feature: MA Experiment 108607 PARAMETER Experiment Name: At_100uM_ABA_cDNA_P Parameter: Timepoint (hr) Value: 4
  misc_feature: MA Experiment 108607 PARAMETER Experiment Name: At_100uM_ABA_cDNA_P Parameter: Tissue Value: Aerial
  misc_feature: MA Experiment 108607 PARAMETER Experiment Name: At_100uM_ABA_cDNA_P Parameter: Treatment Value: 100uM ABA vs. No Treatment
  misc_feature: MA Experiment ID: 108668 Result: Up-regulated in Transcription
  misc_feature: MA Experiment 108668 PARAMETER Experiment Name: At_2mM_SA_cDNA_P Parameter: Plant Line Value: WS
  misc_feature: MA Experiment 108668 PARAMETER Experiment Name: At_2mM_SA_cDNA_P Parameter: Timepoint (hr) Value: 6
  misc_feature: MA Experiment 108668 PARAMETER Experiment Name: At_2mM_SA_cDNA_P Parameter: Treatment Value: 2mM SA vs. No Treatment
  misc_feature: MA Experiment ID: 20000069 Result: Up-regulated in Transcription
  misc_feature: MA Experiment 20000069 PARAMETER Experiment Name: At_100uM_ABA_Mutants_cDNA_P Parameter: Plant Line Value: CS23
  misc_feature: MA Experiment 20000069 PARAMETER Experiment Name: At_100uM_ABA_Mutants_cDNA_P Parameter: Timepoint (hr) Value: 6
  misc_feature: MA Experiment 20000069 PARAMETER Experiment Name: At_100uM_ABA_Mutants_cDNA_P Parameter: Tissue Value: Aerial
  misc_feature: MA Experiment 20000069 PARAMETER Experiment Name: At_100uM_ABA_Mutants_cDNA_P Parameter: Treatment Value: 100uM ABA vs. No Treatment
  misc_feature: MA Experiment ID: 20000070 Result: Up-regulated in Transcription
  misc_feature: MA Experiment 20000070 PARAMETER Experiment Name: At_100uM_ABA_Mutants_cDNA_P Parameter: Plant Line Value: CS24
  misc_feature: MA Experiment 20000070 PARAMETER Experiment Name: At_100uM_ABA_Mutants_cDNA_P Parameter: Timepoint (hr) Value: 6
  misc_feature: MA Experiment 20000070 PARAMETER Experiment Name: At_100uM_ABA_Mutants_cDNA_P Parameter: Tissue Value: Aerial
  misc_feature: MA Experiment 20000070 PARAMETER Experiment Name: At_100uM_ABA_Mutants_cDNA_P Parameter: Treatment Value: 100uM ABA vs. No Treatment
  misc_feature: MA Experiment ID: 20000087 Result: Up-regulated in Transcription
  misc_feature: MA Experiment 20000087 PARAMETER Experiment Name: At_100uM_ABA_Mutants_cDNA_P Parameter: Plant Line Value: WS
  misc_feature: MA Experiment 20000087 PARAMETER Experiment Name: At_100uM_ABA_Mutants_cDNA_P Parameter: Timepoint (hr) Value: 6
  misc_feature: MA Experiment 20000087 PARAMETER Experiment Name: At_100uM_ABA_Mutants_cDNA_P Parameter: Tissue Value: Aerial
  misc_feature: MA Experiment 20000087 PARAMETER Experiment Name: At_100uM_ABA_Mutants_cDNA_P Parameter: Treatment Value: 100uM ABA vs. No Treatment
  misc_feature: MA Experiment ID: 20000089 Result: Up-regulated in Transcription
  misc_feature: MA Experiment ID: 20000111 Result: Down-regulated in Transcription
  misc_feature: MA Experiment 20000111 PARAMETER Experiment Name: At_42deg_Heat_cDNA_P Parameter: Temperature (deg C) Value: 42 vs. 22
  misc_feature: MA Experiment 20000111 PARAMETER Experiment Name: At_42deg_Heat_cDNA_P Parameter: Timepoint (hr) Value: 6
  misc_feature: MA Experiment 20000111 PARAMETER Experiment Name: At_42deg_Heat_cDNA_P Parameter: Tissue Value: Aerial
  misc_feature: MA Experiment ID: 20000113 Result: Down-regulated in Transcription
  misc_feature: MA Experiment 20000113 PARAMETER Experiment Name: At_42deg_Heat_cDNA_P Parameter: Temperature (deg C) Value: 42 vs. 22
  misc_feature: MA Experiment 20000113 PARAMETER Experiment Name: At_42deg_Heat_cDNA_P Parameter: Timepoint (hr) Value: 8
  misc_feature: MA Experiment 20000113 PARAMETER Experiment Name: At_42deg_Heat_cDNA_P Parameter: Tissue Value: Aerial
  misc_feature: MA Experiment ID: 20000117 Result: Up-regulated in Transcription
  misc_feature: MA Experiment 20000117 PARAMETER Experiment Name: At_100uM_ABA_Mutants_cDNA_P Parameter: Plant Line Value: Columbia
  misc_feature: MA Experiment 20000117 PARAMETER Experiment Name: At_100uM_ABA_Mutants_cDNA_P Parameter: Timepoint (hr) Value: 6
  misc_feature: MA Experiment 20000117 PARAMETER Experiment Name: At_100uM_ABA_Mutants_cDNA_P Parameter: Tissue Value: Aerial
  misc_feature: MA Experiment 20000117 PARAMETER Experiment Name: At_100uM_ABA_Mutants_cDNA_P Parameter: Treatment Value: 100uM ABA vs. No Treatment
  misc_feature: MA Experiment ID: 20000307 Result: Up-regulated in Transcription
  misc_feature: MA Experiment 20000307 PARAMETER Experiment Name: At_Germinating_Seeds_Sub_P Parameter: Age (hr) Value: 24 vs. 0
  misc_feature: MA Experiment 20000307 PARAMETER Experiment Name: At_Germinating_Seeds_Sub_P Parameter: Organism Value: A. thaliana
  misc_feature: MA Experiment 20000307 PARAMETER Experiment Name: At_Germinating_Seeds_Sub_P Parameter: Plant Line Value: WS
  misc_feature: MA Experiment 20000307 PARAMETER Experiment Name: At_Germinating_Seeds_Sub_P Parameter: Tissue Value: Germinating Seeds
  misc_feature: MA Experiment ID: 20000315 Result: Down-regulated in Transcription
  misc_feature: MA Experiment 20000315 PARAMETER Experiment Name: At_14day_Shoots-Roots_Sub_P Parameter: Age (day) Value: 14
  misc_feature: MA Experiment 20000315 PARAMETER Experiment Name: At_14day_Shoots-Roots_Sub_P Parameter: Organism Value: A. thaliana
  misc_feature: MA Experiment 20000315 PARAMETER Experiment Name: At_14day_Shoots-Roots_Sub_P Parameter: Plant Line Value: WS
  misc_feature: MA Experiment 20000315 PARAMETER Experiment Name: At_14day_Shoots-Roots_Sub_P Parameter: Tissue Value: Shoots vs. Whole Plant
  misc_feature: MA Experiment ID: 20000328 Result: Down-regulated in Transcription
  misc_feature: MA Experiment 20000328 PARAMETER Experiment Name: At_42deg_Heat_Sub_P Parameter: Age (day) Value: 14
  misc_feature: MA Experiment 20000328 PARAMETER Experiment Name: At_42deg_Heat_Sub_P Parameter: Organism Value: A. thaliana
  misc_feature: MA Experiment 20000328 PARAMETER Experiment Name: At_42deg_Heat_Sub_P Parameter: Plant Line Value: WS
  misc_feature: MA Experiment 20000328 PARAMETER Experiment Name: At_42deg_Heat_Sub_P Parameter: Temperature (deg C) Value: 42 vs. 22
  misc_feature: MA Experiment 20000328 PARAMETER Experiment Name: At_42deg_Heat_Sub_P Parameter: Timepoint (hr) Value: 6
  misc_feature: MA Experiment 20000328 PARAMETER Experiment Name: At_42deg_Heat_Sub_P Parameter: Tissue Value: Aerial
  misc_feature: MA Experiment ID: 20000347 Result: Up-regulated in Transcription
  misc_feature: MA Experiment 20000347 PARAMETER Experiment Name: At_2mM_SA_Sub_P Parameter: Age (day) Value: 14
  misc_feature: MA Experiment 20000347 PARAMETER Experiment Name: At_2mM_SA_Sub_P Parameter: Organism Value: A. thaliana
  misc_feature: MA Experiment 20000347 PARAMETER Experiment Name: At_2mM_SA_Sub_P Parameter: Plant Line Value: WS
  misc_feature: MA Experiment 20000347 PARAMETER Experiment Name: At_2mM_SA_Sub_P Parameter: Timepoint (hr) Value: 6
  misc_feature: MA Experiment 20000347 PARAMETER Experiment Name: At_2mM_SA_Sub_P Parameter: Tissue Value: Aerial
  misc_feature: MA Experiment 20000347 PARAMETER Experiment Name: At_2mM_SA_Sub_P Parameter: Treatment Value: 2mM SA vs. No Treatment
acatctgaattttgtctgatccaggaaaaagaagaaaatggcgtttgtgacaactgcggaagtttgtgacgcgaatcaagagctgattcggagtggtcagctacgagctttgcaacccattttccagatttatggccgtcgacaaatattctcaggaccagttgtcactgtcaaagtttttgaagacaatggcttaatccgtcaattcatcgaggagaaaggaaacggtagagttcttgtggtggatggtggagggagtcaacgatgtgcaatactcggaggtaaccccgttgttcaagctcagaacaacggatgggcaggaatcgttgtgaacggatgcatcagagacgtcgatgagatcaacggttgtgatatcggagtgagagctttggcctctcatccgataaaagcgagtaagaaaggacttggagaacaacgagttccggtaaatatcgcagggactcggatttgtgatggtgaatggctttatgcagatactgatgggattcttgtctcccaaattgagttatccgtttaataaaaaaggctttgatcagttaccaaaaaaaaaaacagaacgtggtttgtgttcatcttcttgtacttaagagattgttgaattataatggaaaataaatttttgttttg

SEQ ID NO: 29350 - protein, 166 aa, Arabidopsis thaliana
  peptide (1)..(166): Ceres Seq. ID no. 13491519
  misc_feature (2)..(159): Pfam Name: Demethylmenaquinone methyltransferase Pfam Description: Demethylmenaquinone methyltransferase
  misc_feature (1)..(160): Homolog of NCBI NO: 23103535 NR Description: hypothetical protein [Azotobacter vinelandii]
  misc_feature (1)..(160): Homolog of NCBI NO: 34497095 NR Description: S-adenosylmethionine:2-demethylmenaquinone
  misc_feature (4)..(164): Homolog of NCBI NO: 17546073 NR Description: PROBABLE
  misc_feature (1)..(164): Homolog of NCBI NO: 22978085 NR Description: hypothetical protein [Ralstonia metallidurans]
  misc_feature (1)..(164): Homolog of NCBI NO: 22982141 NR Description: hypothetical protein [Burkholderia fungorum]
  misc_feature (1)..(166): Homolog of NCBI NO: 15241161 NR Description: dimethylmenaquinone methyltransferase family
  misc_feature (4)..(166): Homolog of NCBI NO: 34910724 NR Description: S-adenosylmethionine:2-demethylmenaquinone
  misc_feature (1)..(166): Homolog of NCBI NO: 15232963 NR Description: dimethylmenaquinone methyltransferase family
  misc_feature (1)..(166): Homolog of NCBI NO: 21537415 NR Description: S-adenosylmethionine:2-demethylmenaquinone
  misc_feature (1)..(166): Homolog of NCBI NO: 15237348 NR Description: dimethylmenaquinone methyltransferase family
MAFVTTAEVCDANQELIRSGQLRALQPIFQIYGRRQIFSGPVVTVKVFEDNGLIRQFIEEKGNGRVLVVDGGGSQRCAILGGNPVVQAQNNGWAGIVVNGCIRDVDEINGCDIGVRALASHPIKASKKGLGEQRVPVNIAGTRICDGEWLYADTDGILVSQIELSV

SEQ ID NO: 29351 - DNA, 857 bp, Arabidopsis thaliana
  misc_feature (1)..(857): Ceres Seq. ID no. 12323707
  misc_feature: MA Experiment ID: 108434 Result: Down-regulated in Transcription
  misc_feature: MA Experiment 108434 PARAMETER Experiment Name: At_Root_Tips_cDNA_P Parameter: Tissue Value: Root Tips
  misc_feature: MA Experiment ID: 108488 Result: Down-regulated in Transcription
  misc_feature: MA Experiment ID: 108561 Result: Up-regulated in Transcription
  misc_feature: MA Experiment 108561 PARAMETER Experiment Name: At_100uM_ABA_cDNA_P Parameter: Timepoint (hr) Value: 6
  misc_feature: MA Experiment 108561 PARAMETER Experiment Name: At_100uM_ABA_cDNA_P Parameter: Tissue Value: Aerial
  misc_feature: MA Experiment 108561 PARAMETER Experiment Name: At_100uM_ABA_cDNA_P Parameter: Treatment Value: 100uM ABA vs. No Treatment
  misc_feature: MA Experiment ID: 108572 Result: Up-regulated in Transcription
  misc_feature: MA Experiment 108572 PARAMETER Experiment Name: At_Drought_cDNA_P Parameter: Timepoint (hr) Value: 1
  misc_feature: MA Experiment 108572 PARAMETER Experiment Name: At_Drought_cDNA_P Parameter: Tissue Value: Aerial
  misc_feature: MA Experiment 108572 PARAMETER Experiment Name: At_Drought_cDNA_P Parameter: Treatment Value: Drought vs. No Drought
  misc_feature: MA Experiment ID: 108573 Result: Up-regulated in Transcription
  misc_feature: MA Experiment 108573 PARAMETER Experiment Name: At_Drought_cDNA_P Parameter: Timepoint (hr) Value: 6
  misc_feature: MA Experiment 108573 PARAMETER Experiment Name: At_Drought_cDNA_P Parameter: Tissue Value: Aerial
  misc_feature: MA Experiment 108573 PARAMETER Experiment Name: At_Drought_cDNA_P Parameter: Treatment Value: Drought vs. No Drought
  misc_feature: MA Experiment ID: 108585 Result: Up-regulated in Transcription
  misc_feature: MA Experiment 108585 PARAMETER Experiment Name: At_5mM_NaNP_cDNA_P Parameter: Timepoint (hr) Value: 6
  misc_feature: MA Experiment 108585 PARAMETER Experiment Name: At_5mM_NaNP_cDNA_P Parameter: Tissue Value: Aerial
  misc_feature: MA Experiment 108585 PARAMETER Experiment Name: At_5mM_NaNP_cDNA_P Parameter: Treatment Value: null
  misc_feature: MA Experiment ID: 108605 Result: Up-regulated in Transcription
  misc_feature: MA Experiment 108605 PARAMETER Experiment Name: At_100uM_ABA_cDNA_P Parameter: Timepoint (hr) Value: 6
  misc_feature: MA Experiment 108605 PARAMETER Experiment Name: At_100uM_ABA_cDNA_P Parameter: Tissue Value: Aerial
  misc_feature: MA Experiment 108605 PARAMETER Experiment Name: At_100uM_ABA_cDNA_P Parameter: Treatment Value: 100uM ABA vs. No Treatment
  misc_feature: MA Experiment ID: 108607 Result: Up-regulated in Transcription
  misc_feature: MA Experiment 108607 PARAMETER Experiment Name: At_100uM_ABA_cDNA_P Parameter: Timepoint (hr) Value: 4
  misc_feature: MA Experiment 108607 PARAMETER Experiment Name: At_100uM_ABA_cDNA_P Parameter: Tissue Value: Aerial
  misc_feature: MA Experiment 108607 PARAMETER Experiment Name: At_100uM_ABA_cDNA_P Parameter: Treatment Value: 100uM ABA vs. No Treatment
  misc_feature: MA Experiment ID: 108608 Result: Up-regulated in Transcription
  misc_feature: MA Experiment 108608 PARAMETER Experiment Name: At_100uM_ABA_cDNA_P Parameter: Timepoint (hr) Value: 1
  misc_feature: MA Experiment 108608 PARAMETER Experiment Name: At_100uM_ABA_cDNA_P Parameter: Tissue Value: Aerial
  misc_feature: MA Experiment 108608 PARAMETER Experiment Name: At_100uM_ABA_cDNA_P Parameter: Treatment Value: 100uM ABA vs. No Treatment
  misc_feature: MA Experiment ID: 108609 Result: Up-regulated in Transcription
  misc_feature: MA Experiment 108609 PARAMETER Experiment Name: At_100uM_ABA_cDNA_P Parameter: Timepoint (hr) Value: 24
  misc_feature: MA Experiment 108609 PARAMETER Experiment Name: At_100uM_ABA_cDNA_P Parameter: Tissue Value: Aerial
  misc_feature: MA Experiment 108609 PARAMETER Experiment Name: At_100uM_ABA_cDNA_P Parameter: Treatment Value: 100uM ABA vs. No Treatment
  misc_feature: MA Experiment ID: 108668 Result: Up-regulated in Transcription
  misc_feature: MA Experiment 108668 PARAMETER Experiment Name: At_2mM_SA_cDNA_P Parameter: Plant Line Value: WS
  misc_feature: MA Experiment 108668 PARAMETER Experiment Name: At_2mM_SA_cDNA_P Parameter: Timepoint (hr) Value: 6
  misc_feature: MA Experiment 108668 PARAMETER Experiment Name: At_2mM_SA_cDNA_P Parameter: Treatment Value: 2mM SA vs. No Treatment
  misc_feature: MA Experiment ID: 20000069 Result: Up-regulated in Transcription
  misc_feature: MA Experiment 20000069 PARAMETER Experiment Name: At_100uM_ABA_Mutants_cDNA_P Parameter: Plant Line Value: CS23
  misc_feature: MA Experiment 20000069 PARAMETER Experiment Name: At_100uM_ABA_Mutants_cDNA_P Parameter: Timepoint (hr) Value: 6
  misc_feature: MA Experiment 20000069 PARAMETER Experiment Name: At_100uM_ABA_Mutants_cDNA_P Parameter: Tissue Value: Aerial
  misc_feature: MA Experiment 20000069 PARAMETER Experiment Name: At_100uM_ABA_Mutants_cDNA_P Parameter: Treatment Value: 100uM ABA vs. No Treatment
  misc_feature: MA Experiment ID: 20000070 Result: Up-regulated in Transcription
  misc_feature: MA Experiment 20000070 PARAMETER Experiment Name: At_100uM_ABA_Mutants_cDNA_P Parameter: Plant Line Value: CS24
  misc_feature: MA Experiment 20000070 PARAMETER Experiment Name: At_100uM_ABA_Mutants_cDNA_P Parameter: Timepoint (hr) Value: 6
  misc_feature: MA Experiment 20000070 PARAMETER Experiment Name: At_100uM_ABA_Mutants_cDNA_P Parameter: Tissue Value: Aerial
  misc_feature: MA Experiment 20000070 PARAMETER Experiment Name: At_100uM_ABA_Mutants_cDNA_P Parameter: Treatment Value: 100uM ABA vs. No Treatment
  misc_feature: MA Experiment ID: 20000071 Result: Up-regulated in Transcription
  misc_feature: MA Experiment 20000071 PARAMETER Experiment Name: At_100uM_ABA_Mutants_cDNA_P Parameter: Plant Line Value: CS8104
  misc_feature: MA Experiment 20000071 PARAMETER Experiment Name: At_100uM_ABA_Mutants_cDNA_P Parameter: Timepoint (hr) Value: 6
  misc_feature: MA Experiment 20000071 PARAMETER Experiment Name: At_100uM_ABA_Mutants_cDNA_P Parameter: Tissue Value: Aerial
  misc_feature: MA Experiment 20000071 PARAMETER Experiment Name: At_100uM_ABA_Mutants_cDNA_P Parameter: Treatment Value: 100uM ABA vs. No Treatment
  misc_feature: MA Experiment ID: 20000072 Result: Up-regulated in Transcription
  misc_feature: MA Experiment 20000072 PARAMETER Experiment Name: At_100uM_ABA_Mutants_cDNA_P Parameter: Plant Line Value: CS8105
  misc_feature: MA Experiment 20000072 PARAMETER Experiment Name: At_100uM_ABA_Mutants_cDNA_P Parameter: Timepoint (hr) Value: 6
  misc_feature: MA Experiment 20000072 PARAMETER Experiment Name: At_100uM_ABA_Mutants_cDNA_P Parameter: Tissue Value: Aerial
  misc_feature: MA Experiment 20000072 PARAMETER Experiment Name: At_100uM_ABA_Mutants_cDNA_P Parameter: Treatment Value: 100uM ABA vs. No Treatment
  misc_feature: MA Experiment ID: 20000086 Result: Up-regulated in Transcription
  misc_feature: MA Experiment 20000086 PARAMETER Experiment Name: At_100uM_ABA_Mutants_cDNA_P Parameter: Plant Line Value: CS22
  misc_feature: MA Experiment 20000086 PARAMETER Experiment Name: At_100uM_ABA_Mutants_cDNA_P Parameter: Timepoint (hr) Value: 6
  misc_feature: MA Experiment 20000086 PARAMETER Experiment Name: At_100uM_ABA_Mutants_cDNA_P Parameter: Tissue Value: Aerial
  misc_feature: MA Experiment 20000086 PARAMETER Experiment Name: At_100uM_ABA_Mutants_cDNA_P Parameter: Treatment Value: 100uM ABA vs. No Treatment
  misc_feature: MA Experiment ID: 20000088 Result: Up-regulated in Transcription
  misc_feature: MA Experiment 20000088 PARAMETER Experiment Name: At_100uM_ABA_Mutants_cDNA_P Parameter: Plant Line Value: Landsberg
  misc_feature: MA Experiment 20000088 PARAMETER Experiment Name: At_100uM_ABA_Mutants_cDNA_P Parameter: Timepoint (hr) Value: 6
  misc_feature: MA Experiment 20000088 PARAMETER Experiment Name: At_100uM_ABA_Mutants_cDNA_P Parameter: Tissue Value: Aerial
  misc_feature: MA Experiment 20000088 PARAMETER Experiment Name: At_100uM_ABA_Mutants_cDNA_P Parameter: Treatment Value: 100uM ABA vs. No Treatment
  misc_feature: MA Experiment ID: 20000111 Result: Down-regulated in Transcription
  misc_feature: MA Experiment 20000111 PARAMETER Experiment Name: At_42deg_Heat_cDNA_P Parameter: Temperature (deg C) Value: 42 vs. 22
  misc_feature: MA Experiment 20000111 PARAMETER Experiment Name: At_42deg_Heat_cDNA_P Parameter: Timepoint (hr) Value: 6
  misc_feature: MA Experiment 20000111 PARAMETER Experiment Name: At_42deg_Heat_cDNA_P Parameter: Tissue Value: Aerial
  misc_feature: MA Experiment ID: 20000117 Result: Up-regulated in Transcription
  misc_feature: MA Experiment 20000117 PARAMETER Experiment Name: At_100uM_ABA_Mutants_cDNA_P Parameter: Plant Line Value: Columbia
  misc_feature: MA Experiment 20000117 PARAMETER Experiment Name: At_100uM_ABA_Mutants_cDNA_P Parameter: Timepoint (hr) Value: 6
  misc_feature: MA Experiment 20000117 PARAMETER Experiment Name: At_100uM_ABA_Mutants_cDNA_P Parameter: Tissue Value: Aerial
  misc_feature: MA Experiment 20000117 PARAMETER Experiment Name: At_100uM_ABA_Mutants_cDNA_P Parameter: Treatment Value: 100uM ABA vs. No Treatment
  misc_feature: MA Experiment ID: 20000166 Result: Up-regulated in Transcription
  misc_feature: MA Experiment 20000166 PARAMETER Experiment Name: At_100uM_ABA_P Parameter: Age (day) Value: 14
  misc_feature: MA Experiment 20000166 PARAMETER Experiment Name: At_100uM_ABA_P Parameter: Organism Value: A. thaliana
  misc_feature: MA Experiment 20000166 PARAMETER Experiment Name: At_100uM_ABA_P Parameter: Plant Line Value: WS
  misc_feature: MA Experiment 20000166 PARAMETER Experiment Name: At_100uM_ABA_P Parameter: Timepoint (hr) Value: 1
  misc_feature: MA Experiment 20000166 PARAMETER Experiment Name: At_100uM_ABA_P Parameter: Tissue Value: Aerial
  misc_feature: MA Experiment 20000166 PARAMETER Experiment Name: At_100uM_ABA_P Parameter: Treatment Value: 100uM ABA vs. No Treatment
  misc_feature: MA Experiment ID: 20000169 Result: Up-regulated in Transcription
  misc_feature: MA Experiment 20000169 PARAMETER Experiment Name: At_100uM_ABA_P Parameter: Age (day) Value: 14
  misc_feature: MA Experiment 20000169 PARAMETER Experiment Name: At_100uM_ABA_P Parameter: Organism Value: A. thaliana
  misc_feature: MA Experiment 20000169 PARAMETER Experiment Name: At_100uM_ABA_P Parameter: Plant Line Value: WS
  misc_feature: MA Experiment 20000169 PARAMETER Experiment Name: At_100uM_ABA_P Parameter: Timepoint (hr) Value: 6
  misc_feature: MA Experiment 20000169 PARAMETER Experiment Name: At_100uM_ABA_P Parameter: Tissue Value: Aerial
  misc_feature: MA Experiment 20000169 PARAMETER Experiment Name: At_100uM_ABA_P Parameter: Treatment Value: 100uM ABA vs. No Treatment
  misc_feature: MA Experiment ID: 20000179 Result: Up-regulated in Transcription
  misc_feature: MA Experiment 20000179 PARAMETER Experiment Name: At_Germinating_Seeds_P Parameter: Age (hr) Value: 6 vs. 0
  misc_feature: MA Experiment 20000179 PARAMETER Experiment Name: At_Germinating_Seeds_P Parameter: Tissue Value: Germinating Seeds
  misc_feature: MA Experiment ID: 20000182 Result: Up-regulated in Transcription
  misc_feature: MA Experiment 20000182 PARAMETER Experiment Name: At_2mM_SA_P Parameter: Age (day) Value: 14
  misc_feature: MA Experiment 20000182 PARAMETER Experiment Name: At_2mM_SA_P Parameter: Organism Value: A. thaliana
  misc_feature: MA Experiment 20000182 PARAMETER Experiment Name: At_2mM_SA_P Parameter: Plant Line Value: WS
  misc_feature: MA Experiment 20000182 PARAMETER Experiment Name: At_2mM_SA_P Parameter: Timepoint (hr) Value: 6
  misc_feature: MA Experiment 20000182 PARAMETER Experiment Name: At_2mM_SA_P Parameter: Tissue Value: Aerial
  misc_feature: MA Experiment 20000182 PARAMETER Experiment Name: At_2mM_SA_P Parameter: Treatment Value: 2mM SA vs. No Treatment
  misc_feature: MA Experiment ID: 20000224 Result: Down-regulated in Transcription
  misc_feature: MA Experiment ID: 20000265 Result: Down-regulated in Transcription
  misc_feature: MA Experiment 20000265 PARAMETER Experiment Name: At_Open_Flower_P Parameter: Age (day) Value: 21
  misc_feature: MA Experiment 20000265 PARAMETER Experiment Name: At_Open_Flower_P Parameter: Plant Line Value: WS
  misc_feature: MA Experiment 20000265 PARAMETER Experiment Name: At_Open_Flower_P Parameter: Tissue Value: Closed Flower vs. Whole Plant
  misc_feature: MA Experiment ID: 20000267 Result: Up-regulated in Transcription
  misc_feature: MA Experiment 20000267 PARAMETER Experiment Name: At_Drought_P Parameter: Age (day) Value: 7
  misc_feature: MA Experiment 20000267 PARAMETER Experiment Name: At_Drought_P Parameter: Organism Value: A. thaliana
  misc_feature: MA Experiment 20000267 PARAMETER Experiment Name: At_Drought_P Parameter: Plant Line Value: WS
  misc_feature: MA Experiment 20000267 PARAMETER Experiment Name: At_Drought_P Parameter: Timepoint (hr) Value: 6
  misc_feature: MA Experiment 20000267 PARAMETER Experiment Name: At_Drought_P Parameter: Tissue Value: Whole Plant
  misc_feature: MA Experiment 20000267 PARAMETER Experiment Name: At_Drought_P Parameter: Treatment Value: Drought vs. No Drought
  misc_feature: MA Experiment ID: 20000436 Result: Up-regulated in Transcription
  misc_feature: MA Experiment 20000436 PARAMETER Experiment Name: At_Drought_P Parameter: Age (day) Value: 7
  misc_feature: MA Experiment 20000436 PARAMETER Experiment Name: At_Drought_P Parameter: Organism Value: A. thaliana
  misc_feature: MA Experiment 20000436 PARAMETER Experiment Name: At_Drought_P Parameter: Plant Line Value: WS
  misc_feature: MA Experiment 20000436 PARAMETER Experiment Name: At_Drought_P Parameter: Timepoint (hr) Value: 12
  misc_feature: MA Experiment 20000436 PARAMETER Experiment Name: At_Drought_P Parameter: Tissue Value: Whole Plant
  misc_feature: MA Experiment 20000436 PARAMETER Experiment Name: At_Drought_P Parameter: Treatment Value: Drought vs. No Drought
  misc_feature: MA Experiment ID: 20000437 Result: Up-regulated in Transcription
  misc_feature: MA Experiment 20000437 PARAMETER Experiment Name: At_Drought_P Parameter: Age (day) Value: 8
  misc_feature: MA Experiment 20000437 PARAMETER Experiment Name: At_Drought_P Parameter: Organism Value: A. thaliana
  misc_feature: MA Experiment 20000437 PARAMETER Experiment Name: At_Drought_P Parameter: Plant Line Value: WS
  misc_feature: MA Experiment 20000437 PARAMETER Experiment Name: At_Drought_P Parameter: Timepoint (hr) Value: 24
  misc_feature: MA Experiment 20000437 PARAMETER Experiment Name: At_Drought_P Parameter: Tissue Value: Whole Plant
  misc_feature: MA Experiment 20000437 PARAMETER Experiment Name: At_Drought_P Parameter: Treatment Value: Drought vs. No Drought
  misc_feature: MA Experiment ID: 20000453 Result: Up-regulated in Transcription
  misc_feature: MA Experiment 20000453 PARAMETER Experiment Name: At_100uM_ABA_P Parameter: Age (day) Value: 15
  misc_feature: MA Experiment 20000453 PARAMETER Experiment Name: At_100uM_ABA_P Parameter: Organism Value: A. thaliana
  misc_feature: MA Experiment 20000453 PARAMETER Experiment Name: At_100uM_ABA_P Parameter: Plant Line Value: WS
  misc_feature: MA Experiment 20000453 PARAMETER Experiment Name: At_100uM_ABA_P Parameter: Timepoint (hr) Value: 24
  misc_feature: MA Experiment 20000453 PARAMETER Experiment Name: At_100uM_ABA_P Parameter: Tissue Value: Aerial
  misc_feature: MA Experiment 20000453 PARAMETER Experiment Name: At_100uM_ABA_P Parameter: Treatment Value: 100uM ABA vs. No Treatment
  misc_feature: MA Experiment ID: 20001554 Result: Up-regulated in Transcription
  misc_feature: MA Experiment 20001554 PARAMETER Experiment Name: At_Drought_Soil_Dry_P Parameter: Age (day) Value: 21
  misc_feature: MA Experiment 20001554 PARAMETER Experiment Name: At_Drought_Soil_Dry_P Parameter: Organism Value: A. thaliana
  misc_feature: MA Experiment 20001554 PARAMETER Experiment Name: At_Drought_Soil_Dry_P Parameter: Plant Line Value: WS
  misc_feature: MA Experiment 20001554 PARAMETER Experiment Name: At_Drought_Soil_Dry_P Parameter: Post Timepoint (hr) Value: None
  misc_feature: MA Experiment 20001554 PARAMETER Experiment Name: At_Drought_Soil_Dry_P Parameter: Post-Treatment Value: None
  misc_feature: MA Experiment 20001554 PARAMETER Experiment Name: At_Drought_Soil_Dry_P Parameter: Timepoint (day) Value: 7
  misc_feature: MA Experiment 20001554 PARAMETER Experiment Name: At_Drought_Soil_Dry_P Parameter: Treatment Value: Drought vs. No Drought
  misc_feature: MA Experiment ID: 20001555 Result: Up-regulated in Transcription
  misc_feature: MA Experiment 20001555 PARAMETER Experiment Name: At_Drought_Soil_Dry_P Parameter: Age (day) Value: 24
  misc_feature: MA Experiment 20001555 PARAMETER Experiment Name: At_Drought_Soil_Dry_P Parameter: Organism Value: A. thaliana
  misc_feature: MA Experiment 20001555 PARAMETER Experiment Name: At_Drought_Soil_Dry_P Parameter: Plant Line Value: WS
  misc_feature: MA Experiment 20001555 PARAMETER Experiment Name: At_Drought_Soil_Dry_P Parameter: Post Timepoint (hr) Value: None
  misc_feature: MA Experiment 20001555 PARAMETER Experiment Name: At_Drought_Soil_Dry_P Parameter: Post-Treatment Value: None
  misc_feature: MA Experiment 20001555 PARAMETER Experiment Name: At_Drought_Soil_Dry_P Parameter: Timepoint (day) Value: 10
  misc_feature: MA Experiment 20001555 PARAMETER Experiment Name: At_Drought_Soil_Dry_P Parameter: Treatment Value: Drought vs. No Drought
  misc_feature: MA Experiment ID: 20001904 Result: Up-regulated in Transcription
  misc_feature: MA Experiment 20001904 PARAMETER Experiment Name: At_Drought_Reproduction_P Parameter: Age (day) Value: 37
  misc_feature: MA Experiment 20001904 PARAMETER Experiment Name: At_Drought_Reproduction_P Parameter: Organism Value: A. thaliana
  misc_feature: MA Experiment 20001904 PARAMETER Experiment Name: At_Drought_Reproduction_P Parameter: Plant Line Value: WS
  misc_feature: MA Experiment 20001904 PARAMETER Experiment Name: At_Drought_Reproduction_P Parameter: Timepoint (day) Value: 7
  misc_feature: MA Experiment 20001904 PARAMETER Experiment Name: At_Drought_Reproduction_P Parameter: Tissue Value: Rosettes
  misc_feature: MA Experiment 20001904 PARAMETER Experiment Name: At_Drought_Reproduction_P Parameter: Treatment Value: Drought vs. No Drought
  misc_feature: MA Experiment ID: 20001905 Result: Up-regulated in Transcription
  misc_feature: MA Experiment 20001905 PARAMETER Experiment Name: At_Drought_Reproduction_P Parameter: Age (day) Value: 40
  misc_feature: MA Experiment 20001905 PARAMETER Experiment Name: At_Drought_Reproduction_P Parameter: Organism Value: A. thaliana
  misc_feature: MA Experiment 20001905 PARAMETER Experiment Name: At_Drought_Reproduction_P Parameter: Plant Line Value: WS
  misc_feature: MA Experiment 20001905 PARAMETER Experiment Name: At_Drought_Reproduction_P Parameter: Timepoint (day) Value: 10
  misc_feature: MA Experiment 20001905 PARAMETER Experiment Name: At_Drought_Reproduction_P Parameter: Tissue Value: Rosettes
  misc_feature: MA Experiment 20001905 PARAMETER Experiment Name: At_Drought_Reproduction_P Parameter: Treatment Value: Drought vs. No Drought
  misc_feature: MA Experiment ID: 20001911 Result: Up-regulated in Transcription
  misc_feature: MA Experiment 20001911 PARAMETER Experiment Name: At_Drought_Reproduction_P Parameter: Age (day) Value: 40
  misc_feature: MA Experiment 20001911 PARAMETER Experiment Name: At_Drought_Reproduction_P Parameter: Organism Value: A. thaliana
  misc_feature: MA Experiment 20001911 PARAMETER Experiment Name: At_Drought_Reproduction_P Parameter: Plant Line Value: WS
  misc_feature: MA Experiment 20001911 PARAMETER Experiment Name: At_Drought_Reproduction_P Parameter: Timepoint (day) Value: 10
  misc_feature: MA Experiment 20001911 PARAMETER Experiment Name: At_Drought_Reproduction_P Parameter: Tissue Value: Flowers
  misc_feature: MA Experiment 20001911 PARAMETER Experiment Name: At_Drought_Reproduction_P Parameter: Treatment Value: Drought vs. No Drought
acgtgtttctgtttttctctaatttttctcttgttgttctcgattaacgaaaaagacttgtcgttctcaattcttatcgatttaagaacaaatcatctaacgaagattacttccgaagatcagaaacaaacacaaactgtgaatcgttgtttgttaattctctttaaaatcgccagaagaaagagatctccgttttctacagaagaaaagcaagagagtaagaatgggatcggaacaaaacgatagcacaagcttcacgcaatcgcaagcttcagagccaaagctatgtgttaaaggatgtggtttctttggatcaccatcaaacatggatctctgttctaaatgttacagaggcatttgtgctgaggaagctcaaacagcagttgctaaagctgctgttgaaaaatctttcaagccttctcctcctcgtagtctcttcatagcagaacctcctgctgttgttgtggaacccaaacccgaaaaggcggcagttgttgttgtctcggccgagccatcttcctcggcggttcctgaggcgaacgagccatcgagacctgcacgaaccaaccggtgtttgtgttgtaacaagaaggttgggatcatggggtttaagtgcaaatgcgggagcactatctgcggcgatcatcggtacccggagactcatgattgcagctttgatttcaaagaagttggacgtggagagattgccaaagctaatcctgtggttaaggctgataaaattcaaaggttctgaaatatggaagttttttctaagtattttggtggtaattactcatttgtatttgaaccgatttgggggttgtcttggatggttttaatggattgtttccaaaggg

SEQ ID NO: 29352 - protein, 176 aa, Arabidopsis thaliana
  peptide (1)..(176): Ceres Seq. ID no. 12323708
  misc_feature (117)..(157): Pfam Name: AN1-like Zinc finger Pfam Description: AN1-like Zinc finger
  misc_feature (6)..(175): Homolog of NCBI NO: 25082726 NR Description: expressed protein [Arabidopsis thaliana]
  misc_feature (6)..(175): Homolog of NCBI NO: 18403408 NR Description: expressed protein
  misc_feature (20)..(175): Homolog of NCBI NO: 14596167 NR Description: zinc finger-like protein [Arabidopsis thaliana]
  misc_feature (20)..(175): Homolog of NCBI NO: 18404102 NR Description: expressed protein
  misc_feature (13)..(175): Homolog of NCBI NO: 15225894 NR Description: putative zinc finger protein
  misc_feature (20)..(175): Homolog of NCBI NO: 15231686 NR Description: zinc finger - like protein
  misc_feature (1)..(175): Homolog of NCBI NO: 15221329 NR Description: hypothetical protein; protein id: At1g12440.1
  misc_feature (1)..(175): Homolog of NCBI NO: 8778645 NR Description: F5O11.17 [Arabidopsis thaliana]
  misc_feature (1)..(175): Homolog of NCBI NO: 15234402 NR Description: putative protein
  misc_feature (1)..(176): Homolog of NCBI NO: 15235819 NR Description: similar to zinc finger - like protein
MGSEQNDSTSFTQSQASEPKLCVKGCGFFGSPSNMDLCSKCYRGICAEEAQTAVAKAAVEKSFKPSPPRSLFIAEPPAVVVEPKPEKAAVVVVSAEPSSSAVPEANEPSRPARTNRCLCCNKKVGIMGFKCKCGSTICGDHRYPETHDCSFDFKEVGRGEIAKANPVVKADKIQRF

SEQ ID NO: 29353 - protein, 142 aa, Arabidopsis thaliana
  peptide (1)..(142): Ceres Seq. ID no. 12323709
  misc_feature (83)..(123): Pfam Name: AN1-like Zinc finger Pfam Description: AN1-like Zinc finger
  misc_feature (1)..(141): Homolog of NCBI NO: 25082726 NR Description: expressed protein [Arabidopsis thaliana]
  misc_feature (1)..(141): Homolog of NCBI NO: 18403408 NR Description: expressed protein
  misc_feature (1)..(141): Homolog of NCBI NO: 14596167 NR Description: zinc finger-like protein [Arabidopsis thaliana]
  misc_feature (1)..(141): Homolog of NCBI NO: 18404102 NR Description: expressed protein
  misc_feature (1)..(141): Homolog of NCBI NO: 15225894 NR Description: putative zinc finger protein
  misc_feature (1)..(141): Homolog of NCBI NO: 15231686 NR Description: zinc finger - like protein
  misc_feature (1)..(141): Homolog of NCBI NO: 15221329 NR Description: hypothetical protein; protein id: At1g12440.1
  misc_feature (1)..(141): Homolog of NCBI NO: 8778645 NR Description: F5O11.17 [Arabidopsis thaliana]
  misc_feature (1)..(141): Homolog of NCBI NO: 15234402 NR Description: putative protein
  misc_feature (1)..(142): Homolog of NCBI NO: 15235819 NR Description: similar to zinc finger - like protein
MDLCSKCYRGICAEEAQTAVAKAAVEKSFKPSPPRSLFIAEPPAVVVEPKPEKAAVVVVSAEPSSSAVPEANEPSRPARTNRCLCCNKKVGIMGFKCKCGSTICGDHRYPETHDCSFDFKEVGRGEIAKANPVVKADKIQRF

SEQ ID NO: 29354 - DNA, 1154 bp, Arabidopsis thaliana; identical to SEQ ID NO: 26919
  misc_feature (1)..(1154): Ceres Seq. ID no. 12385275
  misc_feature: MA Experiment ID: 108435 Result: Up-regulated in Transcription
  misc_feature: MA Experiment 108435 PARAMETER Experiment Name: At_stm_Mutants_cDNA_P Parameter: Plant Line Value: wt Landsburg vs stm
  misc_feature: MA Experiment 108435 PARAMETER Experiment Name: At_stm_Mutants_cDNA_P Parameter: Tissue Value: Shoot Apical Meristem Region
  misc_feature: MA Experiment ID: 108461 Result: Up-regulated in Transcription
  misc_feature: MA Experiment 108461 PARAMETER Experiment Name: At_Germinating_Seeds_cDNA_P Parameter: Age (day) Value: 1 vs. 0
  misc_feature: MA Experiment 108461 PARAMETER Experiment Name: At_Germinating_Seeds_cDNA_P Parameter: Tissue Value: Germinating Seeds
  misc_feature: MA Experiment ID: 108462 Result: Up-regulated in Transcription
  misc_feature: MA Experiment 108462 PARAMETER Experiment Name: At_Germinating_Seeds_cDNA_P Parameter: Age (day) Value: 2 vs. 0
  misc_feature: MA Experiment 108462 PARAMETER Experiment Name: At_Germinating_Seeds_cDNA_P Parameter: Tissue Value: Germinating Seeds
  misc_feature: MA Experiment ID: 108473 Result: Down-regulated in Transcription
  misc_feature: MA Experiment 108473 PARAMETER Experiment Name: At_Drought_Flowers_cDNA_P Parameter: Timepoint (hr) Value: 7 d
  misc_feature: MA Experiment 108473 PARAMETER Experiment Name: At_Drought_Flowers_cDNA_P Parameter: Tissue Value: Flower
  misc_feature: MA Experiment 108473 PARAMETER Experiment Name: At_Drought_Flowers_cDNA_P Parameter: Treatment Value: Drought vs. No Drought
  misc_feature: MA Experiment ID: 20000069 Result: Down-regulated in Transcription
  misc_feature: MA Experiment 20000069 PARAMETER Experiment Name: At_100uM_ABA_Mutants_cDNA_P Parameter: Plant Line Value: CS23
  misc_feature: MA Experiment 20000069 PARAMETER Experiment Name: At_100uM_ABA_Mutants_cDNA_P Parameter: Timepoint (hr) Value: 6
  misc_feature: MA Experiment 20000069 PARAMETER Experiment Name: At_100uM_ABA_Mutants_cDNA_P Parameter: Tissue Value: Aerial
  misc_feature: MA Experiment 20000069 PARAMETER Experiment Name: At_100uM_ABA_Mutants_cDNA_P Parameter: Treatment Value: 100uM ABA vs. No Treatment
  misc_feature: MA Experiment ID: 20000111 Result: Down-regulated in Transcription
  misc_feature: MA Experiment 20000111 PARAMETER Experiment Name: At_42deg_Heat_cDNA_P Parameter: Temperature (deg C) Value: 42 vs. 22
  misc_feature: MA Experiment 20000111 PARAMETER Experiment Name: At_42deg_Heat_cDNA_P Parameter: Timepoint (hr) Value: 6
  misc_feature: MA Experiment 20000111 PARAMETER Experiment Name: At_42deg_Heat_cDNA_P Parameter: Tissue Value: Aerial
  misc_feature: MA Experiment ID: 20000144 Result: Down-regulated in Transcription
  misc_feature: MA Experiment 20000144 PARAMETER Experiment Name: At_42deg_Heat_cDNA_P Parameter: Temperature (deg C) Value: 42 vs. 22
  misc_feature: MA Experiment 20000144 PARAMETER Experiment Name: At_42deg_Heat_cDNA_P Parameter: Timepoint (hr) Value: 1
  misc_feature: MA Experiment 20000144 PARAMETER Experiment Name: At_42deg_Heat_cDNA_P Parameter: Tissue Value: Aerial
  misc_feature: MA Experiment ID: 20000180 Result: Up-regulated in Transcription
  misc_feature: MA Experiment 20000180 PARAMETER Experiment Name: At_Germinating_Seeds_P Parameter: Age (hr) Value: 24 vs. 0
  misc_feature: MA Experiment 20000180 PARAMETER Experiment Name: At_Germinating_Seeds_P Parameter: Tissue Value: Germinating Seeds
  misc_feature: MA Experiment ID: 20000185 Result: Down-regulated in Transcription
  misc_feature: MA Experiment 20000185 PARAMETER Experiment Name: At_Roots__P Parameter: Age (day) Value: 7 vs. 21
  misc_feature: MA Experiment 20000185 PARAMETER Experiment Name: At_Roots__P Parameter: Organism Value: A. thaliana
  misc_feature: MA Experiment 20000185 PARAMETER Experiment Name: At_Roots__P Parameter: Tissue Value: Roots vs. Whole Plant
  misc_feature: MA Experiment ID: 20000224 Result: Up-regulated in Transcription
  misc_feature: MA Experiment ID: 20000234 Result: Up-regulated in Transcription
  misc_feature: MA Experiment 20000234 PARAMETER Experiment Name: At_Siliques_P Parameter: Age (day) Value: 21
  misc_feature: MA Experiment 20000234 PARAMETER Experiment Name: At_Siliques_P Parameter: Organism Value: A. thaliana
  misc_feature: MA Experiment 20000234 PARAMETER Experiment Name: At_Siliques_P Parameter: Plant Line Value: WS
  misc_feature: MA Experiment 20000234 PARAMETER Experiment Name: At_Siliques_P Parameter: Tissue Value: Less Than 5mm Siliques vs. Whole Plant
  misc_feature: MA Experiment ID: 20000265 Result: Up-regulated in Transcription
  misc_feature: MA Experiment 20000265 PARAMETER Experiment Name: At_Open_Flower_P Parameter: Age (day) Value: 21
  misc_feature: MA Experiment 20000265 PARAMETER Experiment Name: At_Open_Flower_P Parameter: Plant Line Value: WS
  misc_feature: MA Experiment 20000265 PARAMETER Experiment Name: At_Open_Flower_P Parameter: Tissue Value: Closed Flower vs. Whole Plant
  misc_feature: MA Experiment ID: 20000286 Result: Up-regulated in Transcription
  misc_feature: MA Experiment 20000286 PARAMETER Experiment Name: At_Open_Flower_P Parameter: Age (day) Value: 21
  misc_feature: MA Experiment 20000286 PARAMETER Experiment Name: At_Open_Flower_P Parameter: Plant Line Value: WS
  misc_feature: MA Experiment 20000286 PARAMETER Experiment Name: At_Open_Flower_P Parameter: Tissue Value: Half Open vs. Whole Plant
  misc_feature: MA Experiment ID: 20000437 Result: Down-regulated in Transcription
  misc_feature: MA Experiment 20000437 PARAMETER Experiment Name: At_Drought_P Parameter: Age (day) Value: 8
  misc_feature: MA Experiment 20000437 PARAMETER Experiment Name: At_Drought_P Parameter: Organism Value: A. thaliana
  misc_feature: MA Experiment 20000437 PARAMETER Experiment Name: At_Drought_P Parameter: Plant Line Value: WS
  misc_feature: MA Experiment 20000437 PARAMETER Experiment Name: At_Drought_P Parameter: Timepoint (hr) Value: 24
  misc_feature: MA Experiment 20000437 PARAMETER Experiment Name: At_Drought_P Parameter: Tissue Value: Whole Plant
  misc_feature: MA Experiment 20000437 PARAMETER Experiment Name: At_Drought_P Parameter: Treatment Value: Drought vs. No Drought
  misc_feature: MA Experiment ID: 20000439 Result: Down-regulated in Transcription
  misc_feature: MA Experiment 20000439 PARAMETER Experiment Name: At_Roots__P Parameter: Age (day) Value: 14 vs. 21
  misc_feature: MA Experiment 20000439 PARAMETER Experiment Name: At_Roots__P Parameter: Organism Value: A. thaliana
  misc_feature: MA Experiment 20000439 PARAMETER Experiment Name: At_Roots__P Parameter: Tissue Value: Roots vs. Whole Plant
  misc_feature: MA Experiment ID: 20000495 Result: Up-regulated in Transcription
  misc_feature: MA Experiment 20000495 PARAMETER Experiment Name: At_Guard_Cells_P Parameter: Harvest Date Value: 8/2/2002
  misc_feature: MA Experiment 20000495 PARAMETER Experiment Name: At_Guard_Cells_P Parameter: Organism Value: A. thaliana
  misc_feature: MA Experiment 20000495 PARAMETER Experiment Name: At_Guard_Cells_P Parameter: Tissue Value: Guard Cells vs. Leaves
  misc_feature: MA Experiment ID: 20001248 Result: Down-regulated in Transcription
  misc_feature: MA Experiment 20001248 PARAMETER Experiment Name: At_Far-red-induction_P Parameter: Age (day) Value: 7
  misc_feature: MA Experiment 20001248 PARAMETER Experiment Name: At_Far-red-induction_P Parameter: Light Value: Far-red vs. White
  misc_feature: MA Experiment 20001248 PARAMETER Experiment Name: At_Far-red-induction_P Parameter: Organism Value: A. thaliana
  misc_feature: MA Experiment 20001248 PARAMETER Experiment Name: At_Far-red-induction_P Parameter: Plant Line Value: Columbia
  misc_feature: MA Experiment 20001248 PARAMETER Experiment Name: At_Far-red-induction_P Parameter: Timepoint (hr) Value: 4
  misc_feature: MA Experiment 20001248 PARAMETER Experiment Name: At_Far-red-induction_P Parameter: Tissue Value: Whole Plant
  misc_feature: MA Experiment ID: 20001555 Result: Down-regulated in Transcription
  misc_feature: MA Experiment 20001555 PARAMETER Experiment Name: At_Drought_Soil_Dry_P Parameter: Age (day) Value: 24
  misc_feature: MA Experiment 20001555 PARAMETER Experiment Name: At_Drought_Soil_Dry_P Parameter: Organism Value: A. thaliana
  misc_feature: MA Experiment 20001555 PARAMETER Experiment Name: At_Drought_Soil_Dry_P Parameter: Plant Line Value: WS
  misc_feature: MA Experiment 20001555 PARAMETER Experiment Name: At_Drought_Soil_Dry_P Parameter: Post Timepoint (hr) Value: None
  misc_feature: MA Experiment 20001555 PARAMETER Experiment Name: At_Drought_Soil_Dry_P Parameter: Post-Treatment Value: None
  misc_feature: MA Experiment 20001555 PARAMETER Experiment Name: At_Drought_Soil_Dry_P Parameter: Timepoint (day) Value: 10
  misc_feature: MA Experiment 20001555 PARAMETER Experiment Name: At_Drought_Soil_Dry_P Parameter: Treatment Value: Drought vs. No Drought

SEQ ID NO: 29355 - protein, 350 aa, Arabidopsis thaliana; identical to SEQ ID NO: 26920
  peptide (1)..(350): Ceres Seq. ID no. 12385276
  misc_feature (73)..(338): Pfam Name: alpha/beta hydrolase fold Pfam Description: alpha/beta hydrolase fold
  misc_feature (73)..(338): Pfam Name: alpha/beta hydrolase fold Pfam Description: alpha/beta hydrolase fold
  misc_feature (73)..(338): Pfam Name: alpha/beta hydrolase fold Pfam Description: alpha/beta hydrolase fold
  misc_feature (20)..(350): Homolog of NCBI NO: 15230018 NR Description: putative epoxide hydrolase
  misc_feature (20)..(350): Homolog of NCBI NO: 15230018 NR Description: putative epoxide hydrolase
  misc_feature (20)..(350): Homolog of NCBI NO: 15230018 NR Description: putative epoxide hydrolase

SEQ ID NO: 29356 - protein, 331 aa, Arabidopsis thaliana; identical to SEQ ID NO: 21476
  peptide (1)..(331): Ceres Seq. ID no. 12385277
  misc_feature (54)..(319): Pfam Name: alpha/beta hydrolase fold Pfam Description: alpha/beta hydrolase fold
  misc_feature (54)..(319): Pfam Name: alpha/beta hydrolase fold Pfam Description: alpha/beta hydrolase fold
  misc_feature (54)..(319): Pfam Name: alpha/beta hydrolase fold Pfam Description: alpha/beta hydrolase fold
  misc_feature (1)..(331): Homolog of NCBI NO: 15230018 NR Description: putative epoxide hydrolase
  misc_feature (1)..(331): Homolog of NCBI NO: 15230018 NR Description: putative epoxide hydrolase
  misc_feature (1)..(331): Homolog of NCBI NO: 15230018 NR Description: putative epoxide hydrolase

SEQ ID NO: 29357 - protein, 324 aa, Arabidopsis thaliana; identical to SEQ ID NO: 21477
  peptide (1)..(324): Ceres Seq. ID no. 12385278
  misc_feature (47)..(312): Pfam Name: alpha/beta hydrolase fold Pfam Description: alpha/beta hydrolase fold
  misc_feature (47)..(312): Pfam Name: alpha/beta hydrolase fold Pfam Description: alpha/beta hydrolase fold
  misc_feature (47)..(312): Pfam Name: alpha/beta hydrolase fold Pfam Description: alpha/beta hydrolase fold
  misc_feature (1)..(324): Homolog of NCBI NO: 15230018 NR Description: putative epoxide hydrolase
  misc_feature (1)..(324): Homolog of NCBI NO: 15230018 NR Description: putative epoxide hydrolase
  misc_feature (1)..(324): Homolog of NCBI NO: 15230018 NR Description: putative epoxide hydrolase

SEQ ID NO: 29358 - DNA, 1200 bp, Arabidopsis thaliana
  misc_feature (1)..(1200): Ceres Seq. ID no. 12334308
  misc_feature: MA Experiment ID: 108433 Result: Down-regulated in Transcription
  misc_feature: MA Experiment 108433 PARAMETER Experiment Name: At_rhl_Mutant2_cDNA_P Parameter: Age (day) Value: 7
  misc_feature: MA Experiment 108433 PARAMETER Experiment Name: At_rhl_Mutant2_cDNA_P Parameter: Organism Value: A. thaliana
  misc_feature: MA Experiment 108433 PARAMETER Experiment Name: At_rhl_Mutant2_cDNA_P Parameter: Plant Line Value: rhl Mutant vs. wt landsburg
  misc_feature: MA Experiment 108433 PARAMETER Experiment Name: At_rhl_Mutant2_cDNA_P Parameter: Tissue Value: Roots
  misc_feature: MA Experiment ID: 108461 Result: Up-regulated in Transcription
  misc_feature: MA Experiment 108461 PARAMETER Experiment Name: At_Germinating_Seeds_cDNA_P Parameter: Age (day) Value: 1 vs. 0
  misc_feature: MA Experiment 108461 PARAMETER Experiment Name: At_Germinating_Seeds_cDNA_P Parameter: Tissue Value: Germinating Seeds
  misc_feature: MA Experiment ID: 108462 Result: Up-regulated in Transcription
  misc_feature: MA Experiment 108462 PARAMETER Experiment Name: At_Germinating_Seeds_cDNA_P Parameter: Age (day) Value: 2 vs. 0
  misc_feature: MA Experiment 108462 PARAMETER Experiment Name: At_Germinating_Seeds_cDNA_P Parameter: Tissue Value: Germinating Seeds
  misc_feature: MA Experiment ID: 108463 Result: Up-regulated in Transcription
  misc_feature: MA Experiment 108463 PARAMETER Experiment Name: At_Germinating_Seeds_cDNA_P Parameter: Age (day) Value: 3 vs. 0
  misc_feature: MA Experiment 108463 PARAMETER Experiment Name: At_Germinating_Seeds_cDNA_P Parameter: Tissue Value: Germinating Seeds
  misc_feature: MA Experiment ID: 108473 Result: Down-regulated in Transcription
  misc_feature: MA Experiment 108473 PARAMETER Experiment Name: At_Drought_Flowers_cDNA_P Parameter: Timepoint (hr) Value: 7 d
  misc_feature: MA Experiment 108473 PARAMETER Experiment Name: At_Drought_Flowers_cDNA_P Parameter: Tissue Value: Flower
  misc_feature: MA Experiment 108473 PARAMETER Experiment Name: At_Drought_Flowers_cDNA_P Parameter: Treatment Value: Drought vs. No Drought
  misc_feature: MA Experiment ID: 108488 Result: Up-regulated in Transcription
  misc_feature: MA Experiment ID: 108501 Result: Down-regulated in Transcription
  misc_feature: MA Experiment 108501 PARAMETER Experiment Name: At_ap2_floral_buds_cDNA_P Parameter: Plant Line Value: ap2 (Ler.)
  misc_feature: MA Experiment 108501 PARAMETER Experiment Name: At_ap2_floral_buds_cDNA_P Parameter: Tissue Value: Closed Flower
  misc_feature: MA Experiment ID: 108574 Result: Up-regulated in Transcription
  misc_feature: MA Experiment 108574 PARAMETER Experiment Name: At_Wounding__cDNA_P Parameter: Timepoint (hr) Value: 1
  misc_feature: MA Experiment 108574 PARAMETER Experiment Name: At_Wounding__cDNA_P Parameter: Tissue Value: Aerial
  misc_feature: MA Experiment 108574 PARAMETER Experiment Name: At_Wounding__cDNA_P Parameter: Treatment Value: Wounding vs. No Wounding
  misc_feature: MA Experiment ID: 108579 Result: Up-regulated in Transcription
  misc_feature: MA Experiment 108579 PARAMETER Experiment Name: At_4deg_Cold_cDNA_P Parameter: Temperature (deg C) Value: 4 vs. 22
  misc_feature: MA Experiment 108579 PARAMETER Experiment Name: At_4deg_Cold_cDNA_P Parameter: Timepoint (hr) Value: 6
  misc_feature: MA Experiment 108579 PARAMETER Experiment Name: At_4deg_Cold_cDNA_P Parameter: Tissue Value: Aerial
  misc_feature: MA Experiment ID: 108595 Result: Down-regulated in Transcription
  misc_feature: MA Experiment 108595 PARAMETER Experiment Name: At_Ler-pi_Ovule_cDNA_P Parameter: Plant Line Value: null
  misc_feature: MA Experiment ID: 20000069 Result: Down-regulated in Transcription
  misc_feature: MA Experiment 20000069 PARAMETER Experiment Name: At_100uM_ABA_Mutants_cDNA_P Parameter: Plant Line Value: CS23
  misc_feature: MA Experiment 20000069 PARAMETER Experiment Name: At_100uM_ABA_Mutants_cDNA_P Parameter: Timepoint (hr) Value: 6
  misc_feature: MA Experiment 20000069 PARAMETER Experiment Name: At_100uM_ABA_Mutants_cDNA_P Parameter: Tissue Value: Aerial
  misc_feature: MA Experiment 20000069 PARAMETER Experiment Name: At_100uM_ABA_Mutants_cDNA_P Parameter: Treatment Value: 100uM ABA vs. No Treatment
  misc_feature: MA Experiment ID: 20000070 Result: Down-regulated in Transcription
  misc_feature: MA Experiment 20000070 PARAMETER Experiment Name: At_100uM_ABA_Mutants_cDNA_P Parameter: Plant Line Value: CS24
  misc_feature: MA Experiment 20000070 PARAMETER Experiment Name: At_100uM_ABA_Mutants_cDNA_P Parameter: Timepoint (hr) Value: 6
  misc_feature: MA Experiment 20000070 PARAMETER Experiment Name: At_100uM_ABA_Mutants_cDNA_P Parameter: Tissue Value: Aerial
  misc_feature: MA Experiment 20000070 PARAMETER Experiment Name: At_100uM_ABA_Mutants_cDNA_P Parameter: Treatment Value: 100uM ABA vs. No Treatment
  misc_feature: MA Experiment ID: 20000086 Result: Down-regulated in Transcription
  misc_feature: MA Experiment 20000086 PARAMETER Experiment Name: At_100uM_ABA_Mutants_cDNA_P Parameter: Plant Line Value: CS22
  misc_feature: MA Experiment 20000086 PARAMETER Experiment Name: At_100uM_ABA_Mutants_cDNA_P Parameter: Timepoint (hr) Value: 6
  misc_feature: MA Experiment 20000086 PARAMETER Experiment Name: At_100uM_ABA_Mutants_cDNA_P Parameter: Tissue Value: Aerial
  misc_feature: MA Experiment 20000086 PARAMETER Experiment Name: At_100uM_ABA_Mutants_cDNA_P Parameter: Treatment Value: 100uM ABA vs. No Treatment
  misc_feature: MA Experiment ID: 20000087 Result: Down-regulated in Transcription
  misc_feature: MA Experiment 20000087 PARAMETER Experiment Name: At_100uM_ABA_Mutants_cDNA_P Parameter: Plant Line Value: WS
  misc_feature: MA Experiment 20000087 PARAMETER Experiment Name: At_100uM_ABA_Mutants_cDNA_P Parameter: Timepoint (hr) Value: 6
  misc_feature: MA Experiment 20000087 PARAMETER Experiment Name: At_100uM_ABA_Mutants_cDNA_P Parameter: Tissue Value: Aerial
  misc_feature: MA Experiment 20000087 PARAMETER Experiment Name: At_100uM_ABA_Mutants_cDNA_P Parameter: Treatment Value: 100uM ABA vs. No Treatment
  misc_feature: MA Experiment ID: 20000088 Result: Down-regulated in Transcription
  misc_feature: MA Experiment 20000088 PARAMETER Experiment Name: At_100uM_ABA_Mutants_cDNA_P Parameter: Plant Line Value: Landsberg
  misc_feature: MA Experiment 20000088 PARAMETER Experiment Name: At_100uM_ABA_Mutants_cDNA_P Parameter: Timepoint (hr) Value: 6
  misc_feature: MA Experiment 20000088 PARAMETER Experiment Name: At_100uM_ABA_Mutants_cDNA_P Parameter: Tissue Value: Aerial
  misc_feature: MA Experiment 20000088 PARAMETER Experiment Name: At_100uM_ABA_Mutants_cDNA_P Parameter: Treatment Value: 100uM ABA vs. No Treatment
  misc_feature: MA Experiment ID: 20000089 Result: Down-regulated in Transcription
  misc_feature: MA Experiment ID: 20000090 Result: Down-regulated in Transcription
  misc_feature: MA Experiment ID: 20000111 Result: Up-regulated in Transcription
  misc_feature: MA Experiment 20000111 PARAMETER Experiment Name: At_42deg_Heat_cDNA_P Parameter: Temperature (deg C) Value: 42 vs. 22
  misc_feature: MA Experiment 20000111 PARAMETER Experiment Name: At_42deg_Heat_cDNA_P Parameter: Timepoint (hr) Value: 6
  misc_feature: MA Experiment 20000111 PARAMETER Experiment Name: At_42deg_Heat_cDNA_P Parameter: Tissue Value: Aerial
  misc_feature: MA Experiment ID: 20000113 Result: Up-regulated in Transcription
  misc_feature: MA Experiment 20000113 PARAMETER Experiment Name: At_42deg_Heat_cDNA_P Parameter: Temperature (deg C) Value: 42 vs. 22
  misc_feature: MA Experiment 20000113 PARAMETER Experiment Name: At_42deg_Heat_cDNA_P Parameter: Timepoint (hr) Value: 8
  misc_feature: MA Experiment 20000113 PARAMETER Experiment Name: At_42deg_Heat_cDNA_P Parameter: Tissue Value: Aerial
  misc_feature: MA Experiment ID: 20000117 Result: Down-regulated in Transcription
  misc_feature: MA Experiment 20000117 PARAMETER Experiment Name: At_100uM_ABA_Mutants_cDNA_P Parameter: Plant Line Value: Columbia
  misc_feature: MA Experiment 20000117 PARAMETER Experiment Name: At_100uM_ABA_Mutants_cDNA_P Parameter: Timepoint (hr) Value: 6
  misc_feature: MA Experiment 20000117 PARAMETER Experiment Name: At_100uM_ABA_Mutants_cDNA_P Parameter: Tissue Value: Aerial
  misc_feature: MA Experiment 20000117 PARAMETER Experiment Name: At_100uM_ABA_Mutants_cDNA_P Parameter: Treatment Value: 100uM ABA vs. No Treatment
  misc_feature: MA Experiment ID: 20000179 Result: Up-regulated in Transcription
  misc_feature: MA Experiment 20000179 PARAMETER Experiment Name: At_Germinating_Seeds_P Parameter: Age (hr) Value: 6 vs. 0
  misc_feature: MA Experiment 20000179 PARAMETER Experiment Name: At_Germinating_Seeds_P Parameter: Tissue Value: Germinating Seeds
  misc_feature: MA Experiment ID: 20000180 Result: Up-regulated in Transcription
  misc_feature: MA Experiment 20000180 PARAMETER Experiment Name: At_Germinating_Seeds_P Parameter: Age (hr) Value: 24 vs. 0
  misc_feature: MA Experiment 20000180 PARAMETER Experiment Name: At_Germinating_Seeds_P Parameter: Tissue Value: Germinating Seeds
  misc_feature: MA Experiment ID: 20000184 Result: Up-regulated in Transcription
  misc_feature: MA Experiment 20000184 PARAMETER Experiment Name: At_Shoots__P Parameter: Age (day) Value: 7
  misc_feature: MA Experiment 20000184 PARAMETER Experiment Name: At_Shoots__P Parameter: Tissue Value: Shoots vs. Whole Plant
  misc_feature: MA Experiment ID: 20000185 Result: Down-regulated in Transcription
  misc_feature: MA Experiment 20000185 PARAMETER Experiment Name: At_Roots__P Parameter: Age (day) Value: 7 vs. 21
  misc_feature: MA Experiment 20000185 PARAMETER Experiment Name: At_Roots__P Parameter: Organism Value: A. thaliana
  misc_feature: MA Experiment 20000185 PARAMETER Experiment Name: At_Roots__P Parameter: Tissue Value: Roots vs. Whole Plant
  misc_feature: MA Experiment ID: 20000224 Result: Up-regulated in Transcription
  misc_feature: MA Experiment ID: 20000234 Result: Up-regulated in Transcription
  misc_feature: MA Experiment 20000234 PARAMETER Experiment Name: At_Siliques_P Parameter: Age (day) Value: 21
  misc_feature: MA Experiment 20000234 PARAMETER Experiment Name: At_Siliques_P Parameter: Organism Value: A. thaliana
  misc_feature: MA Experiment 20000234 PARAMETER Experiment Name: At_Siliques_P Parameter: Plant Line Value: WS
  misc_feature: MA Experiment 20000234 PARAMETER Experiment Name: At_Siliques_P Parameter: Tissue Value: Less Than 5mm Siliques vs. Whole Plant
  misc_feature: MA Experiment ID: 20000235 Result: Up-regulated in Transcription
  misc_feature: MA Experiment 20000235 PARAMETER Experiment Name: At_Siliques_P Parameter: Age (day) Value: 21
  misc_feature: MA Experiment 20000235 PARAMETER Experiment Name: At_Siliques_P Parameter: Organism Value: A. thaliana
  misc_feature: MA Experiment 20000235 PARAMETER Experiment Name: At_Siliques_P Parameter: Plant Line Value: WS
  misc_feature: MA Experiment 20000235 PARAMETER Experiment Name: At_Siliques_P Parameter: Tissue Value: 5-10mm Siliques vs. Whole Plant
  misc_feature: MA Experiment ID: 20000265 Result: Up-regulated in Transcription
  misc_feature: MA Experiment 20000265 PARAMETER Experiment Name: At_Open_Flower_P Parameter: Age (day) Value: 21
  misc_feature: MA Experiment 20000265 PARAMETER Experiment Name: At_Open_Flower_P Parameter: Plant Line Value: WS
  misc_feature: MA Experiment 20000265 PARAMETER Experiment Name: At_Open_Flower_P Parameter: Tissue Value: Closed Flower vs. Whole Plant
  misc_feature: MA Experiment ID: 20000267 Result: Up-regulated in Transcription
  misc_feature: MA Experiment 20000267 PARAMETER Experiment Name: At_Drought_P Parameter: Age (day) Value: 7
  misc_feature: MA Experiment 20000267 PARAMETER Experiment Name: At_Drought_P Parameter: Organism Value: A. thaliana
  misc_feature: MA Experiment 20000267 PARAMETER Experiment Name: At_Drought_P Parameter: Plant Line Value: WS
  misc_feature: MA Experiment 20000267 PARAMETER Experiment Name: At_Drought_P Parameter: Timepoint (hr) Value: 6
  misc_feature: MA Experiment 20000267 PARAMETER Experiment Name: At_Drought_P Parameter: Tissue Value: Whole Plant
  misc_feature: MA Experiment 20000267 PARAMETER Experiment Name: At_Drought_P Parameter: Treatment Value: Drought vs. No Drought
  misc_feature: MA Experiment ID: 20000268 Result: Up-regulated in Transcription
  misc_feature: MA Experiment 20000268 PARAMETER Experiment Name: At_100mM_NaCl__P Parameter: Age (day) Value: 14
  misc_feature: MA Experiment 20000268 PARAMETER Experiment Name: At_100mM_NaCl__P Parameter: Organism Value: A. thaliana
  misc_feature: MA Experiment 20000268 PARAMETER Experiment Name: At_100mM_NaCl__P Parameter: Plant Line Value: WS
  misc_feature: MA Experiment 20000268 PARAMETER Experiment Name: At_100mM_NaCl__P Parameter: Timepoint (hr) Value: 6
  misc_feature: MA Experiment 20000268 PARAMETER Experiment Name: At_100mM_NaCl__P Parameter: Tissue Value: Whole Plant
  misc_feature: MA Experiment 20000268 PARAMETER Experiment Name: At_100mM_NaCl__P Parameter: Treatment Value: 100mM NaCl vs. No Treatment
  misc_feature: MA Experiment ID: 20000286 Result: Up-regulated in Transcription
  misc_feature: MA Experiment 20000286 PARAMETER Experiment Name: At_Open_Flower_P Parameter: Age (day) Value: 21
  misc_feature: MA Experiment 20000286 PARAMETER Experiment Name: At_Open_Flower_P Parameter: Plant Line Value: WS
  misc_feature: MA Experiment 20000286 PARAMETER Experiment Name: At_Open_Flower_P Parameter: Tissue Value: Half Open vs. Whole Plant
  misc_feature: MA Experiment ID: 20000436 Result: Up-regulated in Transcription
  misc_feature: MA Experiment 20000436 PARAMETER Experiment Name: At_Drought_P Parameter: Age (day) Value: 7
  misc_feature: MA Experiment 20000436 PARAMETER Experiment Name: At_Drought_P Parameter: Organism Value: A. thaliana
  misc_feature: MA Experiment 20000436 PARAMETER Experiment Name: At_Drought_P Parameter: Plant Line Value: WS
  misc_feature: MA Experiment 20000436 PARAMETER Experiment Name: At_Drought_P Parameter: Timepoint (hr) Value: 12
  misc_feature: MA Experiment 20000436 PARAMETER Experiment Name: At_Drought_P Parameter: Tissue Value: Whole Plant
  misc_feature: MA Experiment 20000436 PARAMETER Experiment Name: At_Drought_P Parameter: Treatment Value: Drought vs. No Drought
  misc_feature: MA Experiment ID: 20000438 Result: Up-regulated in Transcription
  misc_feature: MA Experiment 20000438 PARAMETER Experiment Name: At_Shoots__P Parameter: Age (day) Value: 14
  misc_feature: MA Experiment 20000438 PARAMETER Experiment Name: At_Shoots__P Parameter: Tissue Value: Shoots vs. Whole Plant
  misc_feature: MA Experiment ID: 20000439 Result: Down-regulated in Transcription
  misc_feature: MA Experiment 20000439 PARAMETER Experiment Name: At_Roots__P Parameter: Age (day) Value: 14 vs. 21
  misc_feature: MA Experiment 20000439 PARAMETER Experiment Name: At_Roots__P Parameter: Organism Value: A. thaliana
  misc_feature: MA Experiment 20000439 PARAMETER Experiment Name: At_Roots__P Parameter: Tissue Value: Roots vs. Whole Plant
  misc_feature: MA Experiment ID: 20000527 Result: Up-regulated in Transcription
  misc_feature: MA Experiment 20000527 PARAMETER Experiment Name: At_10percent_PEG_P Parameter: Age (day) Value: 20
  misc_feature: MA Experiment 20000527 PARAMETER Experiment Name: At_10percent_PEG_P Parameter: Organism Value: A. thaliana
  misc_feature: MA Experiment 20000527 PARAMETER Experiment Name: At_10percent_PEG_P Parameter: Plant Line Value: WS
  misc_feature: MA Experiment 20000527 PARAMETER Experiment Name: At_10percent_PEG_P Parameter: Timepoint (day) Value: 20
  misc_feature: MA Experiment 20000527 PARAMETER Experiment Name: At_10percent_PEG_P Parameter: Tissue Value: Whole Plant
  misc_feature: MA Experiment 20000527 PARAMETER Experiment Name: At_10percent_PEG_P Parameter: Treatment Value: 10percent PEG vs. No Treatment
  misc_feature: MA Experiment ID: 20000573 Result: Down-regulated in Transcription
  misc_feature: MA Experiment 20000573 PARAMETER Experiment Name: At_100uM_ABA_Mutants__P Parameter: Organism Value: A. thaliana
  misc_feature: MA Experiment 20000573 PARAMETER Experiment Name: At_100uM_ABA_Mutants__P Parameter: Plant Line Value: CS22 vs. Ler wt
  misc_feature: MA Experiment 20000573 PARAMETER Experiment Name: At_100uM_ABA_Mutants__P Parameter: Timepoint (hr) Value: N/A
  misc_feature: MA Experiment 20000573 PARAMETER Experiment Name: At_100uM_ABA_Mutants__P Parameter: Tissue Value: Whole Plant
  misc_feature: MA Experiment 20000573 PARAMETER Experiment Name: At_100uM_ABA_Mutants__P Parameter: Treatment Value: None
  misc_feature: MA Experiment ID: 20000574 Result: Down-regulated in Transcription
  misc_feature: MA Experiment 20000574 PARAMETER Experiment Name: At_100uM_ABA_Mutants__P Parameter: Organism Value: A. thaliana
  misc_feature: MA Experiment 20000574 PARAMETER Experiment Name: At_100uM_ABA_Mutants__P Parameter: Plant Line Value: CS23 vs. Ler wt
  misc_feature: MA Experiment 20000574 PARAMETER Experiment Name: At_100uM_ABA_Mutants__P Parameter: Timepoint (hr) Value: N/A
  misc_feature: MA Experiment 20000574 PARAMETER Experiment Name: At_100uM_ABA_Mutants__P Parameter: Tissue Value: Whole Plant
  misc_feature: MA Experiment 20000574 PARAMETER Experiment Name: At_100uM_ABA_Mutants__P Parameter: Treatment Value: None
  misc_feature: MA Experiment ID: 20001248 Result: Down-regulated in Transcription
  misc_feature: MA Experiment 20001248 PARAMETER Experiment Name: At_Far-red-induction_P Parameter: Age (day) Value: 7
  misc_feature: MA Experiment 20001248 PARAMETER Experiment Name: At_Far-red-induction_P Parameter: Light Value: Far-red vs. White
  misc_feature: MA Experiment 20001248 PARAMETER Experiment Name: At_Far-red-induction_P Parameter: Organism Value: A. thaliana
  misc_feature: MA Experiment 20001248 PARAMETER Experiment Name: At_Far-red-induction_P Parameter: Plant Line Value: Columbia
  misc_feature: MA Experiment 20001248 PARAMETER Experiment Name: At_Far-red-induction_P Parameter: Timepoint (hr) Value: 4
  misc_feature: MA Experiment 20001248 PARAMETER Experiment Name: At_Far-red-induction_P Parameter: Tissue Value: Whole Plant
  misc_feature: MA Experiment ID: 20001450 Result: Down-regulated in Transcription
  misc_feature: MA Experiment 20001450 PARAMETER Experiment Name: At_Far-red-induction_P Parameter: Age (day) Value: 7
  misc_feature: MA Experiment 20001450 PARAMETER Experiment Name: At_Far-red-induction_P Parameter: Light Value: Far-red vs. White
  misc_feature: MA Experiment 20001450 PARAMETER Experiment Name: At_Far-red-induction_P Parameter: Organism Value: A. thaliana
  misc_feature: MA Experiment 20001450 PARAMETER Experiment Name: At_Far-red-induction_P Parameter: Plant Line Value: Columbia
  misc_feature: MA Experiment 20001450 PARAMETER Experiment Name: At_Far-red-induction_P Parameter: Timepoint (hr) Value: 8
  misc_feature: MA Experiment 20001450 PARAMETER Experiment Name: At_Far-red-induction_P Parameter: Tissue Value: Whole Plant
  misc_feature: MA Experiment ID: 20001558 Result: Up-regulated in Transcription
  misc_feature: MA Experiment 20001558 PARAMETER Experiment Name: At_Drought_Soil_Dry_P Parameter: Age (day) Value: 27
  misc_feature: MA Experiment 20001558 PARAMETER Experiment Name: At_Drought_Soil_Dry_P Parameter: Organism Value: A. thaliana
  misc_feature: MA Experiment 20001558 PARAMETER Experiment Name: At_Drought_Soil_Dry_P Parameter: Plant Line Value: WS
  misc_feature: MA Experiment 20001558 PARAMETER Experiment Name: At_Drought_Soil_Dry_P Parameter: Post Timepoint (hr) Value: 6
  misc_feature: MA Experiment 20001558 PARAMETER Experiment Name: At_Drought_Soil_Dry_P Parameter: Post-Treatment Value: Re-Water vs. No Drought
  misc_feature: MA Experiment 20001558 PARAMETER Experiment Name: At_Drought_Soil_Dry_P Parameter: Timepoint (day) Value: 13
  misc_feature: MA Experiment 20001558 PARAMETER Experiment Name: At_Drought_Soil_Dry_P Parameter: Treatment Value: Drought vs. No Drought
  misc_feature: MA Experiment ID: 20001911 Result: Down-regulated in Transcription
  misc_feature: MA Experiment 20001911 PARAMETER Experiment Name: At_Drought_Reproduction_P Parameter: Age (day) Value: 40
  misc_feature: MA Experiment 20001911 PARAMETER Experiment Name: At_Drought_Reproduction_P Parameter: Organism Value: A. thaliana
  misc_feature: MA Experiment 20001911 PARAMETER Experiment Name: At_Drought_Reproduction_P Parameter: Plant Line Value: WS
  misc_feature: MA Experiment 20001911 PARAMETER Experiment Name: At_Drought_Reproduction_P Parameter: Timepoint (day) Value: 10
  misc_feature: MA Experiment 20001911 PARAMETER Experiment Name: At_Drought_Reproduction_P Parameter: Tissue Value: Flowers
  misc_feature: MA Experiment 20001911 PARAMETER Experiment Name: At_Drought_Reproduction_P Parameter: Treatment Value: Drought vs. No Drought
aaaatttcaaatctcacttccttatcacaatgtcttcctctatctctcccctcctcacaaccgtcatcttcgtgtcgagcctcctcttctttactatctccaaagcggcgacaattccaaacatccaccgtccattcaacaaaatctacgccttcggagattctttcaccgacaccggaaactcacgctccggcgaaggaccagccggtttcggacacttgtcaagtcctccatacggcatgactttcttccgaagaccaacaaaccgttactccgacggtcgtctcaccatcgacttcgtggcagagtcaatgaatttaccgtttctgccaccgtatctcagcctcaaaaccactaacgctaacggcacagcaacggatactcacggcgttaatttcgctgtctctggatcaactgtgattaaacacgcgtttttcgtgaagaacaatctgtcgcttgatatgactcctcagtctatagaaacagagcttgcttggttcgagaagtatttagagacacttggaacgaatcagaaggtttcgttgtttaaagattctctcttttggattggagaaattggagtgaatgattatgcgtatacccttggatctactgtgtcaagtgacaccattagagaacttagtatctcaacttttacaaggtttttggagacattgttgaacaaaggtgtgaaatatatgttggtgcaaggacatccagcaactggatgcttaacgttagcaatgtcgttggccgcagaatatgatcgggacagtctaggatgtgtgcagagtgccaataaccaaagttacactcacaatcttgctcttcaatccaaacttaaacaacttaggatcaagtatccgagtgcgacaatagtctacgcagattactggaacgcgtaccgtgcggtgattaaacaccctagcaagtacggtatcaccgagaagttcaaggcgtgttgtggaattggagagccgtacaacttccaagtgttccaaacgtgtgggacggatgcagctacagtgtgtaaggacccgaatcaatacatcaattgggacggagtccacttgaccgaggctatgtataaggttatggccgatatgttccttgacggcactttcactcgtcctagatttagtgacttgttgatcaagaaactaaactatttatgaatgaattgttttactgattttttat

SEQ ID NO: 29359 - protein, 390 aa, Arabidopsis thaliana
  peptide (1)..(390): Ceres Seq. ID no. 12334309
  misc_feature (48)..(369): Pfam Name: GDSL-like Lipase/Acylhydrolase Pfam Description: GDSL-like Lipase/Acylhydrolase
  misc_feature (10)..(379): Homolog of NCBI NO: 15218756 NR Description: lipase; protein id: At1g28670.1, supported by
  misc_feature (10)..(379): Homolog of NCBI NO: 15218751 NR Description: lipase, putative; protein id: At1g28640.1
  misc_feature (10)..(377): Homolog of NCBI NO: 34903994 NR Description: unnamed protein product [Oryza sativa (japonica
  misc_feature (15)..(379): Homolog of NCBI NO: 15218725 NR Description: lipase, putative
  misc_feature (14)..(379): Homolog of NCBI NO: 21593234 NR Description: lipase, putative [Arabidopsis thaliana]
  misc_feature (14)..(379): Homolog of NCBI NO: 15218731 NR Description: lipase, putative
  misc_feature (14)..(379): Homolog of NCBI NO: 10764858 NR Description: F1K23.17 [Arabidopsis thaliana]
  misc_feature (45)..(378): Homolog of NCBI NO: 34903978 NR Description: unnamed protein product [Oryza sativa (japonica
  misc_feature (17)..(379): Homolog of NCBI NO: 15218753 NR Description: lipase, putative; protein id: At1g28650.1
  misc_feature (10)..(390): Homolog of NCBI NO: 15228381 NR Description: lipase - like protein
NFKSHFLITMSSSISPLLTTVIFVSSLLFFTISKAATIPNIHRPFNKIYAFGDSFTDTGNSRSGEGPAGFGHLSSPPYGMTFFRRPTNRYSDGRLTIDFVAESMNLPFLPPYLSLKTTNANGTATDTHGVNFAVSGSTVIKHAFFVKNNLSLDMTPQSIETELAWFEKYLETLGTNQKVSLFKDSLFWIGEIGVNDYAYTLGSTVSSDTIRELSISTFTRFLETLLNKGVKYMLVQGHPATGCLTLAMSLAAEYDRDSLGCVQSANNQSYTHNLALQSKLKQLRIKYPSATIVYADYWNAYRAVIKHPSKYGITEKFKACCGIGEPYNFQVFQTCGTDAATVCKDPNQYINWDGVHLTEAMYKVMADMFLDGTFTRPRFSDLLIKKLNYL

SEQ ID NO: 29360 - protein, 381 aa, Arabidopsis thaliana
  peptide (1)..(381): Ceres Seq. ID no. 12334310
  misc_feature (39)..(360): Pfam Name: GDSL-like Lipase/Acylhydrolase Pfam Description: GDSL-like Lipase/Acylhydrolase
  misc_feature (1)..(370): Homolog of NCBI NO: 15218756 NR Description: lipase; protein id: At1g28670.1, supported by
  misc_feature (1)..(370): Homolog of NCBI NO: 15218751 NR Description: lipase, putative; protein id: At1g28640.1
  misc_feature (1)..(368): Homolog of NCBI NO: 34903994 NR Description: unnamed protein product [Oryza sativa (japonica
  misc_feature (6)..(370): Homolog of NCBI NO: 15218725 NR Description: lipase, putative
  misc_feature (5)..(370): Homolog of NCBI NO: 21593234 NR Description: lipase, putative [Arabidopsis thaliana]
  misc_feature (5)..(370): Homolog of NCBI NO: 15218731 NR Description: lipase, putative
  misc_feature (5)..(370): Homolog of NCBI NO: 10764858 NR Description: F1K23.17 [Arabidopsis thaliana]
  misc_feature (36)..(369): Homolog of NCBI NO: 34903978 NR Description: unnamed protein product [Oryza sativa (japonica
  misc_feature (8)..(370): Homolog of NCBI NO: 15218753 NR Description: lipase, putative; protein id: At1g28650.1
  misc_feature (1)..(381): Homolog of NCBI NO: 15228381 NR Description: lipase - like protein
MSSSISPLLTTVIFVSSLLFFTISKAATIPNIHRPFNKIYAFGDSFTDTGNSRSGEGPAGFGHLSSPPYGMTFFRRPTNRYSDGRLTIDFVAESMNLPFLPPYLSLKTTNANGTATDTHGVNFAVSGSTVIKHAFFVKNNLSLDMTPQSIETELAWFEKYLETLGTNQKVSLFKDSLFWIGEIGVNDYAYTLGSTVSSDTIRELSISTFTRFLETLLNKGVKYMLVQGHPATGCLTLAMSLAAEYDRDSLGCVQSANNQSYTHNLALQSKLKQLRIKYPSATIVYADYWNAYRAVIKHPSKYGITEKFKACCGIGEPYNFQVFQTCGTDAATVCKDPNQYINWDGVHLTEAMYKVMADMFLDGTFTRPRFSDLLIKKLNYL

SEQ ID NO: 29361 - protein, 311 aa, Arabidopsis thaliana
  peptide (1)..(311): Ceres Seq. ID no. 12334311
  misc_feature (1)..(290): Pfam Name: GDSL-like Lipase/Acylhydrolase Pfam Description: GDSL-like Lipase/Acylhydrolase
  misc_feature (1)..(300): Homolog of NCBI NO: 15218756 NR Description: lipase; protein id: At1g28670.1, supported by
  misc_feature (1)..(300): Homolog of NCBI NO: 15218751 NR Description: lipase, putative; protein id: At1g28640.1
  misc_feature (1)..(298): Homolog of NCBI NO: 34903994 NR Description: unnamed protein product [Oryza sativa (japonica
  misc_feature (1)..(300): Homolog of NCBI NO: 15218725 NR Description: lipase, putative
  misc_feature (1)..(300): Homolog of NCBI NO: 21593234 NR Description: lipase, putative [Arabidopsis thaliana]
  misc_feature (1)..(300): Homolog of NCBI NO: 15218731 NR Description: lipase, putative
  misc_feature (1)..(300): Homolog of NCBI NO: 10764858 NR Description: F1K23.17 [Arabidopsis thaliana]
  misc_feature (1)..(299): Homolog of NCBI NO: 34903978 NR Description: unnamed protein product [Oryza sativa (japonica
  misc_feature (1)..(300): Homolog of NCBI NO: 15218753 NR Description: lipase, putative; protein id: At1g28650.1
  misc_feature (1)..(311): Homolog of NCBI NO: 15228381 NR Description: lipase - like protein
MTFFRRPTNRYSDGRLTIDFVAESMNLPFLPPYLSLKTTNANGTATDTHGVNFAVSGSTVIKHAFFVKNNLSLDMTPQSIETELAWFEKYLETLGTNQKVSLFKDSLFWIGEIGVNDYAYTLGSTVSSDTIRELSISTFTRFLETLLNKGVKYMLVQGHPATGCLTLAMSLAAEYDRDSLGCVQSANNQSYTHNLALQSKLKQLRIKYPSATIVYADYWNAYRAVIKHPSKYGITEKFKACCGIGEPYNFQVFQTCGTDAATVCKDPNQYINWDGVHLTEAMYKVMADMFLDGTFTRPRFSDLLIKKLNYL

SEQ ID NO: 29362 - DNA, 813 bp, Arabidopsis thaliana
  misc_feature (1)..(813): Ceres Seq. ID no. 12580234
  misc_feature: MA Experiment ID: 20000111 Result: Down-regulated in Transcription
  misc_feature: MA Experiment 20000111 PARAMETER Experiment Name: At_42deg_Heat_cDNA_P Parameter: Temperature (deg C) Value: 42 vs. 22
  misc_feature: MA Experiment 20000111 PARAMETER Experiment Name: At_42deg_Heat_cDNA_P Parameter: Timepoint (hr) Value: 6
  misc_feature: MA Experiment 20000111 PARAMETER Experiment Name: At_42deg_Heat_cDNA_P Parameter: Tissue Value: Aerial
  misc_feature: MA Experiment ID: 20000112 Result: Down-regulated in Transcription
  misc_feature: MA Experiment 20000112 PARAMETER Experiment Name: At_42deg_Heat_cDNA_P Parameter: Temperature (deg C) Value: 42 vs. 22
  misc_feature: MA Experiment 20000112 PARAMETER Experiment Name: At_42deg_Heat_cDNA_P Parameter: Timepoint (hr) Value: 2
  misc_feature: MA Experiment 20000112 PARAMETER Experiment Name: At_42deg_Heat_cDNA_P Parameter: Tissue Value: Aerial
  misc_feature: MA Experiment ID: 20000113 Result: Down-regulated in Transcription
  misc_feature: MA Experiment 20000113 PARAMETER Experiment Name: At_42deg_Heat_cDNA_P Parameter: Temperature (deg C) Value: 42 vs. 22
  misc_feature: MA Experiment 20000113 PARAMETER Experiment Name: At_42deg_Heat_cDNA_P Parameter: Timepoint (hr) Value: 8
  misc_feature: MA Experiment 20000113 PARAMETER Experiment Name: At_42deg_Heat_cDNA_P Parameter: Tissue Value: Aerial
  misc_feature: MA Experiment ID: 20000224 Result: Down-regulated in Transcription
aaaaattaaaccaaagaaacaaacaatccttgttctcgccgaaatagagaattttgtgaatctgggtttttagttcaggtgttaatataagattttgatcaaaagaagacgagattcgatccgatccgatctgattgaagaagaaatggcgaatctgtatgtgaaagcggttccaccaccggatatgaataggaatacggaatggttcatgtatccaggagtttggacgacttacatgcttattctcttcttcggttggctcgttgttctctctgtctctggttgttcccctggaatggcttggactgttgttaatctcgctcacttcgttgtaacgtatcacagcttccactggatgaaaggaactccttttgcagatgaccaaggaatctacaatggtttaacttggtgggaacaaatggacaatggtcaacagcttacccgcaaccgcaaatttcttaccctagttcctgttgttctgtacttgattgcatcgcatacaacagattacagacatccatggctgttcctcaacacactcgctgtgatggttctcgttgttgccaagttccccaacatgcacaaggtacgcatctttggtatcaatggtgataaataagtttcctttacggcaagagaacacctgaaagaaggaaaaggggatataagcgaacatatatatgtgtaaatgttcatatgagttggtttaattctcgagtcatgttttttgttggatatttgtaagtaaactctctaattttgaagctttcatcttttaccttttataatagacacgaaaaagctttcccttcg

SEQ ID NO: 29363 - protein, 157 aa, Arabidopsis thaliana
  peptide (1)..(157): Ceres Seq. ID no. 12580235
  misc_feature (14)..(156): Pfam Name: ORMDL family Pfam Description: ORMDL family
  misc_feature (13)..(154): Homolog of NCBI NO: 26352536 NR Description: unnamed protein product [Mus musculus]
  misc_feature (15)..(153): Homolog of NCBI NO: 19112082 NR Description: hypothetical protein
  misc_feature (13)..(154): Homolog of NCBI NO: 13385128 NR Description: ORM1-like 3; expressed sequence AI315223 [Mus
  misc_feature (56)..(156): Homolog of NCBI NO: 18419644 NR Description: unknown [Narcissus pseudonarcissus]
  misc_feature (5)..(147): Homolog of NCBI NO: 34901370 NR Description: OSJNBb0062P14.15 [Oryza sativa (japonica
  misc_feature (5)..(156): Homolog of NCBI NO: 34394897 NR Description: putative ORMDL2 [Oryza sativa (japonica
  misc_feature (4)..(157): Homolog of NCBI NO: 15238262 NR Description: putative protein; protein id: At5g42000.1
  misc_feature (1)..(154): Homolog of NCBI NO: 38344271 NR Description: OSJNBa0005N02.9 [Oryza sativa (japonica
  misc_feature (1)..(147): Homolog of NCBI NO: 25513580 NR Description: F6F3.4 protein - Arabidopsis thaliana
  misc_feature (1)..(157): Homolog of NCBI NO: 18378814 NR Description: expressed protein
MANLYVKAVPPPDMNRNTEWFMYPGVWTTYMLILFFGWLVVLSVSGCSPGMAWTVVNLAHFVVTYHSFHWMKGTPFADDQGIYNGLTWWEQMDNGQQLTRNRKFLTLVPVVLYLIASHTTDYRHPWLFLNTLAVMVLVVAKFPNMHKVRIFGINGDK

SEQ ID NO: 29364 - protein, 144 aa, Arabidopsis thaliana
  peptide (1)..(144): Ceres Seq. ID no. 12580236
  misc_feature (1)..(143): Pfam Name: ORMDL family Pfam Description: ORMDL family
  misc_feature (1)..(141): Homolog of NCBI NO: 26352536 NR Description: unnamed protein product [Mus musculus]
  misc_feature (2)..(140): Homolog of NCBI NO: 19112082 NR Description: hypothetical protein
  misc_feature (1)..(141): Homolog of NCBI NO: 13385128 NR Description: ORM1-like 3; expressed sequence AI315223 [Mus
  misc_feature (43)..(143): Homolog of NCBI NO: 18419644 NR Description: unknown [Narcissus pseudonarcissus]
  misc_feature (1)..(134): Homolog of NCBI NO: 34901370 NR Description: OSJNBb0062P14.15 [Oryza sativa (japonica
  misc_feature (1)..(143): Homolog of NCBI NO: 34394897 NR Description: putative ORMDL2 [Oryza sativa (japonica
  misc_feature (1)..(144): Homolog of NCBI NO: 15238262 NR Description: putative protein; protein id: At5g42000.1
  misc_feature (1)..(141): Homolog of NCBI NO: 38344271 NR Description: OSJNBa0005N02.9 [Oryza sativa (japonica
  misc_feature (1)..(134): Homolog of NCBI NO: 25513580 NR Description: F6F3.4 protein - Arabidopsis thaliana
  misc_feature (1)..(144): Homolog of NCBI NO: 18378814 NR Description: expressed protein
MNRNTEWFMYPGVWTTYMLILFFGWLVVLSVSGCSPGMAWTVVNLAHFVVTYHSFHWMKGTPFADDQGIYNGLTWWEQMDNGQQLTRNRKFLTLVPVVLYLIASHTTDYRHPWLFLNTLAVMVLVVAKFPNMHKVRIFGINGDK

SEQ ID NO: 29365 - protein, 136 aa, Arabidopsis thaliana
  peptide (1)..(136): Ceres Seq. ID no. 12580237
  misc_feature (1)..(135): Pfam Name: ORMDL family Pfam Description: ORMDL family
  misc_feature (1)..(133): Homolog of NCBI NO: 26352536 NR Description: unnamed protein product [Mus musculus]
  misc_feature (1)..(132): Homolog of NCBI NO: 19112082 NR Description: hypothetical protein
  misc_feature (1)..(133): Homolog of NCBI NO: 13385128 NR Description: ORM1-like 3; expressed sequence AI315223 [Mus
  misc_feature (35)..(135): Homolog of NCBI NO: 18419644 NR Description: unknown [Narcissus pseudonarcissus]
  misc_feature (1)..(126): Homolog of NCBI NO: 34901370 NR Description: OSJNBb0062P14.15 [Oryza sativa (japonica
  misc_feature (1)..(135): Homolog of NCBI NO: 34394897 NR Description: putative ORMDL2 [Oryza sativa (japonica
  misc_feature (1)..(136): Homolog of NCBI NO: 15238262 NR Description: putative protein; protein id: At5g42000.1
  misc_feature (1)..(133): Homolog of NCBI NO: 38344271 NR Description: OSJNBa0005N02.9 [Oryza sativa (japonica
  misc_feature (1)..(126): Homolog of NCBI NO: 25513580 NR Description: F6F3.4 protein - Arabidopsis thaliana
  misc_feature (1)..(136): Homolog of NCBI NO: 18378814 NR Description: expressed protein
MYPGVWTTYMLILFFGWLVVLSVSGCSPGMAWTVVNLAHFVVTYHSFHWMKGTPFADDQGIYNGLTWWEQMDNGQQLTRNRKFLTLVPVVLYLIASHTTDYRHPWLFLNTLAVMVLVVAKFPNMHKVRIFGINGDK

SEQ ID NO: 29366 - DNA, 1288 bp, Arabidopsis thaliana
  misc_feature (1)..(1288): Ceres Seq. ID no. 12334788
  misc_feature: MA Experiment ID: 108473 Result: Down-regulated in Transcription
  misc_feature: MA Experiment 108473 PARAMETER Experiment Name: At_Drought_Flowers_cDNA_P Parameter: Timepoint (hr) Value: 7 d
  misc_feature: MA Experiment 108473 PARAMETER Experiment Name: At_Drought_Flowers_cDNA_P Parameter: Tissue Value: Flower
  misc_feature: MA Experiment 108473 PARAMETER Experiment Name: At_Drought_Flowers_cDNA_P Parameter: Treatment Value: Drought vs. No Drought
  misc_feature: MA Experiment ID: 108501 Result: Down-regulated in Transcription
  misc_feature: MA Experiment 108501 PARAMETER Experiment Name: At_ap2_floral_buds_cDNA_P Parameter: Plant Line Value: ap2 (Ler.)
  misc_feature: MA Experiment 108501 PARAMETER Experiment Name: At_ap2_floral_buds_cDNA_P Parameter: Tissue Value: Closed Flower
  misc_feature: MA Experiment ID: 20000087 Result: Up-regulated in Transcription
  misc_feature: MA Experiment 20000087 PARAMETER Experiment Name: At_100uM_ABA_Mutants_cDNA_P Parameter: Plant Line Value: WS
  misc_feature: MA Experiment 20000087 PARAMETER Experiment Name: At_100uM_ABA_Mutants_cDNA_P Parameter: Timepoint (hr) Value: 6
  misc_feature: MA Experiment 20000087 PARAMETER Experiment Name: At_100uM_ABA_Mutants_cDNA_P Parameter: Tissue Value: Aerial
  misc_feature: MA Experiment 20000087 PARAMETER Experiment Name: At_100uM_ABA_Mutants_cDNA_P Parameter: Treatment Value: 100uM ABA vs. No Treatment
  misc_feature: MA Experiment ID: 20000113 Result: Down-regulated in Transcription
  misc_feature: MA Experiment 20000113 PARAMETER Experiment Name: At_42deg_Heat_cDNA_P Parameter: Temperature (deg C) Value: 42 vs. 22
  misc_feature: MA Experiment 20000113 PARAMETER Experiment Name: At_42deg_Heat_cDNA_P Parameter: Timepoint (hr) Value: 8
  misc_feature: MA Experiment 20000113 PARAMETER Experiment Name: At_42deg_Heat_cDNA_P Parameter: Tissue Value: Aerial
  misc_feature: MA Experiment ID: 20000234 Result: Down-regulated in Transcription
  misc_feature: MA Experiment 20000234 PARAMETER Experiment Name: At_Siliques_P Parameter: Age (day) Value: 21
  misc_feature: MA Experiment 20000234 PARAMETER Experiment Name: At_Siliques_P Parameter: Organism Value: A. thaliana
  misc_feature: MA Experiment 20000234 PARAMETER Experiment Name: At_Siliques_P Parameter: Plant Line Value: WS
  misc_feature: MA Experiment 20000234 PARAMETER Experiment Name: At_Siliques_P Parameter: Tissue Value: Less Than 5mm Siliques vs. Whole Plant
  misc_feature: MA Experiment ID: 20000235 Result: Down-regulated in Transcription
  misc_feature: MA Experiment 20000235 PARAMETER Experiment Name: At_Siliques_P Parameter: Age (day) Value: 21
  misc_feature: MA Experiment 20000235 PARAMETER Experiment Name: At_Siliques_P Parameter: Organism Value: A. thaliana
  misc_feature: MA Experiment 20000235 PARAMETER Experiment Name: At_Siliques_P Parameter: Plant Line Value: WS
  misc_feature: MA Experiment 20000235 PARAMETER Experiment Name: At_Siliques_P Parameter: Tissue Value: 5-10mm Siliques vs. Whole Plant
  misc_feature: MA Experiment ID: 20000265 Result: Up-regulated in Transcription
  misc_feature: MA Experiment 20000265 PARAMETER Experiment Name: At_Open_Flower_P Parameter: Age (day) Value: 21
  misc_feature: MA Experiment 20000265 PARAMETER Experiment Name: At_Open_Flower_P Parameter: Plant Line Value: WS
  misc_feature: MA Experiment 20000265 PARAMETER Experiment Name: At_Open_Flower_P Parameter: Tissue Value: Closed Flower vs. Whole Plant
  misc_feature: MA Experiment ID: 20000286 Result: Up-regulated in Transcription
  misc_feature: MA Experiment 20000286 PARAMETER Experiment Name: At_Open_Flower_P Parameter: Age (day) Value: 21
  misc_feature: MA Experiment 20000286 PARAMETER Experiment Name: At_Open_Flower_P Parameter: Plant Line Value: WS
  misc_feature: MA Experiment 20000286 PARAMETER Experiment Name: At_Open_Flower_P Parameter: Tissue Value: Half Open vs. Whole Plant
  misc_feature: MA Experiment ID: 20001768 Result: Up-regulated in Transcription
  misc_feature: MA Experiment 20001768 PARAMETER Experiment Name: At_Far-red-enriched-adult_P Parameter: Age (day) Value: 28
  misc_feature: MA Experiment 20001768 PARAMETER Experiment Name: At_Far-red-enriched-adult_P Parameter: Light Value: Far-red enriched vs. White
  misc_feature: MA Experiment 20001768 PARAMETER Experiment Name: At_Far-red-enriched-adult_P Parameter: Organism Value: A. thaliana
  misc_feature: MA Experiment 20001768 PARAMETER Experiment Name: At_Far-red-enriched-adult_P Parameter: Plant Line Value: Columbia
  misc_feature: MA Experiment 20001768 PARAMETER Experiment Name: At_Far-red-enriched-adult_P Parameter: Timepoint (hr) Value: 1
  misc_feature: MA Experiment 20001768 PARAMETER Experiment Name: At_Far-red-enriched-adult_P Parameter: Tissue Value: Aerial
  misc_feature: MA Experiment ID: 20001771 Result: Up-regulated in Transcription
  misc_feature: MA Experiment 20001771 PARAMETER Experiment Name: At_Far-red-enriched-adult_P Parameter: Age (day) Value: 28
  misc_feature: MA Experiment 20001771 PARAMETER Experiment Name: At_Far-red-enriched-adult_P Parameter: Light Value: Far-red enriched vs. White
  misc_feature: MA Experiment 20001771 PARAMETER Experiment Name: At_Far-red-enriched-adult_P Parameter: Organism Value: A. thaliana
  misc_feature: MA Experiment 20001771 PARAMETER Experiment Name: At_Far-red-enriched-adult_P Parameter: Plant Line Value: Columbia
  misc_feature: MA Experiment 20001771 PARAMETER Experiment Name: At_Far-red-enriched-adult_P Parameter: Timepoint (hr) Value: 16
  misc_feature: MA Experiment 20001771 PARAMETER Experiment Name: At_Far-red-enriched-adult_P Parameter: Tissue Value: Aerial
  misc_feature: MA Experiment ID: 20001773 Result: Up-regulated in Transcription
  misc_feature: MA Experiment 20001773 PARAMETER Experiment Name: At_Far-red-enriched-adult_P Parameter: Age (day) Value: 30
  misc_feature: MA Experiment 20001773 PARAMETER Experiment Name: At_Far-red-enriched-adult_P Parameter: Light Value: Far-red enriched vs. White
  misc_feature: MA Experiment 20001773 PARAMETER Experiment Name: At_Far-red-enriched-adult_P Parameter: Organism Value: A. thaliana
  misc_feature: MA Experiment 20001773 PARAMETER Experiment Name: At_Far-red-enriched-adult_P Parameter: Plant Line Value: Columbia
  misc_feature: MA Experiment 20001773 PARAMETER Experiment Name: At_Far-red-enriched-adult_P Parameter: Timepoint (hr) Value: 48
  misc_feature: MA Experiment 20001773 PARAMETER Experiment Name: At_Far-red-enriched-adult_P Parameter: Tissue Value: Aerial
  misc_feature: MA Experiment ID: 20001910 Result: Down-regulated in Transcription
  misc_feature: MA Experiment 20001910 PARAMETER Experiment Name: At_Drought_Reproduction_P Parameter: Age (day) Value: 37
  misc_feature: MA Experiment 20001910 PARAMETER Experiment Name: At_Drought_Reproduction_P Parameter: Organism Value: A. thaliana
  misc_feature: MA Experiment 20001910 PARAMETER Experiment Name: At_Drought_Reproduction_P Parameter: Plant Line Value: WS
  misc_feature: MA Experiment 20001910 PARAMETER Experiment Name: At_Drought_Reproduction_P Parameter: Timepoint (day) Value: 7
  misc_feature: MA Experiment 20001910 PARAMETER Experiment Name: At_Drought_Reproduction_P Parameter: Tissue Value: Flowers
  misc_feature: MA Experiment 20001910 PARAMETER Experiment Name: At_Drought_Reproduction_P Parameter: Treatment Value: Drought vs. No Drought
actaattaaattctctataaaacataagagagtctaaacactgtggtagaaaaaaatatagacttttagatatgtgtagtaaaataacattagtgttaactttattttccagttatttcatatcaacagatgctgtgaatggatcatttcctgcgcttttggcttttggagattcaattctcgatactggcaacaacaattttctcctgacttttatgaaaggaaatatctggccatatggaaggagtttcagcatgagaagggcgacaggaagatttggaaatggaagagttttctctgatatagttgctgaaggtttagggatcaagaagattttaccagcttatcgtaagttgttcaattctccaagtgaccttagaactggtgtttgcttcgcatcaggtggtgcaggagttgaccctgttacatccaaattgctgagagttttaacgccaaaggatcaagtaaacgatttcaaagggtacataagaaagctaaaggccacagcaggtccttcaagagcaagtagtatagtttcaaatgcagtgattcttgtttctcaaggaaataatgatattggaatctcatattttggaactccaactgctgctttccgaggattaactcccaatagatataccactaaactagctggttggaacaaacagtttatgaaagaattatacgatcaaggagcgagaaaattcgcggtaatgggagtgataccgttgggatgtttgcctatgacaagaatcttccttggtgggttcgtcatcacgtgtaacttcttcgcgaatagagtcgcagaacagtacaacggaaaattgaggagcggaactaaaagttggggacgtgaagcaggttttaggggtacaaaatttgtctatgtcgacatgtacaacactcttatggatgttattaaaaattatagaagatacggattttctaatgagaaaaatgggtgttgttgtatgattacggctataataccatgccccaacccagataaatacgtcttctacgacttcgttcatccatccgagaaagcttacagaacaatttctaaaaagcttgtccaggatatcaagaatggccttgcctgatttattatatatacaatgctttattttaattttaataacagccatcgttaataatagaaatgagaagacaaaaatcatacatggcgatctctctgtttttcttatgttaaagaatgtataatccagtttatgtattgttcactttatataatcccagaacaacaaaggagtttgtttacaaatgt

SEQ ID NO: 29367 - protein, 343 aa, Arabidopsis thaliana
  peptide (1)..(343): Ceres Seq. ID no. 12334789
  misc_feature (29)..(334): Pfam Name: GDSL-like Lipase/Acylhydrolase Pfam Description: GDSL-like Lipase/Acylhydrolase
  misc_feature (1)..(343): Homolog of NCBI NO: 15220775 NR Description: hypothetical protein; protein id: At1g23500.1
  misc_feature (1)..(343): Homolog of NCBI NO: 15219505 NR Description: putative lipase/acylhydrolase; protein id:
  misc_feature (3)..(343): Homolog of NCBI NO: 15242657 NR Description: lipase/acylhydrolase-like protein; protein id:
  misc_feature (8)..(327): Homolog of NCBI NO: 25404995 NR Description: protein T4O12.15 [imported] - Arabidopsis
  misc_feature (8)..(343): Homolog of NCBI NO: 15222904 NR Description: family II extracellular lipase 6 (EXL6)
  misc_feature (7)..(343): Homolog of NCBI NO: 18410967 NR Description: family II extracellular lipase 5 (EXL5)
  misc_feature (1)..(343): Homolog of NCBI NO: 8778809 NR Description: T4O12.14 [Arabidopsis thaliana]
  misc_feature (21)..(343): Homolog of NCBI NO: 25404994 NR Description: protein T4O12.13 [imported] - Arabidopsis
  misc_feature (1)..(343): Homolog of NCBI NO: 15054388 NR Description: family II lipase EXL4 [Arabidopsis thaliana]
  misc_feature (1)..(343): Homolog of NCBI NO: 15222902 NR Description: family II extracellular lipase 4 (EXL4)
MCSKITLVLTLFSSYFISTDAVNGSFPALLAFGDSILDTGNNNFLLTFMKGNIWPYGRSFSMRRATGRFGNGRVFSDIVAEGLGIKKILPAYRKLFNSPSDLRTGVCFASGGAGVDPVTSKLLRVLTPKDQVNDFKGYIRKLKATAGPSRASSIVSNAVILVSQGNNDIGISYFGTPTAAFRGLTPNRYTTKLAGWNKQFMKELYDQGARKFAVMGVIPLGCLPMTRIFLGGFVITCNFFANRVAEQYNGKLRSGTKSWGREAGFRGTKFVYVDMYNTLMDVIKNYRRYGFSNEKNGCCCMITAIIPCPNPDKYVFYDFVHPSEKAYRTISKKLVQDIKNGLA

SEQ ID NO: 29368 - protein, 295 aa, Arabidopsis thaliana
  peptide (1)..(295): Ceres Seq. ID no. 12334790
  misc_feature (1)..(286): Pfam Name: GDSL-like Lipase/Acylhydrolase Pfam Description: GDSL-like Lipase/Acylhydrolase
  misc_feature (1)..(295): Homolog of NCBI NO: 15220775 NR Description: hypothetical protein; protein id: At1g23500.1
  misc_feature (1)..(295): Homolog of NCBI NO: 15219505 NR Description: putative lipase/acylhydrolase; protein id:
  misc_feature (1)..(295): Homolog of NCBI NO: 15242657 NR Description: lipase/acylhydrolase-like protein; protein id:
  misc_feature (1)..(279): Homolog of NCBI NO: 25404995 NR Description: protein T4O12.15 [imported] - Arabidopsis
  misc_feature (1)..(295): Homolog of NCBI NO: 15222904 NR Description: family II extracellular lipase 6 (EXL6)
  misc_feature (1)..(295): Homolog of NCBI NO: 18410967 NR Description: family II extracellular lipase 5 (EXL5)
  misc_feature (1)..(295): Homolog of NCBI NO: 8778809 NR Description: T4O12.14 [Arabidopsis thaliana]
  misc_feature (1)..(295): Homolog of NCBI NO: 25404994 NR Description: protein T4O12.13 [imported] - Arabidopsis
  misc_feature (1)..(295): Homolog of NCBI NO: 15054388 NR Description: family II lipase EXL4 [Arabidopsis thaliana]
  misc_feature (1)..(295): Homolog of NCBI NO: 15222902 NR Description: family II extracellular lipase 4 (EXL4)
MKGNIWPYGRSFSMRRATGRFGNGRVFSDIVAEGLGIKKILPAYRKLFNSPSDLRTGVCFASGGAGVDPVTSKLLRVLTPKDQVNDFKGYIRKLKATAGPSRASSIVSNAVILVSQGNNDIGISYFGTPTAAFRGLTPNRYTTKLAGWNKQFMKELYDQGARKFAVMGVIPLGCLPMTRIFLGGFVITCNFFANRVAEQYNGKLRSGTKSWGREAGFRGTKFVYVDMYNTLMDVIKNYRRYGFSNEKNGCCCMITAIIPCPNPDKYVFYDFVHPSEKAYRTISKKLVQDIKNGLA

SEQ ID NO: 29369 - protein, 282 aa, Arabidopsis thaliana
  peptide (1)..(282): Ceres Seq. ID no. 12334791
  misc_feature (1)..(273): Pfam Name: GDSL-like Lipase/Acylhydrolase Pfam Description: GDSL-like Lipase/Acylhydrolase
  misc_feature (1)..(282): Homolog of NCBI NO: 15220775 NR Description: hypothetical protein; protein id: At1g23500.1
  misc_feature (1)..(282): Homolog of NCBI NO: 15219505 NR Description: putative lipase/acylhydrolase; protein id:
  misc_feature (1)..(282): Homolog of NCBI NO: 15242657 NR Description: lipase/acylhydrolase-like protein; protein id:
  misc_feature (1)..(266): Homolog of NCBI NO: 25404995 NR Description: protein T4O12.15 [imported] - Arabidopsis
  misc_feature (1)..(282): Homolog of NCBI NO: 15222904 NR Description: family II extracellular lipase 6 (EXL6)
  misc_feature (1)..(282): Homolog of NCBI NO: 18410967 NR Description: family II extracellular lipase 5 (EXL5)
  misc_feature (1)..(282): Homolog of NCBI NO: 8778809 NR Description: T4O12.14 [Arabidopsis thaliana]
  misc_feature (1)..(282): Homolog of NCBI NO: 25404994 NR Description: protein T4O12.13 [imported] - Arabidopsis
  misc_feature (1)..(282): Homolog of NCBI NO: 15054388 NR Description: family II lipase EXL4 [Arabidopsis thaliana]
  misc_feature (1)..(282): Homolog of NCBI NO: 15222902 NR Description: family II extracellular lipase 4 (EXL4)
MRRATGRFGNGRVFSDIVAEGLGIKKILPAYRKLFNSPSDLRTGVCFASGGAGVDPVTSKLLRVLTPKDQVNDFKGYIRKLKATAGPSRASSIVSNAVILVSQGNNDIGISYFGTPTAAFRGLTPNRYTTKLAGWNKQFMKELYDQGARKFAVMGVIPLGCLPMTRIFLGGFVITCNFFANRVAEQYNGKLRSGTKSWGREAGFRGTKFVYVDMYNTLMDVIKNYRRYGFSNEKNGCCCMITAIIPCPNPDKYVFYDFVHPSEKAYRTISKKLVQDIKNGLA

SEQ ID NO: 29370 - DNA, 1304 bp, Arabidopsis thaliana
  misc_feature (1)..(1304): Ceres Seq. ID no. 13487643
  misc_feature: MA Experiment ID: 108573 Result: Up-regulated in Transcription
  misc_feature: MA Experiment 108573 PARAMETER Experiment Name: At_Drought_cDNA_P Parameter: Timepoint (hr) Value: 6
  misc_feature: MA Experiment 108573 PARAMETER Experiment Name: At_Drought_cDNA_P Parameter: Tissue Value: Aerial
  misc_feature: MA Experiment 108573 PARAMETER Experiment Name: At_Drought_cDNA_P Parameter: Treatment Value: Drought vs. No Drought
  misc_feature: MA Experiment ID: 108595 Result: Down-regulated in Transcription
  misc_feature: MA Experiment 108595 PARAMETER Experiment Name: At_Ler-pi_Ovule_cDNA_P Parameter: Plant Line Value: null
  misc_feature: MA Experiment ID: 20000185 Result: Up-regulated in Transcription
  misc_feature: MA Experiment 20000185 PARAMETER Experiment Name: At_Roots__P Parameter: Age (day) Value: 7 vs. 21
  misc_feature: MA Experiment 20000185 PARAMETER Experiment Name: At_Roots__P Parameter: Organism Value: A. thaliana
  misc_feature: MA Experiment 20000185 PARAMETER Experiment Name: At_Roots__P Parameter: Tissue Value: Roots vs. Whole Plant
  misc_feature: MA Experiment ID: 20000439 Result: Up-regulated in Transcription
  misc_feature: MA Experiment 20000439 PARAMETER Experiment Name: At_Roots__P Parameter: Age (day) Value: 14 vs. 21
  misc_feature: MA Experiment 20000439 PARAMETER Experiment Name: At_Roots__P Parameter: Organism Value: A. thaliana
  misc_feature: MA Experiment 20000439 PARAMETER Experiment Name: At_Roots__P Parameter: Tissue Value: Roots vs. Whole Plant
  misc_feature: MA Experiment ID: 20000794 Result: Up-regulated in Transcription
  misc_feature: MA Experiment 20000794 PARAMETER Experiment Name: At_Petals_P Parameter: Age (day) Value: 23-25 days
  misc_feature: MA Experiment 20000794 PARAMETER Experiment Name: At_Petals_P Parameter: Plant Line Value: WS
  misc_feature: MA Experiment 20000794 PARAMETER Experiment Name: At_Petals_P Parameter: Tissue Value: Petals vs. Whole plant
gcacgagcgaaaacgaaatctgaaacggtcacacacagtcgctagatatgtctctctcgcttccatcttcttccgccgccgctgctgcggcgtcaacatcgggatcatcatcttctccggcggctgcttcgtcttcctcaacaaccacgtcatggttctccgggatcgttcgtggtcgtggtgataaatccggcaccgcgaagctatctaaaagctcttccatggctggaggaggaagcggaagcggagattacggtggaccaatcaaagggaagaatcaatttcgcggtgttttgttcaaatacggtcctaaatcaattcaggttgcttttaagaccggagagtataaacaacaagtgatatttatcggtggattaactgatggacttttagctactgattacttggaacctcttgcgattgctttggataaagagaaatggtcacttgttcaactactgatgtcttcttcatattctggatttggcacttccagcttgaaacaagatgcacaagaaatcgaccagctaataaaccacctcatcaacaaagagaattctgaaggtgttgttctgcttggtcatagcactggctgtcaggacattgtgtattatatgggaacaaatgcggcatgctcccgagctgtccgggctgcaattttacaggcaccagtcagcgatagagagtacaaagcaacgcttcctgaaacacctgctatgatagacttggctgcaaacatgataaaagaaggtcgaggagaggagctaatgcctagagaagctgatccttgtgctccaatctctgcttatagatatcactccctctgcgcttacatgggagatgacgatatgtttagttctgaccttagtgatgatcagttgaaaactagacttggccatatggctaacacaccttgtcaggtgattttctccatgggtgatgagtatgtaccagattatgtcgacaaaaaagcattggtcaatagattaagtaaagcaatgggaggagcagagaaagtggagatagagcatgggaatcattctctctccaatagagttcatgaagctgttcaagccatcattggttttgtcaaaagagaaggacccagtggttgggatgatccttggagctaaatctgctttttccatttatgtggatgaaaaacttatccaaatctgaatctcatgaattaattcacttcttggctgattcgtaaccatttatccttaaaaagtaaaaaagtaaattgttgtccttttgttctgatatatacttggatcattaagaaaagtgtcttccttatt

SEQ ID NO: 29371 - protein, 361 aa, Arabidopsis thaliana
  peptide (1)..(361): Ceres Seq. ID no. 13487644
  misc_feature (81)..(190): Homolog of NCBI NO: 40739433 NR Description: hypothetical protein AN6239.2 [Aspergillus
  misc_feature (72)..(192): Homolog of NCBI NO: 40739421 NR Description: hypothetical protein AN6793.2 [Aspergillus
  misc_feature (76)..(351): Homolog of NCBI NO: 19173345 NR Description: hypothetical protein [Encephalitozoon cuniculi]
  misc_feature (79)..(190): Homolog of NCBI NO: 40741836 NR Description: hypothetical protein AN4948.2 [Aspergillus
  misc_feature (124)..(306): Homolog of NCBI NO: 32403674 NR Description: hypothetical protein [Neurospora crassa]
  misc_feature (80)..(285): Homolog of NCBI NO: 19114904 NR Description: hypothetical protein; sequence orphan
  misc_feature (263)..(361): Homolog of NCBI NO: 34900044 NR Description: hypothetical protein~predicted by GeneMark.hmm
  misc_feature (4)..(268): Homolog of NCBI NO: 34900046 NR Description: contains EST C72879(E2411)~similar to Arabidopsis
  misc_feature (4)..(361): Homolog of NCBI NO: 34393295 NR Description: unknown protein [Oryza sativa (japonica
  misc_feature (1)..(361): Homolog of NCBI NO: 15239639 NR Description: expressed protein [Arabidopsis thaliana]
MSLSLPSSSAAAAAASTSGSSSSPAAASSSSTTTSWFSGIVRGRGDKSGTAKLSKSSSMAGGGSGSGDYGGPIKGKNQFRGVLFKYGPKSIQVAFKTGEYKQQVIFIGGLTDGLLATDYLEPLAIALDKEKWSLVQLLMSSSYSGFGTSSLKQDAQEIDQLINHLINKENSEGVVLLGHSTGCQDIVYYMGTNAACSRAVRAAILQAPVSDREYKATLPETPAMIDLAANMIKEGRGEELMPREADPCAPISAYRYHSLCAYMGDDDMFSSDLSDDQLKTRLGHMANTPCQVIFSMGDEYVPDYVDKKALVNRLSKAMGGAEKVEIEHGNHSLSNRVHEAVQAIIGFVKREGPSGWDDPWS

SEQ ID NO: 29372 - protein, 303 aa, Arabidopsis thaliana
  peptide (1)..(303): Ceres Seq. ID no. 13487645
  misc_feature (23)..(132): Homolog of NCBI NO: 40739433 NR Description: hypothetical protein AN6239.2 [Aspergillus
  misc_feature (14)..(134): Homolog of NCBI NO: 40739421 NR Description: hypothetical protein AN6793.2 [Aspergillus
  misc_feature (18)..(293): Homolog of NCBI NO: 19173345 NR Description: hypothetical protein [Encephalitozoon cuniculi]
  misc_feature (21)..(132): Homolog of NCBI NO: 40741836 NR Description: hypothetical protein AN4948.2 [Aspergillus
  misc_feature (66)..(248): Homolog of NCBI NO: 32403674 NR Description: hypothetical protein [Neurospora crassa]
  misc_feature (22)..(227): Homolog of NCBI NO: 19114904 NR Description: hypothetical protein; sequence orphan
  misc_feature (205)..(303): Homolog of NCBI NO: 34900044 NR Description: hypothetical protein~predicted by GeneMark.hmm
  misc_feature (1)..(210): Homolog of NCBI NO: 34900046 NR Description: contains EST C72879(E2411)~similar to Arabidopsis
  misc_feature (1)..(303): Homolog of NCBI NO: 34393295 NR Description: unknown protein [Oryza sativa (japonica
  misc_feature (1)..(303): Homolog of NCBI NO: 15239639 NR Description: expressed protein [Arabidopsis thaliana]
MAGGGSGSGDYGGPIKGKNQFRGVLFKYGPKSIQVAFKTGEYKQQVIFIGGLTDGLLATDYLEPLAIALDKEKWSLVQLLMSSSYSGFGTSSLKQDAQEIDQLINHLINKENSEGVVLLGHSTGCQDIVYYMGTNAACSRAVRAAILQAPVSDREYKATLPETPAMIDLAANMIKEGRGEELMPREADPCAPISAYRYHSLCAYMGDDDMFSSDLSDDQLKTRLGHMANTPCQVIFSMGDEYVPDYVDKKALVNRLSKAMGGAEKVEIEHGNHSLSNRVHEAVQAIIGFVKREGPSGWDDPWS

SEQ ID NO: 29373 - protein, 223 aa, Arabidopsis thaliana
  peptide (1)..(223): Ceres Seq. ID no. 13487646
  misc_feature (1)..(52): Homolog of NCBI NO: 40739433 NR Description: hypothetical protein AN6239.2 [Aspergillus
  misc_feature (1)..(54): Homolog of NCBI NO: 40739421 NR Description: hypothetical protein AN6793.2 [Aspergillus
  misc_feature (1)..(213): Homolog of NCBI NO: 19173345 NR Description: hypothetical protein [Encephalitozoon cuniculi]
  misc_feature (1)..(52): Homolog of NCBI NO: 40741836 NR Description: hypothetical protein AN4948.2 [Aspergillus
  misc_feature (1)..(168): Homolog of NCBI NO: 32403674 NR Description: hypothetical protein [Neurospora crassa]
  misc_feature (1)..(147): Homolog of NCBI NO: 19114904 NR Description: hypothetical protein; sequence orphan
  misc_feature (125)..(223): Homolog of NCBI NO: 34900044 NR Description: hypothetical protein~predicted by GeneMark.hmm
  misc_feature (1)..(130): Homolog of NCBI NO: 34900046 NR Description: contains EST C72879(E2411)~similar to Arabidopsis
  misc_feature (1)..(223): Homolog of NCBI NO: 34393295 NR Description: unknown protein [Oryza sativa (japonica
  misc_feature (1)..(223): Homolog of NCBI NO: 15239639 NR Description: expressed protein [Arabidopsis thaliana]
MSSSYSGFGTSSLKQDAQEIDQLINHLINKENSEGVVLLGHSTGCQDIVYYMGTNAACSRAVRAAILQAPVSDREYKATLPETPAMIDLAANMIKEGRGEELMPREADPCAPISAYRYHSLCAYMGDDDMFSSDLSDDQLKTRLGHMANTPCQVIFSMGDEYVPDYVDKKALVNRLSKAMGGAEKVEIEHGNHSLSNRVHEAVQAIIGFVKREGPSGWDDPWS

SEQ ID NO: 29374 - DNA, 810 bp, Arabidopsis thaliana
  misc_feature (1)..(810): Ceres Seq. ID no. 13653785
  misc_feature: MA Experiment ID: 108434 Result: Up-regulated in Transcription
  misc_feature: MA Experiment 108434 PARAMETER Experiment Name: At_Root_Tips_cDNA_P Parameter: Tissue Value: Root Tips
  misc_feature: MA Experiment ID: 108462 Result: Down-regulated in Transcription
  misc_feature: MA Experiment 108462 PARAMETER Experiment Name: At_Germinating_Seeds_cDNA_P Parameter: Age (day) Value: 2 vs. 0
  misc_feature: MA Experiment 108462 PARAMETER Experiment Name: At_Germinating_Seeds_cDNA_P Parameter: Tissue Value: Germinating Seeds
  misc_feature: MA Experiment ID: 108463 Result: Down-regulated in Transcription
  misc_feature: MA Experiment 108463 PARAMETER Experiment Name: At_Germinating_Seeds_cDNA_P Parameter: Age (day) Value: 3 vs. 0
  misc_feature: MA Experiment 108463 PARAMETER Experiment Name: At_Germinating_Seeds_cDNA_P Parameter: Tissue Value: Germinating Seeds
  misc_feature: MA Experiment ID: 108464 Result: Down-regulated in Transcription
  misc_feature: MA Experiment 108464 PARAMETER Experiment Name: At_Germinating_Seeds_cDNA_P Parameter: Age (day) Value: 4 vs. 0
  misc_feature: MA Experiment 108464 PARAMETER Experiment Name: At_Germinating_Seeds_cDNA_P Parameter: Tissue Value: Germinating Seeds
  misc_feature: MA Experiment ID: 108488 Result: Down-regulated in Transcription
  misc_feature: MA Experiment ID: 108577 Result: Down-regulated in Transcription
  misc_feature: MA Experiment 108577 PARAMETER Experiment Name: At_42deg_Heat_cDNA_P Parameter: Temperature (deg C) Value: 42 vs. 22
  misc_feature: MA Experiment 108577 PARAMETER Experiment Name: At_42deg_Heat_cDNA_P Parameter: Timepoint (hr) Value: 6
  misc_feature: MA Experiment 108577 PARAMETER Experiment Name: At_42deg_Heat_cDNA_P Parameter: Tissue Value: Aerial
  misc_feature: MA Experiment ID: 108607 Result: Down-regulated in Transcription
  misc_feature: MA Experiment 108607 PARAMETER Experiment Name: At_100uM_ABA_cDNA_P Parameter: Timepoint (hr) Value: 4
  misc_feature: MA Experiment 108607 PARAMETER Experiment Name: At_100uM_ABA_cDNA_P Parameter: Tissue Value: Aerial
  misc_feature: MA Experiment 108607 PARAMETER Experiment Name: At_100uM_ABA_cDNA_P Parameter: Treatment Value: 100uM ABA vs. No Treatment
  misc_feature: MA Experiment ID: 20000069 Result: Up-regulated in Transcription
  misc_feature: MA Experiment 20000069 PARAMETER Experiment Name: At_100uM_ABA_Mutants_cDNA_P Parameter: Plant Line Value: CS23
  misc_feature: MA Experiment 20000069 PARAMETER Experiment Name: At_100uM_ABA_Mutants_cDNA_P Parameter: Timepoint (hr) Value: 6
  misc_feature: MA Experiment 20000069 PARAMETER Experiment Name: At_100uM_ABA_Mutants_cDNA_P Parameter: Tissue Value: Aerial
  misc_feature: MA Experiment 20000069 PARAMETER Experiment Name: At_100uM_ABA_Mutants_cDNA_P Parameter: Treatment Value: 100uM ABA vs. No Treatment
  misc_feature: MA Experiment ID: 20000070 Result: Up-regulated in Transcription
  misc_feature: MA Experiment 20000070 PARAMETER Experiment Name: At_100uM_ABA_Mutants_cDNA_P Parameter: Plant Line Value: CS24
  misc_feature: MA Experiment 20000070 PARAMETER Experiment Name: At_100uM_ABA_Mutants_cDNA_P Parameter: Timepoint (hr) Value: 6
  misc_feature: MA Experiment 20000070 PARAMETER Experiment Name: At_100uM_ABA_Mutants_cDNA_P Parameter: Tissue Value: Aerial
  misc_feature: MA Experiment 20000070 PARAMETER Experiment Name: At_100uM_ABA_Mutants_cDNA_P Parameter: Treatment Value: 100uM ABA vs. No Treatment
  misc_feature: MA Experiment ID: 20000071 Result: Up-regulated in Transcription
  misc_feature: MA Experiment 20000071 PARAMETER Experiment Name: At_100uM_ABA_Mutants_cDNA_P Parameter: Plant Line Value: CS8104
  misc_feature: MA Experiment 20000071 PARAMETER Experiment Name: At_100uM_ABA_Mutants_cDNA_P Parameter: Timepoint (hr) Value: 6
  misc_feature: MA Experiment 20000071 PARAMETER Experiment Name: At_100uM_ABA_Mutants_cDNA_P Parameter: Tissue Value: Aerial
  misc_feature: MA Experiment 20000071 PARAMETER Experiment Name: At_100uM_ABA_Mutants_cDNA_P Parameter: Treatment Value: 100uM ABA vs. No Treatment
  misc_feature: MA Experiment ID: 20000072 Result: Up-regulated in Transcription
  misc_feature: MA Experiment 20000072 PARAMETER Experiment Name: At_100uM_ABA_Mutants_cDNA_P Parameter: Plant Line Value: CS8105
  misc_feature: MA Experiment 20000072 PARAMETER Experiment Name: At_100uM_ABA_Mutants_cDNA_P Parameter: Timepoint (hr) Value: 6
  misc_feature: MA Experiment 20000072 PARAMETER Experiment Name: At_100uM_ABA_Mutants_cDNA_P Parameter: Tissue Value: Aerial
  misc_feature: MA Experiment 20000072 PARAMETER Experiment Name: At_100uM_ABA_Mutants_cDNA_P Parameter: Treatment Value: 100uM ABA vs. No Treatment
  misc_feature: MA Experiment ID: 20000086 Result: Up-regulated in Transcription
  misc_feature: MA Experiment 20000086 PARAMETER Experiment Name: At_100uM_ABA_Mutants_cDNA_P Parameter: Plant Line Value: CS22
  misc_feature: MA Experiment 20000086 PARAMETER Experiment Name: At_100uM_ABA_Mutants_cDNA_P Parameter: Timepoint (hr) Value: 6
  misc_feature: MA Experiment 20000086 PARAMETER Experiment Name: At_100uM_ABA_Mutants_cDNA_P Parameter: Tissue Value: Aerial
  misc_feature: MA Experiment 20000086 PARAMETER Experiment Name: At_100uM_ABA_Mutants_cDNA_P Parameter: Treatment Value: 100uM ABA vs. No Treatment
  misc_feature: MA Experiment ID: 20000087 Result: Up-regulated in Transcription
  misc_feature: MA Experiment 20000087 PARAMETER Experiment Name: At_100uM_ABA_Mutants_cDNA_P Parameter: Plant Line Value: WS
  misc_feature: MA Experiment 20000087 PARAMETER Experiment Name: At_100uM_ABA_Mutants_cDNA_P Parameter: Timepoint (hr) Value: 6
  misc_feature: MA Experiment 20000087 PARAMETER Experiment Name: At_100uM_ABA_Mutants_cDNA_P Parameter: Tissue Value: Aerial
  misc_feature: MA Experiment 20000087 PARAMETER Experiment Name: At_100uM_ABA_Mutants_cDNA_P Parameter: Treatment Value: 100uM ABA vs. No Treatment
  misc_feature: MA Experiment ID: 20000088 Result: Up-regulated in Transcription
  misc_feature: MA Experiment 20000088 PARAMETER Experiment Name: At_100uM_ABA_Mutants_cDNA_P Parameter: Plant Line Value: Landsberg
  misc_feature: MA Experiment 20000088 PARAMETER Experiment Name: At_100uM_ABA_Mutants_cDNA_P Parameter: Timepoint (hr) Value: 6
  misc_feature: MA Experiment 20000088 PARAMETER Experiment Name: At_100uM_ABA_Mutants_cDNA_P Parameter: Tissue Value: Aerial
  misc_feature: MA Experiment 20000088 PARAMETER Experiment Name: At_100uM_ABA_Mutants_cDNA_P Parameter: Treatment Value: 100uM ABA vs. No Treatment
  misc_feature: MA Experiment ID: 20000089 Result: Up-regulated in Transcription
  misc_feature: MA Experiment ID: 20000090 Result: Up-regulated in Transcription
  misc_feature: MA Experiment ID: 20000111 Result: Down-regulated in Transcription
  misc_feature: MA Experiment 20000111 PARAMETER Experiment Name: At_42deg_Heat_cDNA_P Parameter: Temperature (deg C) Value: 42 vs. 22
  misc_feature: MA Experiment 20000111 PARAMETER Experiment Name: At_42deg_Heat_cDNA_P Parameter: Timepoint (hr) Value: 6
  misc_feature: MA Experiment 20000111 PARAMETER Experiment Name: At_42deg_Heat_cDNA_P Parameter: Tissue Value: Aerial
  misc_feature: MA Experiment ID: 20000117 Result: Up-regulated in Transcription
  misc_feature: MA Experiment 20000117 PARAMETER Experiment Name: At_100uM_ABA_Mutants_cDNA_P Parameter: Plant Line Value: Columbia
  misc_feature: MA Experiment 20000117 PARAMETER Experiment Name: At_100uM_ABA_Mutants_cDNA_P Parameter: Timepoint (hr) Value: 6
  misc_feature: MA Experiment 20000117 PARAMETER Experiment Name: At_100uM_ABA_Mutants_cDNA_P Parameter: Tissue Value: Aerial
  misc_feature: MA Experiment 20000117 PARAMETER Experiment Name: At_100uM_ABA_Mutants_cDNA_P Parameter: Treatment Value: 100uM ABA vs. No Treatment
  misc_feature: MA Experiment ID: 20000213 Result: Up-regulated in Transcription
  misc_feature: MA Experiment 20000213 PARAMETER Experiment Name: At_4deg_Cold_P Parameter: Timepoint (hr) Value: 2
  misc_feature: MA Experiment ID: 20000224 Result: Down-regulated in Transcription
  misc_feature: MA Experiment ID: 20000437 Result: Up-regulated in Transcription
  misc_feature: MA Experiment 20000437 PARAMETER Experiment Name: At_Drought_P Parameter: Age (day) Value: 8
  misc_feature: MA Experiment 20000437 PARAMETER Experiment Name: At_Drought_P Parameter: Organism Value: A. thaliana
  misc_feature: MA Experiment 20000437 PARAMETER Experiment Name: At_Drought_P Parameter: Plant Line Value: WS
  misc_feature: MA Experiment 20000437 PARAMETER Experiment Name: At_Drought_P Parameter: Timepoint (hr) Value: 24
  misc_feature: MA Experiment 20000437 PARAMETER Experiment Name: At_Drought_P Parameter: Tissue Value: Whole Plant
  misc_feature: MA Experiment 20000437 PARAMETER Experiment Name: At_Drought_P Parameter: Treatment Value: Drought vs. No Drought
  misc_feature: MA Experiment ID: 20000438 Result: Down-regulated in Transcription
  misc_feature: MA Experiment 20000438 PARAMETER Experiment Name: At_Shoots__P Parameter: Age (day) Value: 14
  misc_feature: MA Experiment 20000438 PARAMETER Experiment Name: At_Shoots__P Parameter: Tissue Value: Shoots vs. Whole Plant
  misc_feature: MA Experiment ID: 20001451 Result: Up-regulated in Transcription
  misc_feature: MA Experiment 20001451 PARAMETER Experiment Name: At_Far-red-induction_P Parameter: Age (day) Value: 7
  misc_feature: MA Experiment 20001451 PARAMETER Experiment Name: At_Far-red-induction_P Parameter: Light Value: Far-red vs. White
  misc_feature: MA Experiment 20001451 PARAMETER Experiment Name: At_Far-red-induction_P Parameter: Organism Value: A. thaliana
  misc_feature: MA Experiment 20001451 PARAMETER Experiment Name: At_Far-red-induction_P Parameter: Plant Line Value: Columbia
  misc_feature: MA Experiment 20001451 PARAMETER Experiment Name: At_Far-red-induction_P Parameter: Timepoint (hr) Value: 24
  misc_feature: MA Experiment 20001451 PARAMETER Experiment Name: At_Far-red-induction_P Parameter: Tissue Value: Whole Plant
  misc_feature: MA Experiment ID: 20001557 Result: Up-regulated in Transcription
  misc_feature: MA Experiment 20001557 PARAMETER Experiment Name: At_Drought_Soil_Dry_P Parameter: Age (day) Value: 27
  misc_feature: MA Experiment 20001557 PARAMETER Experiment Name: At_Drought_Soil_Dry_P Parameter: Organism Value: A. thaliana
  misc_feature: MA Experiment 20001557 PARAMETER Experiment Name: At_Drought_Soil_Dry_P Parameter: Plant Line Value: WS
  misc_feature: MA Experiment 20001557 PARAMETER Experiment Name: At_Drought_Soil_Dry_P Parameter: Post Timepoint (hr) Value: 3
  misc_feature: MA Experiment 20001557 PARAMETER Experiment Name: At_Drought_Soil_Dry_P Parameter: Post-Treatment Value: Re-Water vs. No Drought
  misc_feature: MA Experiment 20001557 PARAMETER Experiment Name: At_Drought_Soil_Dry_P Parameter: Timepoint (day) Value: 13
  misc_feature: MA Experiment 20001557 PARAMETER Experiment Name: At_Drought_Soil_Dry_P Parameter: Treatment Value: Drought vs. No Drought
acatctcactgctcactactctcactgtaatcccttagatcttcttttcaaatttcaatggcgtccggtgatgttgagtatcggtgcttcgttggaggtctagcatgggccactgatgacagagctcttgagactgccttcgctcaatacggcgacgttattgattccaagatcattaacgatcgtgagactggaagatcaaggggattcggattcgtcaccttcaaggatgagaaagccatgaaggatgcgattgagggaatgaacggacaagatctcgatggccgtagcatcactgttaacgaggctcagtcacgaggaagcggtggcggcggaggccaccgtggaggtggtggcggtggataccgcagcggcggtggtggaggttactccggtggaggtggtagctacggaggtggcggcggtagacgcgagggtggaggaggatacagcggcggcggcggttactcctcaagaggtggtggtggcggaagctacggtggtggaagacgtgagggaggaggaggatacggtggtggtgaaggaggaggttacggaggaagcggtggtggtggaggatggtaattcctttaattaggtttgggattaccaatgaatgttctctctctcgcttgttatgcttctacttggttttgtgtgttctctattttgttctggttctgctttagatttgatgtaacagttcgtgattaggtattttggtatctggaaacgtaatgttaagtcacttgtcattctctaaataacaaatttcttcggagatattatctctgttgattgattctatcc

SEQ ID NO: 29375 - protein, 175 aa, Arabidopsis thaliana; identical to SEQ ID NO: 27778
  peptide (1)..(175): Ceres Seq. ID no. 13653786
  misc_feature (10)..(81): Pfam Name: RNA recognition motif. (a.k.a. RRM, RBD, or RNP domain) Pfam Description: RNA recognition motif. (a.k.a. RRM, RBD, or RNP
  misc_feature (1)..(175): Homolog of NCBI NO: 10799202 NR Description: glycine-rich RNA-binding protein [Sorghum bicolor]
  misc_feature (1)..(175): Homolog of NCBI NO: 544423 NR Description: Glycine-rich RNA-binding protein 2
  misc_feature (5)..(175): Homolog of NCBI NO: 544416 NR Description: Glycine-rich RNA-binding protein 10
  misc_feature (1)..(175): Homolog of NCBI NO: 34851124 NR Description: putative glycine-rich RNA-binding protein [Prunus
  misc_feature (5)..(175): Homolog of NCBI NO: 15235002 NR Description: glycine-rich RNA-binding protein 8 (GRP8) (CCR1)
  misc_feature (1)..(175): Homolog of NCBI NO: 30681492 NR Description: glycine-rich RNA-binding protein (AtGRP7)
  misc_feature (1)..(175): Homolog of NCBI NO: 1346180 NR Description: Glycine-rich RNA-binding protein GRP1A
  misc_feature (1)..(175): Homolog of NCBI NO: 1346181 NR Description: Glycine-rich RNA-binding protein GRP2A
  misc_feature (1)..(175): Homolog of NCBI NO: 15226605 NR Description: glycine-rich RNA-binding protein (AtGRP7)
  misc_feature (1)..(175): Homolog of NCBI NO: 21553354 NR Description: glycine-rich RNA binding protein 7 [Arabidopsis

SEQ ID NO: 29376 - protein, 114 aa, Arabidopsis thaliana; identical to SEQ ID NO: 27779
  peptide (1)..(114): Ceres Seq. ID no. 13653787
  misc_feature (27)..(112): Pfam Name: Herpesvirus large structural phosphoprotein UL32 Pfam Description: Herpesvirus large structural phosphoprotein UL32
  misc_feature (1)..(114): Homolog of NCBI NO: 10799202 NR Description: glycine-rich RNA-binding protein [Sorghum bicolor]
  misc_feature (1)..(114): Homolog of NCBI NO: 544423 NR Description: Glycine-rich RNA-binding protein 2
  misc_feature (1)..(114): Homolog of NCBI NO: 544416 NR Description: Glycine-rich RNA-binding protein 10
  misc_feature (1)..(114): Homolog of NCBI NO: 34851124 NR Description: putative glycine-rich RNA-binding protein [Prunus
  misc_feature (1)..(114): Homolog of NCBI NO: 15235002 NR Description: glycine-rich RNA-binding protein 8 (GRP8) (CCR1)
  misc_feature (1)..(114): Homolog of NCBI NO: 30681492 NR Description: glycine-rich RNA-binding protein (AtGRP7)
  misc_feature (1)..(114): Homolog of NCBI NO: 1346180 NR Description: Glycine-rich RNA-binding protein GRP1A
  misc_feature (1)..(114): Homolog of NCBI NO: 1346181 NR Description: Glycine-rich RNA-binding protein GRP2A
  misc_feature (1)..(114): Homolog of NCBI NO: 15226605 NR Description: glycine-rich RNA-binding protein (AtGRP7)
  misc_feature (1)..(114): Homolog of NCBI NO: 21553354 NR Description: glycine-rich RNA binding protein 7 [Arabidopsis

SEQ ID NO: 29377 - protein, 107 aa, Arabidopsis thaliana; identical to SEQ ID NO: 27780
  peptide (1)..(107): Ceres Seq. ID no. 13653788
  misc_feature (20)..(105): Pfam Name: Herpesvirus large structural phosphoprotein UL32 Pfam Description: Herpesvirus large structural phosphoprotein UL32
  misc_feature (1)..(107): Homolog of NCBI NO: 10799202 NR Description: glycine-rich RNA-binding protein [Sorghum bicolor]
  misc_feature (1)..(107): Homolog of NCBI NO: 544423 NR Description: Glycine-rich RNA-binding protein 2
  misc_feature (1)..(107): Homolog of NCBI NO: 544416 NR Description: Glycine-rich RNA-binding protein 10
  misc_feature (1)..(107): Homolog of NCBI NO: 34851124 NR Description: putative glycine-rich RNA-binding protein [Prunus
  misc_feature (1)..(107): Homolog of NCBI NO: 15235002 NR Description: glycine-rich RNA-binding protein 8 (GRP8) (CCR1)
  misc_feature (1)..(107): Homolog of NCBI NO: 30681492 NR Description: glycine-rich RNA-binding protein (AtGRP7)
  misc_feature (1)..(107): Homolog of NCBI NO: 1346180 NR Description: Glycine-rich RNA-binding protein GRP1A
  misc_feature (1)..(107): Homolog of NCBI NO: 1346181 NR Description: Glycine-rich RNA-binding protein GRP2A
  misc_feature (1)..(107): Homolog of NCBI NO: 15226605 NR Description: glycine-rich RNA-binding protein (AtGRP7)
  misc_feature (1)..(107): Homolog of NCBI NO: 21553354 NR Description: glycine-rich RNA binding protein 7 [Arabidopsis

SEQ ID NO: 29378 - DNA, 1231 bp, Arabidopsis thaliana
  misc_feature (1)..(1231): Ceres Seq. ID no. 12391651
  misc_feature: MA Experiment ID: 108461 Result: Down-regulated in Transcription
  misc_feature: MA Experiment 108461 PARAMETER Experiment Name: At_Germinating_Seeds_cDNA_P Parameter: Age (day) Value: 1 vs. 0
  misc_feature: MA Experiment 108461 PARAMETER Experiment Name: At_Germinating_Seeds_cDNA_P Parameter: Tissue Value: Germinating Seeds
  misc_feature: MA Experiment ID: 108462 Result: Down-regulated in Transcription
  misc_feature: MA Experiment 108462 PARAMETER Experiment Name: At_Germinating_Seeds_cDNA_P Parameter: Age (day) Value: 2 vs. 0
  misc_feature: MA Experiment 108462 PARAMETER Experiment Name: At_Germinating_Seeds_cDNA_P Parameter: Tissue Value: Germinating Seeds
  misc_feature: MA Experiment ID: 108464 Result: Down-regulated in Transcription
  misc_feature: MA Experiment 108464 PARAMETER Experiment Name: At_Germinating_Seeds_cDNA_P Parameter: Age (day) Value: 4 vs. 0
  misc_feature: MA Experiment 108464 PARAMETER Experiment Name: At_Germinating_Seeds_cDNA_P Parameter: Tissue Value: Germinating Seeds
  misc_feature: MA Experiment ID: 108585 Result: Up-regulated in Transcription
  misc_feature: MA Experiment 108585 PARAMETER Experiment Name: At_5mM_NaNP_cDNA_P Parameter: Timepoint (hr) Value: 6
  misc_feature: MA Experiment 108585 PARAMETER Experiment Name: At_5mM_NaNP_cDNA_P Parameter: Tissue Value: Aerial
  misc_feature: MA Experiment 108585 PARAMETER Experiment Name: At_5mM_NaNP_cDNA_P Parameter: Treatment Value: null
  misc_feature: MA Experiment ID: 20000111 Result: Up-regulated in Transcription
  misc_feature: MA Experiment 20000111 PARAMETER Experiment Name: At_42deg_Heat_cDNA_P Parameter: Temperature (deg C) Value: 42 vs. 22
  misc_feature: MA Experiment 20000111 PARAMETER Experiment Name: At_42deg_Heat_cDNA_P Parameter: Timepoint (hr) Value: 6
  misc_feature: MA Experiment 20000111 PARAMETER Experiment Name: At_42deg_Heat_cDNA_P Parameter: Tissue Value: Aerial
  misc_feature: MA Experiment ID: 20000112 Result: Up-regulated in Transcription
  misc_feature: MA Experiment 20000112 PARAMETER Experiment Name: At_42deg_Heat_cDNA_P Parameter: Temperature (deg C) Value: 42 vs. 22
  misc_feature: MA Experiment 20000112 PARAMETER Experiment Name: At_42deg_Heat_cDNA_P Parameter: Timepoint (hr) Value: 2
  misc_feature: MA Experiment 20000112 PARAMETER Experiment Name: At_42deg_Heat_cDNA_P Parameter: Tissue Value: Aerial
  misc_feature: MA Experiment ID: 20000144 Result: Up-regulated in Transcription
  misc_feature: MA Experiment 20000144 PARAMETER Experiment Name: At_42deg_Heat_cDNA_P Parameter: Temperature (deg C) Value: 42 vs. 22
  misc_feature: MA Experiment 20000144 PARAMETER Experiment Name: At_42deg_Heat_cDNA_P Parameter: Timepoint (hr) Value: 1
  misc_feature: MA Experiment 20000144 PARAMETER Experiment Name: At_42deg_Heat_cDNA_P Parameter: Tissue Value: Aerial
  misc_feature: MA Experiment ID: 20000173 Result: Up-regulated in Transcription
  misc_feature: MA Experiment 20000173 PARAMETER Experiment Name: At_42deg_Heat_P Parameter: Age (day) Value: 14
  misc_feature: MA Experiment 20000173 PARAMETER Experiment Name: At_42deg_Heat_P Parameter: Organism Value: A. thaliana
  misc_feature: MA Experiment 20000173 PARAMETER Experiment Name: At_42deg_Heat_P Parameter: Plant Line Value: WS
  misc_feature: MA Experiment 20000173 PARAMETER Experiment Name: At_42deg_Heat_P Parameter: Temperature (deg C) Value: 42 vs. 22
  misc_feature: MA Experiment 20000173 PARAMETER Experiment Name: At_42deg_Heat_P Parameter: Timepoint (hr) Value: 6
  misc_feature: MA Experiment 20000173 PARAMETER Experiment Name: At_42deg_Heat_P Parameter: Tissue Value: Aerial
  misc_feature: MA Experiment ID: 20000437 Result: Up-regulated in Transcription
  misc_feature: MA Experiment 20000437 PARAMETER Experiment Name: At_Drought_P Parameter: Age (day) Value: 8
  misc_feature: MA Experiment 20000437 PARAMETER Experiment Name: At_Drought_P Parameter: Organism Value: A. thaliana
  misc_feature: MA Experiment 20000437 PARAMETER Experiment Name: At_Drought_P Parameter: Plant Line Value: WS
  misc_feature: MA Experiment 20000437 PARAMETER Experiment Name: At_Drought_P Parameter: Timepoint (hr) Value: 24
  misc_feature: MA Experiment 20000437 PARAMETER Experiment Name: At_Drought_P Parameter: Tissue Value: Whole Plant
  misc_feature: MA Experiment 20000437 PARAMETER Experiment Name: At_Drought_P Parameter: Treatment Value: Drought vs. No Drought
  misc_feature: MA Experiment ID: 20001911 Result: Up-regulated in Transcription
  misc_feature: MA Experiment 20001911 PARAMETER Experiment Name: At_Drought_Reproduction_P Parameter: Age (day) Value: 40
  misc_feature: MA Experiment 20001911 PARAMETER Experiment Name: At_Drought_Reproduction_P Parameter: Organism Value: A. thaliana
  misc_feature: MA Experiment 20001911 PARAMETER Experiment Name: At_Drought_Reproduction_P Parameter: Plant Line Value: WS
  misc_feature: MA Experiment 20001911 PARAMETER Experiment Name: At_Drought_Reproduction_P Parameter: Timepoint (day) Value: 10
  misc_feature: MA Experiment 20001911 PARAMETER Experiment Name: At_Drought_Reproduction_P Parameter: Tissue Value: Flowers
  misc_feature: MA Experiment 20001911 PARAMETER Experiment Name: At_Drought_Reproduction_P Parameter: Treatment Value: Drought vs. No Drought
gattctcaccgcctggaaataaacaaatcgtcgttgttctcgtctaacgcttgtgcaatggcagatagttcgtcgaggaggaaccttaaacgatccttcttagaagatgaagattccgataaacaacctcccgaaaagcgagtacggtttccaaaggggaagaagtcgaaacctgaacagctcttagaggaagaagctttagcccgccgcaaagcccgtgatgctgctaaggagcgtgcaaagattcgcaatcagaatactactaagctctttatcgaagatgacagtgatgatattaatcaggctcaggagacttatgaggatgatggcaatcgcacagaagatgggatccagattgaagcttttagtctggacagagagaaagaagaaggttactttgatgctgatgggaactttgtagaatatgttagagaaaaggaagtcaaggatgcatggcttgacagtattgaaaaaaatccaatgtatatgggacgatctgctgcaaatgatactgagatggatgatgatagtgggaacgaaaaagcaggggatgacctttctcaagatgaaatcggagttagaaagaggcgcattgctaatgtccttgaaccaggagaaacggtcttgcgagctttaaggaggttgaaagggaattcgaataatcgcaaggagaagatgacatctgagaccaagcttatctttgatcagcttactgaggatgcggacaagcttatcgagaacggcgactacaatgtttatcatgaggagcaagaagttttccaacgtgaagcagaaggatatgagagactagctcaagcgaaagaaaatgggactgccaatatagtatcttgtgatatgtttggcgatgatgagaatgctcctgaaccttcctctgatctacaaccgtctagctccatctcgggcactcagcttaattctgattatgtgtttgatgaatcttcagggtactactacagcagcagccttggttactattatgacccgaacactggactttactgctacgcaacaaccggaaaatggtacaggtacgatgaagagactaaggaatataaagaggtggtttctgaagttgctactgaagaagtttaattttcgtttgtctgtacttttgactaacacagggtcttgaaatatttcccttgttgtttttagtttgaaagtaagcacatcatacatgagtttatataaatatatttggatttattgg

SEQ ID NO: 29379 - protein, 370 aa, Arabidopsis thaliana
  peptide (1)..(370): Ceres Seq. ID no. 12391652
  misc_feature (102)..(302): Homolog of NCBI NO: 39850142 NR Description: Unknown (protein for MGC:76157) [Silurana
  misc_feature (45)..(316): Homolog of NCBI NO: 39584750 NR Description: Hypothetical protein CBG13204 [Caenorhabditis
  misc_feature (68)..(318): Homolog of NCBI NO: 24583433 NR Description: CG5198-PA [Drosophila melanogaster]
  misc_feature (68)..(318): Homolog of NCBI NO: 17861590 NR Description: GH13760p [Drosophila melanogaster]
  misc_feature (94)..(290): Homolog of NCBI NO: 17505208 NR Description: CD2 antigen (cytoplasmic tail) binding protein 2;
  misc_feature (44)..(290): Homolog of NCBI NO: 34859280 NR Description: similar to CD2 antigen (cytoplasmic tail) binding
  misc_feature (44)..(290): Homolog of NCBI NO: 5174409 NR Description: CD2 antigen (cytoplasmic tail) binding protein 2
  misc_feature (26)..(270): Homolog of NCBI NO: 3355658 NR Description: SMC2orf [Podocoryne carnea]
  misc_feature (20)..(370): Homolog of NCBI NO: 9955526 NR Description: putative protein [Arabidopsis thaliana]
  misc_feature (20)..(370): Homolog of NCBI NO: 18415962 NR Description: putative protein
DSHRLEINKSSLFSSNACAMADSSSRRNLKRSFLEDEDSDKQPPEKRVRFPKGKKSKPEQLLEEEALARRKARDAAKERAKIRNQNTTKLFIEDDSDDINQAQETYEDDGNRTEDGIQIEAFSLDREKEEGYFDADGNFVEYVREKEVKDAWLDSIEKNPMYMGRSAANDTEMDDDSGNEKAGDDLSQDEIGVRKRRIANVLEPGETVLRALRRLKGNSNNRKEKMTSETKLIFDQLTEDADKLIENGDYNVYHEEQEVFQREAEGYERLAQAKENGTANIVSCDMFGDDENAPEPSSDLQPSSSISGTQLNSDYVFDESSGYYYSSSLGYYYDPNTGLYCYATTGKWYRYDEETKEYKEVVSEVATEEV

SEQ ID NO: 29380 - protein, 351 aa, Arabidopsis thaliana
  peptide (1)..(351): Ceres Seq. ID no. 12391653
  misc_feature (83)..(283): Homolog of NCBI NO: 39850142 NR Description: Unknown (protein for MGC:76157) [Silurana
  misc_feature (26)..(297): Homolog of NCBI NO: 39584750 NR Description: Hypothetical protein CBG13204 [Caenorhabditis
  misc_feature (49)..(299): Homolog of NCBI NO: 24583433 NR Description: CG5198-PA [Drosophila melanogaster]
  misc_feature (49)..(299): Homolog of NCBI NO: 17861590 NR Description: GH13760p [Drosophila melanogaster]
  misc_feature (75)..(271): Homolog of NCBI NO: 17505208 NR Description: CD2 antigen (cytoplasmic tail) binding protein 2;
  misc_feature (25)..(271): Homolog of NCBI NO: 34859280 NR Description: similar to CD2 antigen (cytoplasmic tail) binding
  misc_feature (25)..(271): Homolog of NCBI NO: 5174409 NR Description: CD2 antigen (cytoplasmic tail) binding protein 2
  misc_feature (7)..(251): Homolog of NCBI NO: 3355658 NR Description: SMC2orf [Podocoryne carnea]
  misc_feature (1)..(351): Homolog of NCBI NO: 9955526 NR Description: putative protein [Arabidopsis thaliana]
  misc_feature (1)..(351): Homolog of NCBI NO: 18415962 NR Description: putative protein
MADSSSRRNLKRSFLEDEDSDKQPPEKRVRFPKGKKSKPEQLLEEEALARRKARDAAKERAKIRNQNTTKLFIEDDSDDINQAQETYEDDGNRTEDGIQIEAFSLDREKEEGYFDADGNFVEYVREKEVKDAWLDSIEKNPMYMGRSAANDTEMDDDSGNEKAGDDLSQDEIGVRKRRIANVLEPGETVLRALRRLKGNSNNRKEKMTSETKLIFDQLTEDADKLIENGDYNVYHEEQEVFQREAEGYERLAQAKENGTANIVSCDMFGDDENAPEPSSDLQPSSSISGTQLNSDYVFDESSGYYYSSSLGYYYDPNTGLYCYATTGKWYRYDEETKEYKEVVSEVATEEV

SEQ ID NO: 29381 - protein, 210 aa, Arabidopsis thaliana
  peptide (1)..(210): Ceres Seq. ID no. 12391654
  misc_feature (1)..(142): Homolog of NCBI NO: 39850142 NR Description: Unknown (protein for MGC:76157) [Silurana
  misc_feature (1)..(156): Homolog of NCBI NO: 39584750 NR Description: Hypothetical protein CBG13204 [Caenorhabditis
  misc_feature (1)..(158): Homolog of NCBI NO: 24583433 NR Description: CG5198-PA [Drosophila melanogaster]
  misc_feature (1)..(158): Homolog of NCBI NO: 17861590 NR Description: GH13760p [Drosophila melanogaster]
  misc_feature (1)..(130): Homolog of NCBI NO: 17505208 NR Description: CD2 antigen (cytoplasmic tail) binding protein 2;
  misc_feature (1)..(130): Homolog of NCBI NO: 34859280 NR Description: similar to CD2 antigen (cytoplasmic tail) binding
  misc_feature (1)..(130): Homolog of NCBI NO: 5174409 NR Description: CD2 antigen (cytoplasmic tail) binding protein 2
  misc_feature (1)..(110): Homolog of NCBI NO: 3355658 NR Description: SMC2orf [Podocoryne carnea]
  misc_feature (1)..(210): Homolog of NCBI NO: 9955526 NR Description: putative protein [Arabidopsis thaliana]
  misc_feature (1)..(210): Homolog of NCBI NO: 18415962 NR Description: putative protein
MYMGRSAANDTEMDDDSGNEKAGDDLSQDEIGVRKRRIANVLEPGETVLRALRRLKGNSNNRKEKMTSETKLIFDQLTEDADKLIENGDYNVYHEEQEVFQREAEGYERLAQAKENGTANIVSCDMFGDDENAPEPSSDLQPSSSISGTQLNSDYVFDESSGYYYSSSLGYYYDPNTGLYCYATTGKWYRYDEETKEYKEVVSEVATEEV

SEQ ID NO: 29382 - DNA, 1350 bp, Arabidopsis thaliana
  misc_feature (1)..(1350): Ceres Seq. ID no. 13490555
  misc_feature: MA Experiment ID: 108489 Result: Up-regulated in Transcription
  misc_feature: MA Experiment ID: 20000234 Result: Up-regulated in Transcription
  misc_feature: MA Experiment 20000234 PARAMETER Experiment Name: At_Siliques_P Parameter: Age (day) Value: 21
  misc_feature: MA Experiment 20000234 PARAMETER Experiment Name: At_Siliques_P Parameter: Organism Value: A. thaliana
  misc_feature: MA Experiment 20000234 PARAMETER Experiment Name: At_Siliques_P Parameter: Plant Line Value: WS
  misc_feature: MA Experiment 20000234 PARAMETER Experiment Name: At_Siliques_P Parameter: Tissue Value: Less Than 5mm Siliques vs. Whole Plant
  misc_feature: MA Experiment ID: 20000264 Result: Up-regulated in Transcription
  misc_feature: MA Experiment 20000264 PARAMETER Experiment Name: At_Open_Flower_P Parameter: Age (day) Value: 21
  misc_feature: MA Experiment 20000264 PARAMETER Experiment Name: At_Open_Flower_P Parameter: Plant Line Value: WS
  misc_feature: MA Experiment 20000264 PARAMETER Experiment Name: At_Open_Flower_P Parameter: Tissue Value: Open Flower vs. Whole Plant
  misc_feature: MA Experiment ID: 20000265 Result: Up-regulated in Transcription
  misc_feature: MA Experiment 20000265 PARAMETER Experiment Name: At_Open_Flower_P Parameter: Age (day) Value: 21
  misc_feature: MA Experiment 20000265 PARAMETER Experiment Name: At_Open_Flower_P Parameter: Plant Line Value: WS
  misc_feature: MA Experiment 20000265 PARAMETER Experiment Name: At_Open_Flower_P Parameter: Tissue Value: Closed Flower vs. Whole Plant
  misc_feature: MA Experiment ID: 20000286 Result: Up-regulated in Transcription
  misc_feature: MA Experiment 20000286 PARAMETER Experiment Name: At_Open_Flower_P Parameter: Age (day) Value: 21
  misc_feature: MA Experiment 20000286 PARAMETER Experiment Name: At_Open_Flower_P Parameter: Plant Line Value: WS
  misc_feature: MA Experiment 20000286 PARAMETER Experiment Name: At_Open_Flower_P Parameter: Tissue Value: Half Open vs. Whole Plant
  misc_feature: MA Experiment ID: 20000794 Result: Up-regulated in Transcription
  misc_feature: MA Experiment 20000794 PARAMETER Experiment Name: At_Petals_P Parameter: Age (day) Value: 23-25 days
  misc_feature: MA Experiment 20000794 PARAMETER Experiment Name: At_Petals_P Parameter: Plant Line Value: WS
  misc_feature: MA Experiment 20000794 PARAMETER Experiment Name: At_Petals_P Parameter: Tissue Value: Petals vs. Whole plant
  misc_feature: MA Experiment ID: 20001757 Result: Down-regulated in Transcription
  misc_feature: MA Experiment 20001757 PARAMETER Experiment Name: At_50mM_NH4NO3_L-to-H_P Parameter: Timepoint (hr) Value: 6
  misc_feature: MA Experiment 20001757 PARAMETER Experiment Name: At_50mM_NH4NO3_L-to-H_P Parameter: Tissue Value: Leaf
  misc_feature: MA Experiment 20001757 PARAMETER Experiment Name: At_50mM_NH4NO3_L-to-H_P Parameter: Treatment Value: 50mM NH4NO3 vs 100mM Mannitol
  misc_feature: MA Experiment ID: 20001910 Result: Up-regulated in Transcription
  misc_feature: MA Experiment 20001910 PARAMETER Experiment Name: At_Drought_Reproduction_P Parameter: Age (day) Value: 37
  misc_feature: MA Experiment 20001910 PARAMETER Experiment Name: At_Drought_Reproduction_P Parameter: Organism Value: A. thaliana
  misc_feature: MA Experiment 20001910 PARAMETER Experiment Name: At_Drought_Reproduction_P Parameter: Plant Line Value: WS
  misc_feature: MA Experiment 20001910 PARAMETER Experiment Name: At_Drought_Reproduction_P Parameter: Timepoint (day) Value: 7
  misc_feature: MA Experiment 20001910 PARAMETER Experiment Name: At_Drought_Reproduction_P Parameter: Tissue Value: Flowers
  misc_feature: MA Experiment 20001910 PARAMETER Experiment Name: At_Drought_Reproduction_P Parameter: Treatment Value: Drought vs. No Drought
aaaagaaaagtagaaaccccaagaaaaaataaaaaaaataatgggtcatcgaacaagaatgatccttgtcctaaccctagttgtaatgtccatatggggttcggacgcatcagcaatgcaaaagacgaaattcgacgccccacttttgactgaaaaaatcgcgacaaatagatcgataattgtagatatcgaaggcaaaggagactacacttcggttcagaaagccatcgatgctgtccctgttggtaactctaattggattattgtccatgtccgtaaaggaatctacaaggagagagtgcacattccggagaacaagccgttcatattcatgaggggtaatggaaaaggaaaaacggtgatcgaatcttcgcaaagttcggtcgacaatgttgcttcagctactttcaaagtcgaggctaatcactttgtcgcttttggtatcagcatccgaaatgatgcacctgtcggaatggcattcacatctgagaaccaatcggtggcagcgtttgtggctgctgacaaagtagcgttttaccattgtgcgttctacagcttacacaacactttgtttgataacaaaggtagacattactaccatgagtgttacatccaaggctccatagacttcatcttcggtcgcgcaacttccattttcaacaattgtgagatatttgtgatatcagacaagagggtgaaaccgtatgggtcaatcacagcacaccatagggaaagcgcagaggaaaaaacgggttacgtgttcataagaggcaaagtgtacggaattgatgaggtttacttgggccgagccaaaggaccttattctcgagtcatctttgccaagacttacttgtccaagaccgttgtgcctgatggttggacaaactggagttaccatggctcgacccagaatctataccatggggagtataaatgtcatggaccaggagctgagaggcaaaagagatctgactgggccaaagatcttaccaaacaagaagttgagtctttcttgtccattgattttattgatggcacttcttggctccctgtttggcttcaggaaaagttttagagttccttatgctgtcgcgtttggcttttgacatttcgcgttttggtgtggcttggaaaaaaaacatatgaagaaagaagagtacttcatcctttcttcgacggtatactatacgaaatagttttctctcttttttttttgtgtacttctactctaaaatgttcttagagtgattggaaactcttatgttgtttgcaaacattatataagattgtttccatcttaataatatatgtaacctaaatttaaatcctataaatttaaaatattttccc

SEQ ID NO: 29383 - protein, 344 aa, Arabidopsis thaliana
  peptide (1)..(344): Ceres Seq. ID no. 13490556
  misc_feature (45)..(333): Pfam Name: Pectinesterase Pfam Description: Pectinesterase
  misc_feature (43)..(336): Homolog of NCBI NO: 15238111 NR Description: pectinesterase family [Arabidopsis thaliana]
  misc_feature (31)..(336): Homolog of NCBI NO: 15239623 NR Description: pectinesterase family [Arabidopsis thaliana]
  misc_feature (41)..(336): Homolog of NCBI NO: 15240544 NR Description: pectinesterase family [Arabidopsis thaliana]
  misc_feature (1)..(336): Homolog of NCBI NO: 15226598 NR Description: pectinesterase family [Arabidopsis thaliana]
  misc_feature (36)..(336): Homolog of NCBI NO: 27754550 NR Description: putative pectinesterase family protein
  misc_feature (36)..(336): Homolog of NCBI NO: 15228023 NR Description: pectinesterase family [Arabidopsis thaliana]
  misc_feature (45)..(336): Homolog of NCBI NO: 34909402 NR Description: putative pectin methylesterase
  misc_feature (53)..(336): Homolog of NCBI NO: 15241163 NR Description: pectinesterase family [Arabidopsis thaliana]
  misc_feature (4)..(339): Homolog of NCBI NO: 39653369 NR Description: putative pectinesterase [Oryza sativa (indica
  misc_feature (1)..(344): Homolog of NCBI NO: 15228955 NR Description: pectinesterase family [Arabidopsis thaliana]
MGHRTRMILVLTLVVMSIWGSDASAMQKTKFDAPLLTEKIATNRSIIVDIEGKGDYTSVQKAIDAVPVGNSNWIIVHVRKGIYKERVHIPENKPFIFMRGNGKGKTVIESSQSSVDNVASATFKVEANHFVAFGISIRNDAPVGMAFTSENQSVAAFVAADKVAFYHCAFYSLHNTLFDNKGRHYYHECYIQGSIDFIFGRATSIFNNCEIFVISDKRVKPYGSITAHHRESAEEKTGYVFIRGKVYGIDEVYLGRAKGPYSRVIFAKTYLSKTVVPDGWTNWSYHGSTQNLYHGEYKCHGPGAERQKRSDWAKDLTKQEVESFLSIDFIDGTSWLPVWLQEKF

SEQ ID NO: 29384 - protein, 338 aa, Arabidopsis thaliana
  peptide (1)..(338): Ceres Seq. ID no. 13490557
  misc_feature (39)..(327): Pfam Name: Pectinesterase Pfam Description: Pectinesterase
  misc_feature (37)..(330): Homolog of NCBI NO: 15238111 NR Description: pectinesterase family [Arabidopsis thaliana]
  misc_feature (25)..(330): Homolog of NCBI NO: 15239623 NR Description: pectinesterase family [Arabidopsis thaliana]
  misc_feature (35)..(330): Homolog of NCBI NO: 15240544 NR Description: pectinesterase family [Arabidopsis thaliana]
  misc_feature (1)..(330): Homolog of NCBI NO: 15226598 NR Description: pectinesterase family [Arabidopsis thaliana]
  misc_feature (30)..(330): Homolog of NCBI NO: 27754550 NR Description: putative pectinesterase family protein
  misc_feature (30)..(330): Homolog of NCBI NO: 15228023 NR Description: pectinesterase family [Arabidopsis thaliana]
  misc_feature (39)..(330): Homolog of NCBI NO: 34909402 NR Description: putative pectin methylesterase
  misc_feature (47)..(330): Homolog of NCBI NO: 15241163 NR Description: pectinesterase family [Arabidopsis thaliana]
  misc_feature (1)..(333): Homolog of NCBI NO: 39653369 NR Description: putative pectinesterase [Oryza sativa (indica
  misc_feature (1)..(338): Homolog of NCBI NO: 15228955 NR Description: pectinesterase family [Arabidopsis thaliana]
MILVLTLVVMSIWGSDASAMQKTKFDAPLLTEKIATNRSIIVDIEGKGDYTSVQKAIDAVPVGNSNWIIVHVRKGIYKERVHIPENKPFIFMRGNGKGKTVIESSQSSVDNVASATFKVEANHFVAFGISIRNDAPVGMAFTSENQSVAAFVAADKVAFYHCAFYSLHNTLFDNKGRHYYHECYIQGSIDFIFGRATSIFNNCEIFVISDKRVKPYGSITAHHRESAEEKTGYVFIRGKVYGIDEVYLGRAKGPYSRVIFAKTYLSKTVVPDGWTNWSYHGSTQNLYHGEYKCHGPGAERQKRSDWAKDLTKQEVESFLSIDFIDGTSWLPVWLQEKF

SEQ ID NO: 29385 - protein, 329 aa, Arabidopsis thaliana
  peptide (1)..(329): Ceres Seq. ID no. 13490558
  misc_feature (30)..(318): Pfam Name: Pectinesterase Pfam Description: Pectinesterase
  misc_feature (28)..(321): Homolog of NCBI NO: 15238111 NR Description: pectinesterase family [Arabidopsis thaliana]
  misc_feature (16)..(321): Homolog of NCBI NO: 15239623 NR Description: pectinesterase family [Arabidopsis thaliana]
  misc_feature (26)..(321): Homolog of NCBI NO: 15240544 NR Description: pectinesterase family [Arabidopsis thaliana]
  misc_feature (1)..(321): Homolog of NCBI NO: 15226598 NR Description: pectinesterase family [Arabidopsis thaliana]
  misc_feature (21)..(321): Homolog of NCBI NO: 27754550 NR Description: putative pectinesterase family protein
  misc_feature (21)..(321): Homolog of NCBI NO: 15228023 NR Description: pectinesterase family [Arabidopsis thaliana]
  misc_feature (30)..(321): Homolog of NCBI NO: 34909402 NR Description: putative pectin methylesterase
  misc_feature (38)..(321): Homolog of NCBI NO: 15241163 NR Description: pectinesterase family [Arabidopsis thaliana]
  misc_feature (1)..(324): Homolog of NCBI NO: 39653369 NR Description: putative pectinesterase [Oryza sativa (indica
  misc_feature (1)..(329): Homolog of NCBI NO: 15228955 NR Description: pectinesterase family [Arabidopsis thaliana]
MSIWGSDASAMQKTKFDAPLLTEKIATNRSIIVDIEGKGDYTSVQKAIDAVPVGNSNWIIVHVRKGIYKERVHIPENKPFIFMRGNGKGKTVIESSQSSVDNVASATFKVEANHFVAFGISIRNDAPVGMAFTSENQSVAAFVAADKVAFYHCAFYSLHNTLFDNKGRHYYHECYIQGSIDFIFGRATSIFNNCEIFVISDKRVKPYGSITAHHRESAEEKTGYVFIRGKVYGIDEVYLGRAKGPYSRVIFAKTYLSKTVVPDGWTNWSYHGSTQNLYHGEYKCHGPGAERQKRSDWAKDLTKQEVESFLSIDFIDGTSWLPVWLQEKF

SEQ ID NO: 29386 - DNA, 1135 bp, Arabidopsis thaliana
  misc_feature (1)..(1135): Ceres Seq. ID no. 12422074
  misc_feature: MA Experiment ID: 108462 Result: Down-regulated in Transcription
  misc_feature: MA Experiment 108462 PARAMETER Experiment Name: At_Germinating_Seeds_cDNA_P Parameter: Age (day) Value: 2 vs. 0
  misc_feature: MA Experiment 108462 PARAMETER Experiment Name: At_Germinating_Seeds_cDNA_P Parameter: Tissue Value: Germinating Seeds
  misc_feature: MA Experiment ID: 108463 Result: Down-regulated in Transcription
  misc_feature: MA Experiment 108463 PARAMETER Experiment Name: At_Germinating_Seeds_cDNA_P Parameter: Age (day) Value: 3 vs. 0
  misc_feature: MA Experiment 108463 PARAMETER Experiment Name: At_Germinating_Seeds_cDNA_P Parameter: Tissue Value: Germinating Seeds
  misc_feature: MA Experiment ID: 108464 Result: Down-regulated in Transcription
  misc_feature: MA Experiment 108464 PARAMETER Experiment Name: At_Germinating_Seeds_cDNA_P Parameter: Age (day) Value: 4 vs. 0
  misc_feature: MA Experiment 108464 PARAMETER Experiment Name: At_Germinating_Seeds_cDNA_P Parameter: Tissue Value: Germinating Seeds
  misc_feature: MA Experiment ID: 108488 Result: Down-regulated in Transcription
  misc_feature: MA Experiment ID: 108501 Result: Up-regulated in Transcription
  misc_feature: MA Experiment 108501 PARAMETER Experiment Name: At_ap2_floral_buds_cDNA_P Parameter: Plant Line Value: ap2 (Ler.)
  misc_feature: MA Experiment 108501 PARAMETER Experiment Name: At_ap2_floral_buds_cDNA_P Parameter: Tissue Value: Closed Flower
  misc_feature: MA Experiment ID: 108561 Result: Down-regulated in Transcription
  misc_feature: MA Experiment 108561 PARAMETER Experiment Name: At_100uM_ABA_cDNA_P Parameter: Timepoint (hr) Value: 6
  misc_feature: MA Experiment 108561 PARAMETER Experiment Name: At_100uM_ABA_cDNA_P Parameter: Tissue Value: Aerial
  misc_feature: MA Experiment 108561 PARAMETER Experiment Name: At_100uM_ABA_cDNA_P Parameter: Treatment Value: 100uM ABA vs. No Treatment
  misc_feature: MA Experiment ID: 108569 Result: Down-regulated in Transcription
  misc_feature: MA Experiment 108569 PARAMETER Experiment Name: At_0.001%_MeJA__cDNA_P Parameter: Timepoint (hr) Value: 6
  misc_feature: MA Experiment 108569 PARAMETER Experiment Name: At_0.001%_MeJA__cDNA_P Parameter: Tissue Value: Aerial
  misc_feature: MA Experiment 108569 PARAMETER Experiment Name: At_0.001%_MeJA__cDNA_P Parameter: Treatment Value: 0.001% MeJA vs. No Treatment
  misc_feature: MA Experiment ID: 108574 Result: Up-regulated in Transcription
  misc_feature: MA Experiment 108574 PARAMETER Experiment Name: At_Wounding__cDNA_P Parameter: Timepoint (hr) Value: 1
  misc_feature: MA Experiment 108574 PARAMETER Experiment Name: At_Wounding__cDNA_P Parameter: Tissue Value: Aerial
  misc_feature: MA Experiment 108574 PARAMETER Experiment Name: At_Wounding__cDNA_P Parameter: Treatment Value: Wounding vs. No Wounding
  misc_feature: MA Experiment ID: 108576 Result: Up-regulated in Transcription
  misc_feature: MA Experiment 108576 PARAMETER Experiment Name: At_42deg_Heat_cDNA_P Parameter: Temperature (deg C) Value: 42 vs. 22
  misc_feature: MA Experiment 108576 PARAMETER Experiment Name: At_42deg_Heat_cDNA_P Parameter: Timepoint (hr) Value: 1
  misc_feature: MA Experiment 108576 PARAMETER Experiment Name: At_42deg_Heat_cDNA_P Parameter: Tissue Value: Aerial
  misc_feature: MA Experiment ID: 108577 Result: Down-regulated in Transcription
  misc_feature: MA Experiment 108577 PARAMETER Experiment Name: At_42deg_Heat_cDNA_P Parameter: Temperature (deg C) Value: 42 vs. 22
  misc_feature: MA Experiment 108577 PARAMETER Experiment Name: At_42deg_Heat_cDNA_P Parameter: Timepoint (hr) Value: 6
  misc_feature: MA Experiment 108577 PARAMETER Experiment Name: At_42deg_Heat_cDNA_P Parameter: Tissue Value: Aerial
  misc_feature: MA Experiment ID: 108605 Result: Down-regulated in Transcription
  misc_feature: MA Experiment 108605 PARAMETER Experiment Name: At_100uM_ABA_cDNA_P Parameter: Timepoint (hr) Value: 6
  misc_feature: MA Experiment 108605 PARAMETER Experiment Name: At_100uM_ABA_cDNA_P Parameter: Tissue Value: Aerial
  misc_feature: MA Experiment 108605 PARAMETER Experiment Name: At_100uM_ABA_cDNA_P Parameter: Treatment Value: 100uM ABA vs. No Treatment
  misc_feature: MA Experiment ID: 108607 Result: Down-regulated in Transcription
  misc_feature: MA Experiment 108607 PARAMETER Experiment Name: At_100uM_ABA_cDNA_P Parameter: Timepoint (hr) Value: 4
  misc_feature: MA Experiment 108607 PARAMETER Experiment Name: At_100uM_ABA_cDNA_P Parameter: Tissue Value: Aerial
  misc_feature: MA Experiment 108607 PARAMETER Experiment Name: At_100uM_ABA_cDNA_P Parameter: Treatment Value: 100uM ABA vs. No Treatment
  misc_feature: MA Experiment ID: 108668 Result: Down-regulated in Transcription
  misc_feature: MA Experiment 108668 PARAMETER Experiment Name: At_2mM_SA_cDNA_P Parameter: Plant Line Value: WS
  misc_feature: MA Experiment 108668 PARAMETER Experiment Name: At_2mM_SA_cDNA_P Parameter: Timepoint (hr) Value: 6
  misc_feature: MA Experiment 108668 PARAMETER Experiment Name: At_2mM_SA_cDNA_P Parameter: Treatment Value: 2mM SA vs. No Treatment
  misc_feature: MA Experiment ID: 20000113 Result: Down-regulated in Transcription
  misc_feature: MA Experiment 20000113 PARAMETER Experiment Name: At_42deg_Heat_cDNA_P Parameter: Temperature (deg C) Value: 42 vs. 22
  misc_feature: MA Experiment 20000113 PARAMETER Experiment Name: At_42deg_Heat_cDNA_P Parameter: Timepoint (hr) Value: 8
  misc_feature: MA Experiment 20000113 PARAMETER Experiment Name: At_42deg_Heat_cDNA_P Parameter: Tissue Value: Aerial
  misc_feature: MA Experiment ID: 20000182 Result: Down-regulated in Transcription
  misc_feature: MA Experiment 20000182 PARAMETER Experiment Name: At_2mM_SA_P Parameter: Age (day) Value: 14
  misc_feature: MA Experiment 20000182 PARAMETER Experiment Name: At_2mM_SA_P Parameter: Organism Value: A. thaliana
  misc_feature: MA Experiment 20000182 PARAMETER Experiment Name: At_2mM_SA_P Parameter: Plant Line Value: WS
  misc_feature: MA Experiment 20000182 PARAMETER Experiment Name: At_2mM_SA_P Parameter: Timepoint (hr) Value: 6
  misc_feature: MA Experiment 20000182 PARAMETER Experiment Name: At_2mM_SA_P Parameter: Tissue Value: Aerial
  misc_feature: MA Experiment 20000182 PARAMETER Experiment Name: At_2mM_SA_P Parameter: Treatment Value: 2mM SA vs. No Treatment
  misc_feature: MA Experiment ID: 20000441 Result: Down-regulated in Transcription
  misc_feature: MA Experiment 20000441 PARAMETER Experiment Name: At_1uM_BR-BRZ__P Parameter: Tissue Value: Shoot Apices
  misc_feature: MA Experiment 20000441 PARAMETER Experiment Name: At_1uM_BR-BRZ__P Parameter: Treatment Value: 1uM BR vs. No Treatment
  misc_feature: MA Experiment ID: 20000443 Result: Down-regulated in Transcription
  misc_feature: MA Experiment 20000443 PARAMETER Experiment Name: At_1uM_BR-BRZ__P Parameter: Tissue Value: Shoot Apices
  misc_feature: MA Experiment 20000443 PARAMETER Experiment Name: At_1uM_BR-BRZ__P Parameter: Treatment Value: 1uM BRZ vs. No Treatment
  misc_feature: MA Experiment ID: 20000527 Result: Down-regulated in Transcription
  misc_feature: MA Experiment 20000527 PARAMETER Experiment Name: At_10percent_PEG_P Parameter: Age (day) Value: 20
  misc_feature: MA Experiment 20000527 PARAMETER Experiment Name: At_10percent_PEG_P Parameter: Organism Value: A. thaliana
  misc_feature: MA Experiment 20000527 PARAMETER Experiment Name: At_10percent_PEG_P Parameter: Plant Line Value: WS
  misc_feature: MA Experiment 20000527 PARAMETER Experiment Name: At_10percent_PEG_P Parameter: Timepoint (day) Value: 20
  misc_feature: MA Experiment 20000527 PARAMETER Experiment Name: At_10percent_PEG_P Parameter: Tissue Value: Whole Plant
  misc_feature: MA Experiment 20000527 PARAMETER Experiment Name: At_10percent_PEG_P Parameter: Treatment Value: 10percent PEG vs. No Treatment
  misc_feature: MA Experiment ID: 20000573 Result: Down-regulated in Transcription
  misc_feature: MA Experiment 20000573 PARAMETER Experiment Name: At_100uM_ABA_Mutants__P Parameter: Organism Value: A. thaliana
  misc_feature: MA Experiment 20000573 PARAMETER Experiment Name: At_100uM_ABA_Mutants__P Parameter: Plant Line Value: CS22 vs. Ler wt
  misc_feature: MA Experiment 20000573 PARAMETER Experiment Name: At_100uM_ABA_Mutants__P Parameter: Timepoint (hr) Value: N/A
  misc_feature: MA Experiment 20000573 PARAMETER Experiment Name: At_100uM_ABA_Mutants__P Parameter: Tissue Value: Whole Plant
  misc_feature: MA Experiment 20000573 PARAMETER Experiment Name: At_100uM_ABA_Mutants__P Parameter: Treatment Value: None
  misc_feature: MA Experiment ID: 20000574 Result: Down-regulated in Transcription
  misc_feature: MA Experiment 20000574 PARAMETER Experiment Name: At_100uM_ABA_Mutants__P Parameter: Organism Value: A. thaliana
  misc_feature: MA Experiment 20000574 PARAMETER Experiment Name: At_100uM_ABA_Mutants__P Parameter: Plant Line Value: CS23 vs. Ler wt
  misc_feature: MA Experiment 20000574 PARAMETER Experiment Name: At_100uM_ABA_Mutants__P Parameter: Timepoint (hr) Value: N/A
  misc_feature: MA Experiment 20000574 PARAMETER Experiment Name: At_100uM_ABA_Mutants__P Parameter: Tissue Value: Whole Plant
  misc_feature: MA Experiment 20000574 PARAMETER Experiment Name: At_100uM_ABA_Mutants__P Parameter: Treatment Value: None
  misc_feature: MA Experiment ID: 20001247 Result: Down-regulated in Transcription
  misc_feature: MA Experiment 20001247 PARAMETER Experiment Name: At_Far-red-induction_P Parameter: Age (day) Value: 7
  misc_feature: MA Experiment 20001247 PARAMETER Experiment Name: At_Far-red-induction_P Parameter: Light Value: Far-red vs. White
  misc_feature: MA Experiment 20001247 PARAMETER Experiment Name: At_Far-red-induction_P Parameter: Organism Value: A. thaliana
  misc_feature: MA Experiment 20001247 PARAMETER Experiment Name: At_Far-red-induction_P Parameter: Plant Line Value: Columbia
  misc_feature: MA Experiment 20001247 PARAMETER Experiment Name: At_Far-red-induction_P Parameter: Timepoint (hr) Value: 1
  misc_feature: MA Experiment 20001247 PARAMETER Experiment Name: At_Far-red-induction_P Parameter: Tissue Value: Whole Plant
  misc_feature: MA Experiment ID: 20001248 Result: Down-regulated in Transcription
  misc_feature: MA Experiment 20001248 PARAMETER Experiment Name: At_Far-red-induction_P Parameter: Age (day) Value: 7
  misc_feature: MA Experiment 20001248 PARAMETER Experiment Name: At_Far-red-induction_P Parameter: Light Value: Far-red vs. White
  misc_feature: MA Experiment 20001248 PARAMETER Experiment Name: At_Far-red-induction_P Parameter: Organism Value: A. thaliana
  misc_feature: MA Experiment 20001248 PARAMETER Experiment Name: At_Far-red-induction_P Parameter: Plant Line Value: Columbia
  misc_feature: MA Experiment 20001248 PARAMETER Experiment Name: At_Far-red-induction_P Parameter: Timepoint (hr) Value: 4
  misc_feature: MA Experiment 20001248 PARAMETER Experiment Name: At_Far-red-induction_P Parameter: Tissue Value: Whole Plant
  misc_feature: MA Experiment ID: 20001450 Result: Down-regulated in Transcription
  misc_feature: MA Experiment 20001450 PARAMETER Experiment Name: At_Far-red-induction_P Parameter: Age (day) Value: 7
  misc_feature: MA Experiment 20001450 PARAMETER Experiment Name: At_Far-red-induction_P Parameter: Light Value: Far-red vs. White
  misc_feature: MA Experiment 20001450 PARAMETER Experiment Name: At_Far-red-induction_P Parameter: Organism Value: A. thaliana
  misc_feature: MA Experiment 20001450 PARAMETER Experiment Name: At_Far-red-induction_P Parameter: Plant Line Value: Columbia
  misc_feature: MA Experiment 20001450 PARAMETER Experiment Name: At_Far-red-induction_P Parameter: Timepoint (hr) Value: 8
  misc_feature: MA Experiment 20001450 PARAMETER Experiment Name: At_Far-red-induction_P Parameter: Tissue Value: Whole Plant
  misc_feature: MA Experiment ID: 20001451 Result: Down-regulated in Transcription
  misc_feature: MA Experiment 20001451 PARAMETER Experiment Name: At_Far-red-induction_P Parameter: Age (day) Value: 7
  misc_feature: MA Experiment 20001451 PARAMETER Experiment Name: At_Far-red-induction_P Parameter: Light Value: Far-red vs. White
  misc_feature: MA Experiment 20001451 PARAMETER Experiment Name: At_Far-red-induction_P Parameter: Organism Value: A. thaliana
  misc_feature: MA Experiment 20001451 PARAMETER Experiment Name: At_Far-red-induction_P Parameter: Plant Line Value: Columbia
  misc_feature: MA Experiment 20001451 PARAMETER Experiment Name: At_Far-red-induction_P Parameter: Timepoint (hr) Value: 24
  misc_feature: MA Experiment 20001451 PARAMETER Experiment Name: At_Far-red-induction_P Parameter: Tissue Value: Whole Plant
  misc_feature: MA Experiment ID: 20001459 Result: Up-regulated in Transcription
  misc_feature: MA Experiment 20001459 PARAMETER Experiment Name: At_50mM_NH4NO3_L-to-H_P Parameter: Age (day) Value: Undefined
  misc_feature: MA Experiment 20001459 PARAMETER Experiment Name: At_50mM_NH4NO3_L-to-H_P Parameter: Organism Value: Undefined
  misc_feature: MA Experiment 20001459 PARAMETER Experiment Name: At_50mM_NH4NO3_L-to-H_P Parameter: Plant Line Value: Undefined
  misc_feature: MA Experiment 20001459 PARAMETER Experiment Name: At_50mM_NH4NO3_L-to-H_P Parameter: Timepoint (hr) Value: 4
  misc_feature: MA Experiment 20001459 PARAMETER Experiment Name: At_50mM_NH4NO3_L-to-H_P Parameter: Tissue Value: Siliques
  misc_feature: MA Experiment 20001459 PARAMETER Experiment Name: At_50mM_NH4NO3_L-to-H_P Parameter: Treatment Value: 50mM NH4NO3 vs. 100mM Manitol
  misc_feature: MA Experiment ID: 20001555 Result: Up-regulated in Transcription
  misc_feature: MA Experiment 20001555 PARAMETER Experiment Name: At_Drought_Soil_Dry_P Parameter: Age (day) Value: 24
  misc_feature: MA Experiment 20001555 PARAMETER Experiment Name: At_Drought_Soil_Dry_P Parameter: Organism Value: A. thaliana
  misc_feature: MA Experiment 20001555 PARAMETER Experiment Name: At_Drought_Soil_Dry_P Parameter: Plant Line Value: WS
  misc_feature: MA Experiment 20001555 PARAMETER Experiment Name: At_Drought_Soil_Dry_P Parameter: Post Timepoint (hr) Value: None
  misc_feature: MA Experiment 20001555 PARAMETER Experiment Name: At_Drought_Soil_Dry_P Parameter: Post-Treatment Value: None
  misc_feature: MA Experiment 20001555 PARAMETER Experiment Name: At_Drought_Soil_Dry_P Parameter: Timepoint (day) Value: 10
  misc_feature: MA Experiment 20001555 PARAMETER Experiment Name: At_Drought_Soil_Dry_P Parameter: Treatment Value: Drought vs. No Drought
  misc_feature: MA Experiment ID: 20001560 Result: Down-regulated in Transcription
  misc_feature: MA Experiment 20001560 PARAMETER Experiment Name: At_Drought_Soil_Dry_P Parameter: Age (day) Value: 28
  misc_feature: MA Experiment 20001560 PARAMETER Experiment Name: At_Drought_Soil_Dry_P Parameter: Organism Value: A. thaliana
  misc_feature: MA Experiment 20001560 PARAMETER Experiment Name: At_Drought_Soil_Dry_P Parameter: Plant Line Value: WS
  misc_feature: MA Experiment 20001560 PARAMETER Experiment Name: At_Drought_Soil_Dry_P Parameter: Post Timepoint (hr) Value: None
  misc_feature: MA Experiment 20001560 PARAMETER Experiment Name: At_Drought_Soil_Dry_P Parameter: Post-Treatment Value: None
  misc_feature: MA Experiment 20001560 PARAMETER Experiment Name: At_Drought_Soil_Dry_P Parameter: Timepoint (day) Value: 14
  misc_feature: MA Experiment 20001560 PARAMETER Experiment Name: At_Drought_Soil_Dry_P Parameter: Treatment Value: Drought vs. No Drought
  misc_feature: MA Experiment ID: 20001911 Result: Down-regulated in Transcription
  misc_feature: MA Experiment 20001911 PARAMETER Experiment Name: At_Drought_Reproduction_P Parameter: Age (day) Value: 40
  misc_feature: MA Experiment 20001911 PARAMETER Experiment Name: At_Drought_Reproduction_P Parameter: Organism Value: A. thaliana
  misc_feature: MA Experiment 20001911 PARAMETER Experiment Name: At_Drought_Reproduction_P Parameter: Plant Line Value: WS
  misc_feature: MA Experiment 20001911 PARAMETER Experiment Name: At_Drought_Reproduction_P Parameter: Timepoint (day) Value: 10
  misc_feature: MA Experiment 20001911 PARAMETER Experiment Name: At_Drought_Reproduction_P Parameter: Tissue Value: Flowers
  misc_feature: MA Experiment 20001911 PARAMETER Experiment Name: At_Drought_Reproduction_P Parameter: Treatment Value: Drought vs. No Drought
aaaggaaggtgttaccggatttaggagagataaagaaggtttcttcatttagaaacagagacacgaagtttgcgatgatgatgatgattcagagaagaggaggtgagagacaagactcgtcggcggcggcgtacaacgttgtccataagttgcctcacggagacagtccttatgtccgagcgaagcatgttcagttggtggagaaagatgcagaagcagcgatagagttgttttggatagcgattaaagcgagagatagagttgatagtgctcttaaagacatggccttgttaatgaaacaacagaacagagctgaagaagccattgacgctattcaatcctttagagatctttgttcaagacaagctcaagagtcattagacaatgtcctcatcgatctatataagaaatgtgggagaatagaagagcaagttgagttattgaagcaaaagctttggatgatatatcaaggagaagcattcaatggcaaaccaacaaagactgcgagatctcatggcaagaagtttcaggtcaccgtcgagaaggaaacctctaggatcttggggaacttgggatgggcttatatgcaactaatggactatacagcagctgaagctgtgtatcggaaagctcaattgatagagccagatgcaaacaaggcttgcaatttatgcacatgtctcatcaagcaagggaagcacgatgaggcgaggtcgattctctttcgtgatgtactaatggagaacaaagaagggtctggtgatccgaggttgatggctcgggttcaagagctattgagtgagctaaagccacaggaagaagaagcagcggcttctgtgtctgtggaatgtgaagttggtatagatgagatagcggttgtcgaaggacttgatgagtttgtgaaggaatggaggaggccttataggacaagaagacttccgattttcgaagagatcttaccactgagagatcaattggcttgttgatgattctctgtgtgtttggattgatgtttgaatactgaataggaacctttttgggtagaagaatgtagtgagtgaatagagtttacctcttgtaagctttttcgggtgtcgttgtctgttattaccgcaatgtcaaatgatctcattcc

SEQ ID NO: 29387 - protein, 327 aa, Arabidopsis thaliana
  peptide (1)..(327): Ceres Seq. ID no. 12422075
  misc_feature (184)..(217): Pfam Name: TPR Domain Pfam Description: TPR Domain
  misc_feature (17)..(240): Homolog of NCBI NO: 15233432 NR Description: putative protein; protein id: At4g20900.1
  misc_feature (54)..(269): Homolog of NCBI NO: 29467532 NR Description: P0582D05.25 [Oryza sativa (japonica
  misc_feature (17)..(278): Homolog of NCBI NO: 4028970 NR Description: pollenless3 [Arabidopsis thaliana]
  misc_feature (17)..(278): Homolog of NCBI NO: 3859112 NR Description: male sterility MS5 [Arabidopsis thaliana]
  misc_feature (19)..(268): Homolog of NCBI NO: 15230439 NR Description: MS5-like protein; protein id: At3g51280.1
  misc_feature (44)..(327): Homolog of NCBI NO: 30695554 NR Description: male sterility MS5 family [Arabidopsis thaliana]
  misc_feature (44)..(327): Homolog of NCBI NO: 9758884 NR Description: gb|AAC72543.1~gene_id:K24G6.19~similar to unknown
  misc_feature (33)..(327): Homolog of NCBI NO: 3859116 NR Description: unknown [Oryza sativa]
  misc_feature (25)..(327): Homolog of NCBI NO: 30678993 NR Description: male sterility MS5 family [Arabidopsis thaliana]
  misc_feature (1)..(327): Homolog of NCBI NO: 25406811 NR Description: hypothetical protein [imported] - Arabidopsis
RKVLPDLGEIKKVSSFRNRDTKFAMMMMIQRRGGERQDSSAAAYNVVHKLPHGDSPYVRAKHVQLVEKDAEAAIELFWIAIKARDRVDSALKDMALLMKQQNRAEEAIDAIQSFRDLCSRQAQESLDNVLIDLYKKCGRIEEQVELLKQKLWMIYQGEAFNGKPTKTARSHGKKFQVTVEKETSRILGNLGWAYMQLMDYTAAEAVYRKAQLIEPDANKACNLCTCLIKQGKHDEARSILFRDVLMENKEGSGDPRLMARVQELLSELKPQEEEAAASVSVECEVGIDEIAVVEGLDEFVKEWRRPYRTRRLPIFEEILPLRDQLAC

SEQ ID NO: 29388 - protein, 303 aa, Arabidopsis thaliana
  peptide (1)..(303): Ceres Seq. ID no. 12422076
  misc_feature (160)..(193): Pfam Name: TPR Domain Pfam Description: TPR Domain
  misc_feature (1)..(216): Homolog of NCBI NO: 15233432 NR Description: putative protein; protein id: At4g20900.1
  misc_feature (30)..(245): Homolog of NCBI NO: 29467532 NR Description: P0582D05.25 [Oryza sativa (japonica
  misc_feature (1)..(254): Homolog of NCBI NO: 4028970 NR Description: pollenless3 [Arabidopsis thaliana]
  misc_feature (1)..(254): Homolog of NCBI NO: 3859112 NR Description: male sterility MS5 [Arabidopsis thaliana]
  misc_feature (1)..(244): Homolog of NCBI NO: 15230439 NR Description: MS5-like protein; protein id: At3g51280.1
  misc_feature (20)..(303): Homolog of NCBI NO: 30695554 NR Description: male sterility MS5 family [Arabidopsis thaliana]
  misc_feature (20)..(303): Homolog of NCBI NO: 9758884 NR Description: gb|AAC72543.1~gene_id:K24G6.19~similar to unknown
  misc_feature (9)..(303): Homolog of NCBI NO: 3859116 NR Description: unknown [Oryza sativa]
  misc_feature (1)..(303): Homolog of NCBI NO: 30678993 NR Description: male sterility MS5 family [Arabidopsis thaliana]
  misc_feature (1)..(303): Homolog of NCBI NO: 25406811 NR Description: hypothetical protein [imported] - Arabidopsis
MMMMIQRRGGERQDSSAAAYNVVHKLPHGDSPYVRAKHVQLVEKDAEAAIELFWIAIKARDRVDSALKDMALLMKQQNRAEEAIDAIQSFRDLCSRQAQESLDNVLIDLYKKCGRIEEQVELLKQKLWMIYQGEAFNGKPTKTARSHGKKFQVTVEKETSRILGNLGWAYMQLMDYTAAEAVYRKAQLIEPDANKACNLCTCLIKQGKHDEARSILFRDVLMENKEGSGDPRLMARVQELLSELKPQEEEAAASVSVECEVGIDEIAVVEGLDEFVKEWRRPYRTRRLPIFEEILPLRDQLAC

SEQ ID NO: 29389 - protein, 302 aa, Arabidopsis thaliana
  peptide (1)..(302): Ceres Seq. ID no. 12422077
  misc_feature (159)..(192): Pfam Name: TPR Domain Pfam Description: TPR Domain
  misc_feature (1)..(215): Homolog of NCBI NO: 15233432 NR Description: putative protein; protein id: At4g20900.1
  misc_feature (29)..(244): Homolog of NCBI NO: 29467532 NR Description: P0582D05.25 [Oryza sativa (japonica
  misc_feature (1)..(253): Homolog of NCBI NO: 4028970 NR Description: pollenless3 [Arabidopsis thaliana]
  misc_feature (1)..(253): Homolog of NCBI NO: 3859112 NR Description: male sterility MS5 [Arabidopsis thaliana]
  misc_feature (1)..(243): Homolog of NCBI NO: 15230439 NR Description: MS5-like protein; protein id: At3g51280.1
  misc_feature (19)..(302): Homolog of NCBI NO: 30695554 NR Description: male sterility MS5 family [Arabidopsis thaliana]
  misc_feature (19)..(302): Homolog of NCBI NO: 9758884 NR Description: gb|AAC72543.1~gene_id:K24G6.19~similar to unknown
  misc_feature (8)..(302): Homolog of NCBI NO: 3859116 NR Description: unknown [Oryza sativa]
  misc_feature (1)..(302): Homolog of NCBI NO: 30678993 NR Description: male sterility MS5 family [Arabidopsis thaliana]
  misc_feature (1)..(302): Homolog of NCBI NO: 25406811 NR Description: hypothetical protein [imported] - Arabidopsis
MMMIQRRGGERQDSSAAAYNVVHKLPHGDSPYVRAKHVQLVEKDAEAAIELFWIAIKARDRVDSALKDMALLMKQQNRAEEAIDAIQSFRDLCSRQAQESLDNVLIDLYKKCGRIEEQVELLKQKLWMIYQGEAFNGKPTKTARSHGKKFQVTVEKETSRILGNLGWAYMQLMDYTAAEAVYRKAQLIEPDANKACNLCTCLIKQGKHDEARSILFRDVLMENKEGSGDPRLMARVQELLSELKPQEEEAAASVSVECEVGIDEIAVVEGLDEFVKEWRRPYRTRRLPIFEEILPLRDQLAC

SEQ ID NO: 29390 - DNA, 942 bp, Arabidopsis thaliana
  misc_feature (1)..(942): Ceres Seq. ID no. 12384618
  misc_feature: MA Experiment ID: 108461 Result: Down-regulated in Transcription
  misc_feature: MA Experiment 108461 PARAMETER Experiment Name: At_Germinating_Seeds_cDNA_P Parameter: Age (day) Value: 1 vs. 0
  misc_feature: MA Experiment 108461 PARAMETER Experiment Name: At_Germinating_Seeds_cDNA_P Parameter: Tissue Value: Germinating Seeds
  misc_feature: MA Experiment ID: 108463 Result: Down-regulated in Transcription
  misc_feature: MA Experiment 108463 PARAMETER Experiment Name: At_Germinating_Seeds_cDNA_P Parameter: Age (day) Value: 3 vs. 0
  misc_feature: MA Experiment 108463 PARAMETER Experiment Name: At_Germinating_Seeds_cDNA_P Parameter: Tissue Value: Germinating Seeds
  misc_feature: MA Experiment ID: 108464 Result: Down-regulated in Transcription
  misc_feature: MA Experiment 108464 PARAMETER Experiment Name: At_Germinating_Seeds_cDNA_P Parameter: Age (day) Value: 4 vs. 0
  misc_feature: MA Experiment 108464 PARAMETER Experiment Name: At_Germinating_Seeds_cDNA_P Parameter: Tissue Value: Germinating Seeds
  misc_feature: MA Experiment ID: 108469 Result: Down-regulated in Transcription
  misc_feature: MA Experiment ID: 108488 Result: Down-regulated in Transcription
  misc_feature: MA Experiment ID: 108501 Result: Up-regulated in Transcription
  misc_feature: MA Experiment 108501 PARAMETER Experiment Name: At_ap2_floral_buds_cDNA_P Parameter: Plant Line Value: ap2 (Ler.)
  misc_feature: MA Experiment 108501 PARAMETER Experiment Name: At_ap2_floral_buds_cDNA_P Parameter: Tissue Value: Closed Flower
  misc_feature: MA Experiment ID: 108561 Result: Up-regulated in Transcription
  misc_feature: MA Experiment 108561 PARAMETER Experiment Name: At_100uM_ABA_cDNA_P Parameter: Timepoint (hr) Value: 6
  misc_feature: MA Experiment 108561 PARAMETER Experiment Name: At_100uM_ABA_cDNA_P Parameter: Tissue Value: Aerial
  misc_feature: MA Experiment 108561 PARAMETER Experiment Name: At_100uM_ABA_cDNA_P Parameter: Treatment Value: 100uM ABA vs. No Treatment
  misc_feature: MA Experiment ID: 108573 Result: Up-regulated in Transcription
  misc_feature: MA Experiment 108573 PARAMETER Experiment Name: At_Drought_cDNA_P Parameter: Timepoint (hr) Value: 6
  misc_feature: MA Experiment 108573 PARAMETER Experiment Name: At_Drought_cDNA_P Parameter: Tissue Value: Aerial
  misc_feature: MA Experiment 108573 PARAMETER Experiment Name: At_Drought_cDNA_P Parameter: Treatment Value: Drought vs. No Drought
  misc_feature: MA Experiment ID: 108595 Result: Up-regulated in Transcription
  misc_feature: MA Experiment 108595 PARAMETER Experiment Name: At_Ler-pi_Ovule_cDNA_P Parameter: Plant Line Value: null
  misc_feature: MA Experiment ID: 108605 Result: Up-regulated in Transcription
  misc_feature: MA Experiment 108605 PARAMETER Experiment Name: At_100uM_ABA_cDNA_P Parameter: Timepoint (hr) Value: 6
  misc_feature: MA Experiment 108605 PARAMETER Experiment Name: At_100uM_ABA_cDNA_P Parameter: Tissue Value: Aerial
  misc_feature: MA Experiment 108605 PARAMETER Experiment Name: At_100uM_ABA_cDNA_P Parameter: Treatment Value: 100uM ABA vs. No Treatment
  misc_feature: MA Experiment ID: 108607 Result: Up-regulated in Transcription
  misc_feature: MA Experiment 108607 PARAMETER Experiment Name: At_100uM_ABA_cDNA_P Parameter: Timepoint (hr) Value: 4
  misc_feature: MA Experiment 108607 PARAMETER Experiment Name: At_100uM_ABA_cDNA_P Parameter: Tissue Value: Aerial
  misc_feature: MA Experiment 108607 PARAMETER Experiment Name: At_100uM_ABA_cDNA_P Parameter: Treatment Value: 100uM ABA vs. No Treatment
  misc_feature: MA Experiment ID: 20000070 Result: Up-regulated in Transcription
  misc_feature: MA Experiment 20000070 PARAMETER Experiment Name: At_100uM_ABA_Mutants_cDNA_P Parameter: Plant Line Value: CS24
  misc_feature: MA Experiment 20000070 PARAMETER Experiment Name: At_100uM_ABA_Mutants_cDNA_P Parameter: Timepoint (hr) Value: 6
  misc_feature: MA Experiment 20000070 PARAMETER Experiment Name: At_100uM_ABA_Mutants_cDNA_P Parameter: Tissue Value: Aerial
  misc_feature: MA Experiment 20000070 PARAMETER Experiment Name: At_100uM_ABA_Mutants_cDNA_P Parameter: Treatment Value: 100uM ABA vs. No Treatment
  misc_feature: MA Experiment ID: 20000071 Result: Up-regulated in Transcription
  misc_feature: MA Experiment 20000071 PARAMETER Experiment Name: At_100uM_ABA_Mutants_cDNA_P Parameter: Plant Line Value: CS8104
  misc_feature: MA Experiment 20000071 PARAMETER Experiment Name: At_100uM_ABA_Mutants_cDNA_P Parameter: Timepoint (hr) Value: 6
  misc_feature: MA Experiment 20000071 PARAMETER Experiment Name: At_100uM_ABA_Mutants_cDNA_P Parameter: Tissue Value: Aerial
  misc_feature: MA Experiment 20000071 PARAMETER Experiment Name: At_100uM_ABA_Mutants_cDNA_P Parameter: Treatment Value: 100uM ABA vs. No Treatment
  misc_feature: MA Experiment ID: 20000072 Result: Up-regulated in Transcription
  misc_feature: MA Experiment 20000072 PARAMETER Experiment Name: At_100uM_ABA_Mutants_cDNA_P Parameter: Plant Line Value: CS8105
  misc_feature: MA Experiment 20000072 PARAMETER Experiment Name: At_100uM_ABA_Mutants_cDNA_P Parameter: Timepoint (hr) Value: 6
  misc_feature: MA Experiment 20000072 PARAMETER Experiment Name: At_100uM_ABA_Mutants_cDNA_P Parameter: Tissue Value: Aerial
  misc_feature: MA Experiment 20000072 PARAMETER Experiment Name: At_100uM_ABA_Mutants_cDNA_P Parameter: Treatment Value: 100uM ABA vs. No Treatment
  misc_feature: MA Experiment ID: 20000086 Result: Up-regulated in Transcription
  misc_feature: MA Experiment 20000086 PARAMETER Experiment Name: At_100uM_ABA_Mutants_cDNA_P Parameter: Plant Line Value: CS22
  misc_feature: MA Experiment 20000086 PARAMETER Experiment Name: At_100uM_ABA_Mutants_cDNA_P Parameter: Timepoint (hr) Value: 6
  misc_feature: MA Experiment 20000086 PARAMETER Experiment Name: At_100uM_ABA_Mutants_cDNA_P Parameter: Tissue Value: Aerial
  misc_feature: MA Experiment 20000086 PARAMETER Experiment Name: At_100uM_ABA_Mutants_cDNA_P Parameter: Treatment Value: 100uM ABA vs. No Treatment
  misc_feature: MA Experiment ID: 20000087 Result: Up-regulated in Transcription
  misc_feature: MA Experiment 20000087 PARAMETER Experiment Name: At_100uM_ABA_Mutants_cDNA_P Parameter: Plant Line Value: WS
  misc_feature: MA Experiment 20000087 PARAMETER Experiment Name: At_100uM_ABA_Mutants_cDNA_P Parameter: Timepoint (hr) Value: 6
  misc_feature: MA Experiment 20000087 PARAMETER Experiment Name: At_100uM_ABA_Mutants_cDNA_P Parameter: Tissue Value: Aerial
  misc_feature: MA Experiment 20000087 PARAMETER Experiment Name: At_100uM_ABA_Mutants_cDNA_P Parameter: Treatment Value: 100uM ABA vs. No Treatment
  misc_feature: MA Experiment ID: 20000117 Result: Up-regulated in Transcription
  misc_feature: MA Experiment 20000117 PARAMETER Experiment Name: At_100uM_ABA_Mutants_cDNA_P Parameter: Plant Line Value: Columbia
  misc_feature: MA Experiment 20000117 PARAMETER Experiment Name: At_100uM_ABA_Mutants_cDNA_P Parameter: Timepoint (hr) Value: 6
  misc_feature: MA Experiment 20000117 PARAMETER Experiment Name: At_100uM_ABA_Mutants_cDNA_P Parameter: Tissue Value: Aerial
  misc_feature: MA Experiment 20000117 PARAMETER Experiment Name: At_100uM_ABA_Mutants_cDNA_P Parameter: Treatment Value: 100uM ABA vs. No Treatment
  misc_feature: MA Experiment ID: 20000182 Result: Down-regulated in Transcription
  misc_feature: MA Experiment 20000182 PARAMETER Experiment Name: At_2mM_SA_P Parameter: Age (day) Value: 14
  misc_feature: MA Experiment 20000182 PARAMETER Experiment Name: At_2mM_SA_P Parameter: Organism Value: A. thaliana
  misc_feature: MA Experiment 20000182 PARAMETER Experiment Name: At_2mM_SA_P Parameter: Plant Line Value: WS
  misc_feature: MA Experiment 20000182 PARAMETER Experiment Name: At_2mM_SA_P Parameter: Timepoint (hr) Value: 6
  misc_feature: MA Experiment 20000182 PARAMETER Experiment Name: At_2mM_SA_P Parameter: Tissue Value: Aerial
  misc_feature: MA Experiment 20000182 PARAMETER Experiment Name: At_2mM_SA_P Parameter: Treatment Value: 2mM SA vs. No Treatment
  misc_feature: MA Experiment ID: 20000184 Result: Down-regulated in Transcription
  misc_feature: MA Experiment 20000184 PARAMETER Experiment Name: At_Shoots__P Parameter: Age (day) Value: 7
  misc_feature: MA Experiment 20000184 PARAMETER Experiment Name: At_Shoots__P Parameter: Tissue Value: Shoots vs. Whole Plant
  misc_feature: MA Experiment ID: 20000234 Result: Up-regulated in Transcription
  misc_feature: MA Experiment 20000234 PARAMETER Experiment Name: At_Siliques_P Parameter: Age (day) Value: 21
  misc_feature: MA Experiment 20000234 PARAMETER Experiment Name: At_Siliques_P Parameter: Organism Value: A. thaliana
  misc_feature: MA Experiment 20000234 PARAMETER Experiment Name: At_Siliques_P Parameter: Plant Line Value: WS
  misc_feature: MA Experiment 20000234 PARAMETER Experiment Name: At_Siliques_P Parameter: Tissue Value: Less Than 5mm Siliques vs. Whole Plant
  misc_feature: MA Experiment ID: 20000235 Result: Up-regulated in Transcription
  misc_feature: MA Experiment 20000235 PARAMETER Experiment Name: At_Siliques_P Parameter: Age (day) Value: 21
  misc_feature: MA Experiment 20000235 PARAMETER Experiment Name: At_Siliques_P Parameter: Organism Value: A. thaliana
  misc_feature: MA Experiment 20000235 PARAMETER Experiment Name: At_Siliques_P Parameter: Plant Line Value: WS
  misc_feature: MA Experiment 20000235 PARAMETER Experiment Name: At_Siliques_P Parameter: Tissue Value: 5-10mm Siliques vs. Whole Plant
  misc_feature: MA Experiment ID: 20000264 Result: Up-regulated in Transcription
  misc_feature: MA Experiment 20000264 PARAMETER Experiment Name: At_Open_Flower_P Parameter: Age (day) Value: 21
  misc_feature: MA Experiment 20000264 PARAMETER Experiment Name: At_Open_Flower_P Parameter: Plant Line Value: WS
  misc_feature: MA Experiment 20000264 PARAMETER Experiment Name: At_Open_Flower_P Parameter: Tissue Value: Open Flower vs. Whole Plant
  misc_feature: MA Experiment ID: 20000267 Result: Up-regulated in Transcription
  misc_feature: MA Experiment 20000267 PARAMETER Experiment Name: At_Drought_P Parameter: Age (day) Value: 7
  misc_feature: MA Experiment 20000267 PARAMETER Experiment Name: At_Drought_P Parameter: Organism Value: A. thaliana
  misc_feature: MA Experiment 20000267 PARAMETER Experiment Name: At_Drought_P Parameter: Plant Line Value: WS
  misc_feature: MA Experiment 20000267 PARAMETER Experiment Name: At_Drought_P Parameter: Timepoint (hr) Value: 6
  misc_feature: MA Experiment 20000267 PARAMETER Experiment Name: At_Drought_P Parameter: Tissue Value: Whole Plant
  misc_feature: MA Experiment 20000267 PARAMETER Experiment Name: At_Drought_P Parameter: Treatment Value: Drought vs. No Drought
  misc_feature: MA Experiment ID: 20000268 Result: Up-regulated in Transcription
  misc_feature: MA Experiment 20000268 PARAMETER Experiment Name: At_100mM_NaCl__P Parameter: Age (day) Value: 14
  misc_feature: MA Experiment 20000268 PARAMETER Experiment Name: At_100mM_NaCl__P Parameter: Organism Value: A. thaliana
  misc_feature: MA Experiment 20000268 PARAMETER Experiment Name: At_100mM_NaCl__P Parameter: Plant Line Value: WS
  misc_feature: MA Experiment 20000268 PARAMETER Experiment Name: At_100mM_NaCl__P Parameter: Timepoint (hr) Value: 6
  misc_feature: MA Experiment 20000268 PARAMETER Experiment Name: At_100mM_NaCl__P Parameter: Tissue Value: Whole Plant
  misc_feature: MA Experiment 20000268 PARAMETER Experiment Name: At_100mM_NaCl__P Parameter: Treatment Value: 100mM NaCl vs. No Treatment
  misc_feature: MA Experiment ID: 20000308 Result: Up-regulated in Transcription
  misc_feature: MA Experiment 20000308 PARAMETER Experiment Name: At_100mM_NaCl__P Parameter: Age (day) Value: 17
  misc_feature: MA Experiment 20000308 PARAMETER Experiment Name: At_100mM_NaCl__P Parameter: Organism Value: A. thaliana
  misc_feature: MA Experiment 20000308 PARAMETER Experiment Name: At_100mM_NaCl__P Parameter: Plant Line Value: WS
  misc_feature: MA Experiment 20000308 PARAMETER Experiment Name: At_100mM_NaCl__P Parameter: Timepoint (hr) Value: 72
  misc_feature: MA Experiment 20000308 PARAMETER Experiment Name: At_100mM_NaCl__P Parameter: Tissue Value: Whole Plant
  misc_feature: MA Experiment 20000308 PARAMETER Experiment Name: At_100mM_NaCl__P Parameter: Treatment Value: 100mM NaCl vs. No Treatment
  misc_feature: MA Experiment ID: 20000436 Result: Up-regulated in Transcription
  misc_feature: MA Experiment 20000436 PARAMETER Experiment Name: At_Drought_P Parameter: Age (day) Value: 7
  misc_feature: MA Experiment 20000436 PARAMETER Experiment Name: At_Drought_P Parameter: Organism Value: A. thaliana
  misc_feature: MA Experiment 20000436 PARAMETER Experiment Name: At_Drought_P Parameter: Plant Line Value: WS
  misc_feature: MA Experiment 20000436 PARAMETER Experiment Name: At_Drought_P Parameter: Timepoint (hr) Value: 12
  misc_feature: MA Experiment 20000436 PARAMETER Experiment Name: At_Drought_P Parameter: Tissue Value: Whole Plant
  misc_feature: MA Experiment 20000436 PARAMETER Experiment Name: At_Drought_P Parameter: Treatment Value: Drought vs. No Drought
  misc_feature: MA Experiment ID: 20000437 Result: Up-regulated in Transcription
  misc_feature: MA Experiment 20000437 PARAMETER Experiment Name: At_Drought_P Parameter: Age (day) Value: 8
  misc_feature: MA Experiment 20000437 PARAMETER Experiment Name: At_Drought_P Parameter: Organism Value: A. thaliana
  misc_feature: MA Experiment 20000437 PARAMETER Experiment Name: At_Drought_P Parameter: Plant Line Value: WS
  misc_feature: MA Experiment 20000437 PARAMETER Experiment Name: At_Drought_P Parameter: Timepoint (hr) Value: 24
  misc_feature: MA Experiment 20000437 PARAMETER Experiment Name: At_Drought_P Parameter: Tissue Value: Whole Plant
  misc_feature: MA Experiment 20000437 PARAMETER Experiment Name: At_Drought_P Parameter: Treatment Value: Drought vs. No Drought
  misc_feature: MA Experiment ID: 20000438 Result: Down-regulated in Transcription
  misc_feature: MA Experiment 20000438 PARAMETER Experiment Name: At_Shoots__P Parameter: Age (day) Value: 14
  misc_feature: MA Experiment 20000438 PARAMETER Experiment Name: At_Shoots__P Parameter: Tissue Value: Shoots vs. Whole Plant
  misc_feature: MA Experiment ID: 20000441 Result: Up-regulated in Transcription
  misc_feature: MA Experiment 20000441 PARAMETER Experiment Name: At_1uM_BR-BRZ__P Parameter: Tissue Value: Shoot Apices
  misc_feature: MA Experiment 20000441 PARAMETER Experiment Name: At_1uM_BR-BRZ__P Parameter: Treatment Value: 1uM BR vs. No Treatment
  misc_feature: MA Experiment ID: 20000443 Result: Up-regulated in Transcription
  misc_feature: MA Experiment 20000443 PARAMETER Experiment Name: At_1uM_BR-BRZ__P Parameter: Tissue Value: Shoot Apices
  misc_feature: MA Experiment 20000443 PARAMETER Experiment Name: At_1uM_BR-BRZ__P Parameter: Treatment Value: 1uM BRZ vs. No Treatment
  misc_feature: MA Experiment ID: 20000453 Result: Up-regulated in Transcription
  misc_feature: MA Experiment 20000453 PARAMETER Experiment Name: At_100uM_ABA_P Parameter: Age (day) Value: 15
  misc_feature: MA Experiment 20000453 PARAMETER Experiment Name: At_100uM_ABA_P Parameter: Organism Value: A. thaliana
  misc_feature: MA Experiment 20000453 PARAMETER Experiment Name: At_100uM_ABA_P Parameter: Plant Line Value: WS
  misc_feature: MA Experiment 20000453 PARAMETER Experiment Name: At_100uM_ABA_P Parameter: Timepoint (hr) Value: 24
  misc_feature: MA Experiment 20000453 PARAMETER Experiment Name: At_100uM_ABA_P Parameter: Tissue Value: Aerial
  misc_feature: MA Experiment 20000453 PARAMETER Experiment Name: At_100uM_ABA_P Parameter: Treatment Value: 100uM ABA vs. No Treatment
  misc_feature: MA Experiment ID: 20000495 Result: Up-regulated in Transcription
  misc_feature: MA Experiment 20000495 PARAMETER Experiment Name: At_Guard_Cells_P Parameter: Harvest Date Value: 8/2/2002
  misc_feature: MA Experiment 20000495 PARAMETER Experiment Name: At_Guard_Cells_P Parameter: Organism Value: A. thaliana
  misc_feature: MA Experiment 20000495 PARAMETER Experiment Name: At_Guard_Cells_P Parameter: Tissue Value: Guard Cells vs. Leaves
  misc_feature: MA Experiment ID: 20000794 Result: Up-regulated in Transcription
  misc_feature: MA Experiment 20000794 PARAMETER Experiment Name: At_Petals_P Parameter: Age (day) Value: 23-25 days
  misc_feature: MA Experiment 20000794 PARAMETER Experiment Name: At_Petals_P Parameter: Plant Line Value: WS
  misc_feature: MA Experiment 20000794 PARAMETER Experiment Name: At_Petals_P Parameter: Tissue Value: Petals vs. Whole plant
  misc_feature: MA Experiment ID: 20001504 Result: Up-regulated in Transcription
  misc_feature: MA Experiment 20001504 PARAMETER Experiment Name: At_Far-red-enriched_P Parameter: Age (day) Value: 10
  misc_feature: MA Experiment 20001504 PARAMETER Experiment Name: At_Far-red-enriched_P Parameter: Light Value: Far-red enriched vs. White
  misc_feature: MA Experiment 20001504 PARAMETER Experiment Name: At_Far-red-enriched_P Parameter: Organism Value: A. thaliana
  misc_feature: MA Experiment 20001504 PARAMETER Experiment Name: At_Far-red-enriched_P Parameter: Plant Line Value: Columbia
  misc_feature: MA Experiment 20001504 PARAMETER Experiment Name: At_Far-red-enriched_P Parameter: Timepoint (day) Value: 6
  misc_feature: MA Experiment 20001504 PARAMETER Experiment Name: At_Far-red-enriched_P Parameter: Tissue Value: Whole Plant
  misc_feature: MA Experiment ID: 20001554 Result: Up-regulated in Transcription
  misc_feature: MA Experiment 20001554 PARAMETER Experiment Name: At_Drought_Soil_Dry_P Parameter: Age (day) Value: 21
  misc_feature: MA Experiment 20001554 PARAMETER Experiment Name: At_Drought_Soil_Dry_P Parameter: Organism Value: A. thaliana
  misc_feature: MA Experiment 20001554 PARAMETER Experiment Name: At_Drought_Soil_Dry_P Parameter: Plant Line Value: WS
  misc_feature: MA Experiment 20001554 PARAMETER Experiment Name: At_Drought_Soil_Dry_P Parameter: Post Timepoint (hr) Value: None
  misc_feature: MA Experiment 20001554 PARAMETER Experiment Name: At_Drought_Soil_Dry_P Parameter: Post-Treatment Value: None
  misc_feature: MA Experiment 20001554 PARAMETER Experiment Name: At_Drought_Soil_Dry_P Parameter: Timepoint (day) Value: 7
  misc_feature: MA Experiment 20001554 PARAMETER Experiment Name: At_Drought_Soil_Dry_P Parameter: Treatment Value: Drought vs. No Drought
  misc_feature: MA Experiment ID: 20001555 Result: Up-regulated in Transcription
  misc_feature: MA Experiment 20001555 PARAMETER Experiment Name: At_Drought_Soil_Dry_P Parameter: Age (day) Value: 24
  misc_feature: MA Experiment 20001555 PARAMETER Experiment Name: At_Drought_Soil_Dry_P Parameter: Organism Value: A. thaliana
  misc_feature: MA Experiment 20001555 PARAMETER Experiment Name: At_Drought_Soil_Dry_P Parameter: Plant Line Value: WS
  misc_feature: MA Experiment 20001555 PARAMETER Experiment Name: At_Drought_Soil_Dry_P Parameter: Post Timepoint (hr) Value: None
  misc_feature: MA Experiment 20001555 PARAMETER Experiment Name: At_Drought_Soil_Dry_P Parameter: Post-Treatment Value: None
  misc_feature: MA Experiment 20001555 PARAMETER Experiment Name: At_Drought_Soil_Dry_P Parameter: Timepoint (day) Value: 10
  misc_feature: MA Experiment 20001555 PARAMETER Experiment Name: At_Drought_Soil_Dry_P Parameter: Treatment Value: Drought vs. No Drought
  misc_feature: MA Experiment ID: 20001556 Result: Up-regulated in Transcription
  misc_feature: MA Experiment 20001556 PARAMETER Experiment Name: At_Drought_Soil_Dry_P Parameter: Age (day) Value: 26
  misc_feature: MA Experiment 20001556 PARAMETER Experiment Name: At_Drought_Soil_Dry_P Parameter: Organism Value: A. thaliana
  misc_feature: MA Experiment 20001556 PARAMETER Experiment Name: At_Drought_Soil_Dry_P Parameter: Plant Line Value: WS
  misc_feature: MA Experiment 20001556 PARAMETER Experiment Name: At_Drought_Soil_Dry_P Parameter: Post Timepoint (hr) Value: None
  misc_feature: MA Experiment 20001556 PARAMETER Experiment Name: At_Drought_Soil_Dry_P Parameter: Post-Treatment Value: None
  misc_feature: MA Experiment 20001556 PARAMETER Experiment Name: At_Drought_Soil_Dry_P Parameter: Timepoint (day) Value: 12
  misc_feature: MA Experiment 20001556 PARAMETER Experiment Name: At_Drought_Soil_Dry_P Parameter: Treatment Value: Drought vs. No Drought
  misc_feature: MA Experiment ID: 20001560 Result: Up-regulated in Transcription
  misc_feature: MA Experiment 20001560 PARAMETER Experiment Name: At_Drought_Soil_Dry_P Parameter: Age (day) Value: 28
  misc_feature: MA Experiment 20001560 PARAMETER Experiment Name: At_Drought_Soil_Dry_P Parameter: Organism Value: A. thaliana
  misc_feature: MA Experiment 20001560 PARAMETER Experiment Name: At_Drought_Soil_Dry_P Parameter: Plant Line Value: WS
  misc_feature: MA Experiment 20001560 PARAMETER Experiment Name: At_Drought_Soil_Dry_P Parameter: Post Timepoint (hr) Value: None
  misc_feature: MA Experiment 20001560 PARAMETER Experiment Name: At_Drought_Soil_Dry_P Parameter: Post-Treatment Value: None
  misc_feature: MA Experiment 20001560 PARAMETER Experiment Name: At_Drought_Soil_Dry_P Parameter: Timepoint (day) Value: 14
  misc_feature: MA Experiment 20001560 PARAMETER Experiment Name: At_Drought_Soil_Dry_P Parameter: Treatment Value: Drought vs. No Drought
  misc_feature: MA Experiment ID: 20001757 Result: Down-regulated in Transcription
  misc_feature: MA Experiment 20001757 PARAMETER Experiment Name: At_50mM_NH4NO3_L-to-H_P Parameter: Timepoint (hr) Value: 6
  misc_feature: MA Experiment 20001757 PARAMETER Experiment Name: At_50mM_NH4NO3_L-to-H_P Parameter: Tissue Value: Leaf
  misc_feature: MA Experiment 20001757 PARAMETER Experiment Name: At_50mM_NH4NO3_L-to-H_P Parameter: Treatment Value: 50mM NH4NO3 vs 100mM Mannitol
  misc_feature: MA Experiment ID: 20001770 Result: Up-regulated in Transcription
  misc_feature: MA Experiment 20001770 PARAMETER Experiment Name: At_Far-red-enriched-adult_P Parameter: Age (day) Value: 28
  misc_feature: MA Experiment 20001770 PARAMETER Experiment Name: At_Far-red-enriched-adult_P Parameter: Light Value: Far-red enriched vs. White
  misc_feature: MA Experiment 20001770 PARAMETER Experiment Name: At_Far-red-enriched-adult_P Parameter: Organism Value: A. thaliana
  misc_feature: MA Experiment 20001770 PARAMETER Experiment Name: At_Far-red-enriched-adult_P Parameter: Plant Line Value: Columbia
  misc_feature: MA Experiment 20001770 PARAMETER Experiment Name: At_Far-red-enriched-adult_P Parameter: Timepoint (hr) Value: 8
  misc_feature: MA Experiment 20001770 PARAMETER Experiment Name: At_Far-red-enriched-adult_P Parameter: Tissue Value: Aerial
  misc_feature: MA Experiment ID: 20001904 Result: Up-regulated in Transcription
  misc_feature: MA Experiment 20001904 PARAMETER Experiment Name: At_Drought_Reproduction_P Parameter: Age (day) Value: 37
  misc_feature: MA Experiment 20001904 PARAMETER Experiment Name: At_Drought_Reproduction_P Parameter: Organism Value: A. thaliana
  misc_feature: MA Experiment 20001904 PARAMETER Experiment Name: At_Drought_Reproduction_P Parameter: Plant Line Value: WS
  misc_feature: MA Experiment 20001904 PARAMETER Experiment Name: At_Drought_Reproduction_P Parameter: Timepoint (day) Value: 7
  misc_feature: MA Experiment 20001904 PARAMETER Experiment Name: At_Drought_Reproduction_P Parameter: Tissue Value: Rosettes
  misc_feature: MA Experiment 20001904 PARAMETER Experiment Name: At_Drought_Reproduction_P Parameter: Treatment Value: Drought vs. No Drought
  misc_feature: MA Experiment ID: 20001906 Result: Up-regulated in Transcription
  misc_feature: MA Experiment 20001906 PARAMETER Experiment Name: At_Drought_Reproduction_P Parameter: Age (day) Value: 35
  misc_feature: MA Experiment 20001906 PARAMETER Experiment Name: At_Drought_Reproduction_P Parameter: Organism Value: A. thaliana
  misc_feature: MA Experiment 20001906 PARAMETER Experiment Name: At_Drought_Reproduction_P Parameter: Plant Line Value: WS
  misc_feature: MA Experiment 20001906 PARAMETER Experiment Name: At_Drought_Reproduction_P Parameter: Timepoint (day) Value: 5
  misc_feature: MA Experiment 20001906 PARAMETER Experiment Name: At_Drought_Reproduction_P Parameter: Tissue Value: Siliques
  misc_feature: MA Experiment 20001906 PARAMETER Experiment Name: At_Drought_Reproduction_P Parameter: Treatment Value: Drought vs. No Drought
  misc_feature: MA Experiment ID: 20001908 Result: Up-regulated in Transcription
  misc_feature: MA Experiment 20001908 PARAMETER Experiment Name: At_Drought_Reproduction_P Parameter: Age (day) Value: 40
  misc_feature: MA Experiment 20001908 PARAMETER Experiment Name: At_Drought_Reproduction_P Parameter: Organism Value: A. thaliana
  misc_feature: MA Experiment 20001908 PARAMETER Experiment Name: At_Drought_Reproduction_P Parameter: Plant Line Value: WS
  misc_feature: MA Experiment 20001908 PARAMETER Experiment Name: At_Drought_Reproduction_P Parameter: Timepoint (day) Value: 10
  misc_feature: MA Experiment 20001908 PARAMETER Experiment Name: At_Drought_Reproduction_P Parameter: Tissue Value: Siliques
  misc_feature: MA Experiment 20001908 PARAMETER Experiment Name: At_Drought_Reproduction_P Parameter: Treatment Value: Drought vs. No Drought
  misc_feature: MA Experiment ID: 20001910 Result: Up-regulated in Transcription
  misc_feature: MA Experiment 20001910 PARAMETER Experiment Name: At_Drought_Reproduction_P Parameter: Age (day) Value: 37
  misc_feature: MA Experiment 20001910 PARAMETER Experiment Name: At_Drought_Reproduction_P Parameter: Organism Value: A. thaliana
  misc_feature: MA Experiment 20001910 PARAMETER Experiment Name: At_Drought_Reproduction_P Parameter: Plant Line Value: WS
  misc_feature: MA Experiment 20001910 PARAMETER Experiment Name: At_Drought_Reproduction_P Parameter: Timepoint (day) Value: 7
  misc_feature: MA Experiment 20001910 PARAMETER Experiment Name: At_Drought_Reproduction_P Parameter: Tissue Value: Flowers
  misc_feature: MA Experiment 20001910 PARAMETER Experiment Name: At_Drought_Reproduction_P Parameter: Treatment Value: Drought vs. No Drought
  misc_feature: MA Experiment ID: 20001911 Result: Up-regulated in Transcription
  misc_feature: MA Experiment 20001911 PARAMETER Experiment Name: At_Drought_Reproduction_P Parameter: Age (day) Value: 40
  misc_feature: MA Experiment 20001911 PARAMETER Experiment Name: At_Drought_Reproduction_P Parameter: Organism Value: A. thaliana
  misc_feature: MA Experiment 20001911 PARAMETER Experiment Name: At_Drought_Reproduction_P Parameter: Plant Line Value: WS
  misc_feature: MA Experiment 20001911 PARAMETER Experiment Name: At_Drought_Reproduction_P Parameter: Timepoint (day) Value: 10
  misc_feature: MA Experiment 20001911 PARAMETER Experiment Name: At_Drought_Reproduction_P Parameter: Tissue Value: Flowers
  misc_feature: MA Experiment 20001911 PARAMETER Experiment Name: At_Drought_Reproduction_P Parameter: Treatment Value: Drought vs. No Drought
ttacttttttttcttcttttcttgacgtgtctttataatttttttgcaggatgtaattgaggagcttgggatatactttgtgttctacgatagagcaggatatggagaaagtgatccacacccatcacgcactgttaagagtgaagcatacgacattcaagaactcgccgataaactcatatcggaccaaagttctacgttcttggtatatcactcggtgcttactcggtttatagttgcctcaaatacattccccacagactagctggagcagtcttaatggttccatttgtgaactattggtggactaaagtgcctcaagaaaaattgagtaaagcgttggagctaatgccaaagaaagaccaatggacgtttaaagtggctcattatgttccgtggttgttatattggtggttgacccaaaaactatttccgtcttcgagtatgatcacggggaacagtgcgttatgcagcgacaaagatttggtcgtcataaagaagaaaatggagaatccacgccctggctttgggaaaaagttagacaacaaggtgaccatgaatgtcttcaccgggacatgatagccggattcgcgacatgggaattcgacccgactgaattagaaaatccgtttgcggaaggcgaaggatcggtccacgtttggcaagggatggaagacagaatcattccatacgaaattaatcgatatatatcagagaagcttccatggattaagtaccatgaggtcttaggttatggacatcttctaaacgccgaggaggagaaatgcaaagacattatcaaggcacttcttgtcaactgatgatcatctctacacaagatgccacaaaaaaatatagcatatttaatagattttattttttatttatggattataatattatagcatattataagtttgtaagtaagatgaaaaccacttg

SEQ ID NO: 29391 - protein, 117 aa, Arabidopsis thaliana
  peptide (1)..(117): Ceres Seq. ID no. 12384619
  misc_feature (23)..(112): Pfam Name: alpha/beta hydrolase fold Pfam Description: alpha/beta hydrolase fold
  misc_feature (19)..(113): Homolog of NCBI NO: 15228496 NR Description: hypothetical protein; protein id: At3g03230.1
  misc_feature (18)..(115): Homolog of NCBI NO: 21592662 NR Description: unknown [Arabidopsis thaliana]
  misc_feature (18)..(115): Homolog of NCBI NO: 18410582 NR Description: expressed protein
  misc_feature (14)..(117): Homolog of NCBI NO: 18410575 NR Description: expressed protein
  misc_feature (23)..(117): Homolog of NCBI NO: 28416665 NR Description: At2g36290 [Arabidopsis thaliana]
  misc_feature (19)..(113): Homolog of NCBI NO: 6714434 NR Description: hypothetical protein [Arabidopsis thaliana]
  misc_feature (23)..(117): Homolog of NCBI NO: 18404095 NR Description: expressed protein
  misc_feature (14)..(117): Homolog of NCBI NO: 21537089 NR Description: unknown [Arabidopsis thaliana]
  misc_feature (19)..(113): Homolog of NCBI NO: 30678800 NR Description: esterase/lipase/thioesterase family [Arabidopsis
  misc_feature (8)..(117): Homolog of NCBI NO: 15242253 NR Description: putative protein
MQRQRFGRHKEENGESTPWLWEKVRQQGDHECLHRDMIAGFATWEFDPTELENPFAEGEGSVHVWQGMEDRIIPYEINRYISEKLPWIKYHEVLGYGHLLNAEEEKCKDIIKALLVN

SEQ ID NO: 29392 - protein, 99 aa, Arabidopsis thaliana
  peptide (1)..(99): Ceres Seq. ID no. 12384620
  misc_feature (1)..(74): Pfam Name: alpha/beta hydrolase fold Pfam Description: alpha/beta hydrolase fold
  misc_feature (1)..(54): Homolog of NCBI NO: 15228496 NR Description: hypothetical protein; protein id: At3g03230.1
  misc_feature (1)..(81): Homolog of NCBI NO: 21592662 NR Description: unknown [Arabidopsis thaliana]
  misc_feature (1)..(81): Homolog of NCBI NO: 18410582 NR Description: expressed protein
  misc_feature (1)..(81): Homolog of NCBI NO: 18410575 NR Description: expressed protein
  misc_feature (1)..(51): Homolog of NCBI NO: 6714434 NR Description: hypothetical protein [Arabidopsis thaliana]
  misc_feature (1)..(70): Homolog of NCBI NO: 28416665 NR Description: At2g36290 [Arabidopsis thaliana]
  misc_feature (1)..(74): Homolog of NCBI NO: 18404095 NR Description: expressed protein
  misc_feature (1)..(81): Homolog of NCBI NO: 21537089 NR Description: unknown [Arabidopsis thaliana]
  misc_feature (1)..(51): Homolog of NCBI NO: 30678800 NR Description: esterase/lipase/thioesterase family [Arabidopsis
  misc_feature (1)..(85): Homolog of NCBI NO: 15242253 NR Description: putative protein
MVPFVNYWWTKVPQEKLSKALELMPKKDQWTFKVAHYVPWLLYWWLTQKLFPSSSMITGNSALCSDKDLVVIKKKMENPRPGFGKKLDNKVTMNVFTGT

SEQ ID NO: 29393 - protein, 81 aa, Arabidopsis thaliana
  peptide (1)..(81): Ceres Seq. ID no. 12384621
  misc_feature (1)..(76): Pfam Name: alpha/beta hydrolase fold Pfam Description: alpha/beta hydrolase fold
  misc_feature (1)..(77): Homolog of NCBI NO: 15228496 NR Description: hypothetical protein; protein id: At3g03230.1
  misc_feature (1)..(79): Homolog of NCBI NO: 21592662 NR Description: unknown [Arabidopsis thaliana]
  misc_feature (1)..(79): Homolog of NCBI NO: 18410582 NR Description: expressed protein
  misc_feature (1)..(81): Homolog of NCBI NO: 18410575 NR Description: expressed protein
  misc_feature (1)..(81): Homolog of NCBI NO: 28416665 NR Description: At2g36290 [Arabidopsis thaliana]
  misc_feature (1)..(77): Homolog of NCBI NO: 6714434 NR Description: hypothetical protein [Arabidopsis thaliana]
  misc_feature (1)..(81): Homolog of NCBI NO: 18404095 NR Description: expressed protein
  misc_feature (1)..(81): Homolog of NCBI NO: 21537089 NR Description: unknown [Arabidopsis thaliana]
  misc_feature (1)..(77): Homolog of NCBI NO: 30678800 NR Description: esterase/lipase/thioesterase family [Arabidopsis
  misc_feature (1)..(81): Homolog of NCBI NO: 15242253 NR Description: putative protein
MIAGFATWEFDPTELENPFAEGEGSVHVWQGMEDRIIPYEINRYISEKLPWIKYHEVLGYGHLLNAEEEKCKDIIKALLVN

SEQ ID NO: 29394 - DNA, 1416 bp, Arabidopsis thaliana; identical to SEQ ID NO: 28614
  misc_feature (1)..(1416): Ceres Seq. ID no. 13487514
  misc_feature: MA Experiment ID: 108461 Result: Up-regulated in Transcription
  misc_feature: MA Experiment 108461 PARAMETER Experiment Name: At_Germinating_Seeds_cDNA_P Parameter: Age (day) Value: 1 vs. 0
  misc_feature: MA Experiment 108461 PARAMETER Experiment Name: At_Germinating_Seeds_cDNA_P Parameter: Tissue Value: Germinating Seeds
  misc_feature: MA Experiment ID: 108462 Result: Up-regulated in Transcription
  misc_feature: MA Experiment 108462 PARAMETER Experiment Name: At_Germinating_Seeds_cDNA_P Parameter: Age (day) Value: 2 vs. 0
  misc_feature: MA Experiment 108462 PARAMETER Experiment Name: At_Germinating_Seeds_cDNA_P Parameter: Tissue Value: Germinating Seeds
  misc_feature: MA Experiment ID: 108577 Result: Down-regulated in Transcription
  misc_feature: MA Experiment 108577 PARAMETER Experiment Name: At_42deg_Heat_cDNA_P Parameter: Temperature (deg C) Value: 42 vs. 22
  misc_feature: MA Experiment 108577 PARAMETER Experiment Name: At_42deg_Heat_cDNA_P Parameter: Timepoint (hr) Value: 6
  misc_feature: MA Experiment 108577 PARAMETER Experiment Name: At_42deg_Heat_cDNA_P Parameter: Tissue Value: Aerial
  misc_feature: MA Experiment ID: 108585 Result: Up-regulated in Transcription
  misc_feature: MA Experiment 108585 PARAMETER Experiment Name: At_5mM_NaNP_cDNA_P Parameter: Timepoint (hr) Value: 6
  misc_feature: MA Experiment 108585 PARAMETER Experiment Name: At_5mM_NaNP_cDNA_P Parameter: Tissue Value: Aerial
  misc_feature: MA Experiment 108585 PARAMETER Experiment Name: At_5mM_NaNP_cDNA_P Parameter: Treatment Value: null
  misc_feature: MA Experiment ID: 20000087 Result: Up-regulated in Transcription
  misc_feature: MA Experiment 20000087 PARAMETER Experiment Name: At_100uM_ABA_Mutants_cDNA_P Parameter: Plant Line Value: WS
  misc_feature: MA Experiment 20000087 PARAMETER Experiment Name: At_100uM_ABA_Mutants_cDNA_P Parameter: Timepoint (hr) Value: 6
  misc_feature: MA Experiment 20000087 PARAMETER Experiment Name: At_100uM_ABA_Mutants_cDNA_P Parameter: Tissue Value: Aerial
  misc_feature: MA Experiment 20000087 PARAMETER Experiment Name: At_100uM_ABA_Mutants_cDNA_P Parameter: Treatment Value: 100uM ABA vs. No Treatment
  misc_feature: MA Experiment ID: 20000093 Result: Down-regulated in Transcription
  misc_feature: MA Experiment 20000093 PARAMETER Experiment Name: At_42deg_Heat_cDNA_P Parameter: Temperature (deg C) Value: 42 vs. 22
  misc_feature: MA Experiment 20000093 PARAMETER Experiment Name: At_42deg_Heat_cDNA_P Parameter: Timepoint (hr) Value: 0.5
  misc_feature: MA Experiment 20000093 PARAMETER Experiment Name: At_42deg_Heat_cDNA_P Parameter: Tissue Value: Aerial
  misc_feature: MA Experiment ID: 20000111 Result: Down-regulated in Transcription
  misc_feature: MA Experiment 20000111 PARAMETER Experiment Name: At_42deg_Heat_cDNA_P Parameter: Temperature (deg C) Value: 42 vs. 22
  misc_feature: MA Experiment 20000111 PARAMETER Experiment Name: At_42deg_Heat_cDNA_P Parameter: Timepoint (hr) Value: 6
  misc_feature: MA Experiment 20000111 PARAMETER Experiment Name: At_42deg_Heat_cDNA_P Parameter: Tissue Value: Aerial
  misc_feature: MA Experiment ID: 20000112 Result: Down-regulated in Transcription
  misc_feature: MA Experiment 20000112 PARAMETER Experiment Name: At_42deg_Heat_cDNA_P Parameter: Temperature (deg C) Value: 42 vs. 22
  misc_feature: MA Experiment 20000112 PARAMETER Experiment Name: At_42deg_Heat_cDNA_P Parameter: Timepoint (hr) Value: 2
  misc_feature: MA Experiment 20000112 PARAMETER Experiment Name: At_42deg_Heat_cDNA_P Parameter: Tissue Value: Aerial
  misc_feature: MA Experiment ID: 20000113 Result: Down-regulated in Transcription
  misc_feature: MA Experiment 20000113 PARAMETER Experiment Name: At_42deg_Heat_cDNA_P Parameter: Temperature (deg C) Value: 42 vs. 22
  misc_feature: MA Experiment 20000113 PARAMETER Experiment Name: At_42deg_Heat_cDNA_P Parameter: Timepoint (hr) Value: 8
  misc_feature: MA Experiment 20000113 PARAMETER Experiment Name: At_42deg_Heat_cDNA_P Parameter: Tissue Value: Aerial
  misc_feature: MA Experiment ID: 20000144 Result: Down-regulated in Transcription
  misc_feature: MA Experiment 20000144 PARAMETER Experiment Name: At_42deg_Heat_cDNA_P Parameter: Temperature (deg C) Value: 42 vs. 22
  misc_feature: MA Experiment 20000144 PARAMETER Experiment Name: At_42deg_Heat_cDNA_P Parameter: Timepoint (hr) Value: 1
  misc_feature: MA Experiment 20000144 PARAMETER Experiment Name: At_42deg_Heat_cDNA_P Parameter: Tissue Value: Aerial
  misc_feature: MA Experiment ID: 20000171 Result: Down-regulated in Transcription
  misc_feature: MA Experiment 20000171 PARAMETER Experiment Name: At_42deg_Heat_P Parameter: Age (day) Value: 14
  misc_feature: MA Experiment 20000171 PARAMETER Experiment Name: At_42deg_Heat_P Parameter: Organism Value: A. thaliana
  misc_feature: MA Experiment 20000171 PARAMETER Experiment Name: At_42deg_Heat_P Parameter: Plant Line Value: WS
  misc_feature: MA Experiment 20000171 PARAMETER Experiment Name: At_42deg_Heat_P Parameter: Temperature (deg C) Value: 42 vs. 22
  misc_feature: MA Experiment 20000171 PARAMETER Experiment Name: At_42deg_Heat_P Parameter: Timepoint (hr) Value: 1
  misc_feature: MA Experiment 20000171 PARAMETER Experiment Name: At_42deg_Heat_P Parameter: Tissue Value: Aerial
  misc_feature: MA Experiment ID: 20000173 Result: Down-regulated in Transcription
  misc_feature: MA Experiment 20000173 PARAMETER Experiment Name: At_42deg_Heat_P Parameter: Age (day) Value: 14
  misc_feature: MA Experiment 20000173 PARAMETER Experiment Name: At_42deg_Heat_P Parameter: Organism Value: A. thaliana
  misc_feature: MA Experiment 20000173 PARAMETER Experiment Name: At_42deg_Heat_P Parameter: Plant Line Value: WS
  misc_feature: MA Experiment 20000173 PARAMETER Experiment Name: At_42deg_Heat_P Parameter: Temperature (deg C) Value: 42 vs. 22
  misc_feature: MA Experiment 20000173 PARAMETER Experiment Name: At_42deg_Heat_P Parameter: Timepoint (hr) Value: 6
  misc_feature: MA Experiment 20000173 PARAMETER Experiment Name: At_42deg_Heat_P Parameter: Tissue Value: Aerial
  misc_feature: MA Experiment ID: 20000179 Result: Up-regulated in Transcription
  misc_feature: MA Experiment 20000179 PARAMETER Experiment Name: At_Germinating_Seeds_P Parameter: Age (hr) Value: 6 vs. 0
  misc_feature: MA Experiment 20000179 PARAMETER Experiment Name: At_Germinating_Seeds_P Parameter: Tissue Value: Germinating Seeds
  misc_feature: MA Experiment ID: 20000180 Result: Up-regulated in Transcription
  misc_feature: MA Experiment 20000180 PARAMETER Experiment Name: At_Germinating_Seeds_P Parameter: Age (hr) Value: 24 vs. 0
  misc_feature: MA Experiment 20000180 PARAMETER Experiment Name: At_Germinating_Seeds_P Parameter: Tissue Value: Germinating Seeds
  misc_feature: MA Experiment ID: 20001557 Result: Up-regulated in Transcription
  misc_feature: MA Experiment 20001557 PARAMETER Experiment Name: At_Drought_Soil_Dry_P Parameter: Age (day) Value: 27
  misc_feature: MA Experiment 20001557 PARAMETER Experiment Name: At_Drought_Soil_Dry_P Parameter: Organism Value: A. thaliana
  misc_feature: MA Experiment 20001557 PARAMETER Experiment Name: At_Drought_Soil_Dry_P Parameter: Plant Line Value: WS
  misc_feature: MA Experiment 20001557 PARAMETER Experiment Name: At_Drought_Soil_Dry_P Parameter: Post Timepoint (hr) Value: 3
  misc_feature: MA Experiment 20001557 PARAMETER Experiment Name: At_Drought_Soil_Dry_P Parameter: Post-Treatment Value: Re-Water vs. No Drought
  misc_feature: MA Experiment 20001557 PARAMETER Experiment Name: At_Drought_Soil_Dry_P Parameter: Timepoint (day) Value: 13
  misc_feature: MA Experiment 20001557 PARAMETER Experiment Name: At_Drought_Soil_Dry_P Parameter: Treatment Value: Drought vs. No Drought

SEQ ID NO: 29395 - protein, 373 aa, Arabidopsis thaliana; identical to SEQ ID NO: 28615
  peptide (1)..(373): Ceres Seq. ID no. 13487515
  misc_feature (31)..(355): Pfam Name: NAD dependent epimerase/dehydratase family Pfam Description: NAD dependent epimerase/dehydratase family
  misc_feature (31)..(355): Pfam Name: NAD dependent epimerase/dehydratase family Pfam Description: NAD dependent epimerase/dehydratase family
  misc_feature (28)..(353): Homolog of NCBI NO: 23128163 NR Description: hypothetical protein [Nostoc punctiforme]
  misc_feature (29)..(352): Homolog of NCBI NO: 16329177 NR Description: GDP-D-mannose dehydratase [Synechocystis sp. PCC
  misc_feature (29)..(353): Homolog of NCBI NO: 4097914 NR Description: putative GDP-D-mannose dehydratase [Anabaena sp.
  misc_feature (28)..(352): Homolog of NCBI NO: 22298176 NR Description: GDP-mannose 4,6-dehydratase [Thermosynechococcus
  misc_feature (7)..(373): Homolog of NCBI NO: 7939611 NR Description: root cap-specific protein [Zea mays]
  misc_feature (28)..(353): Homolog of NCBI NO: 23128163 NR Description: hypothetical protein [Nostoc punctiforme]
  misc_feature (29)..(353): Homolog of NCBI NO: 4097914 NR Description: putative GDP-D-mannose dehydratase [Anabaena sp.
  misc_feature (7)..(373): Homolog of NCBI NO: 7939611 NR Description: root cap-specific protein [Zea mays]
  misc_feature (1)..(373): Homolog of NCBI NO: 21536808 NR Description: GDP-D-mannose-4,6-dehydratase MUR1 [Arabidopsis
  misc_feature (1)..(373): Homolog of NCBI NO: 1764100 NR Description: GDP-D-mannose-4,6-dehydratase [Arabidopsis
  misc_feature (1)..(373): Homolog of NCBI NO: 28373938 NR Description: Chain A, Crystal Structure Of The Gdp-Mannose
  misc_feature (1)..(373): Homolog of NCBI NO: 15230418 NR Description: GDP-D-mannose-4,6-dehydratase (MUR1) [Arabidopsis
  misc_feature (21)..(373): Homolog of NCBI NO: 15239334 NR Description: GDP-D-mannose 4,6-dehydratase, putative
  misc_feature (28)..(352): Homolog of NCBI NO: 22298176 NR Description: GDP-mannose 4,6-dehydratase [Thermosynechococcus
  misc_feature (29)..(352): Homolog of NCBI NO: 16329177 NR Description: GDP-D-mannose dehydratase [Synechocystis sp. PCC
  misc_feature (21)..(373): Homolog of NCBI NO: 15239334 NR Description: GDP-D-mannose 4,6-dehydratase, putative
  misc_feature (1)..(373): Homolog of NCBI NO: 15230418 NR Description: GDP-D-mannose-4,6-dehydratase (MUR1) [Arabidopsis
  misc_feature (1)..(373): Homolog of NCBI NO: 28373938 NR Description: Chain A, Crystal Structure Of The Gdp-Mannose
  misc_feature (1)..(373): Homolog of NCBI NO: 1764100 NR Description: GDP-D-mannose-4,6-dehydratase [Arabidopsis
  misc_feature (1)..(373): Homolog of NCBI NO: 21536808 NR Description: GDP-D-mannose-4,6-dehydratase MUR1 [Arabidopsis

SEQ ID NO: 29396 - protein, 289 aa, Arabidopsis thaliana; identical to SEQ ID NO: 28616
  peptide (1)..(289): Ceres Seq. ID no. 13487516
  misc_feature (1)..(271): Pfam Name: NAD dependent epimerase/dehydratase family Pfam Description: NAD dependent epimerase/dehydratase family
  misc_feature (1)..(271): Pfam Name: NAD dependent epimerase/dehydratase family Pfam Description: NAD dependent epimerase/dehydratase family
  misc_feature (1)..(269): Homolog of NCBI NO: 23128163 NR Description: hypothetical protein [Nostoc punctiforme]
  misc_feature (1)..(268): Homolog of NCBI NO: 16329177 NR Description: GDP-D-mannose dehydratase [Synechocystis sp. PCC
  misc_feature (1)..(269): Homolog of NCBI NO: 4097914 NR Description: putative GDP-D-mannose dehydratase [Anabaena sp.
  misc_feature (1)..(268): Homolog of NCBI NO: 22298176 NR Description: GDP-mannose 4,6-dehydratase [Thermosynechococcus
  misc_feature (1)..(289): Homolog of NCBI NO: 7939611 NR Description: root cap-specific protein [Zea mays]
  misc_feature (1)..(269): Homolog of NCBI NO: 23128163 NR Description: hypothetical protein [Nostoc punctiforme]
  misc_feature (1)..(269): Homolog of NCBI NO: 4097914 NR Description: putative GDP-D-mannose dehydratase [Anabaena sp.
  misc_feature (1)..(289): Homolog of NCBI NO: 7939611 NR Description: root cap-specific protein [Zea mays]
  misc_feature (1)..(289): Homolog of NCBI NO: 21536808 NR Description: GDP-D-mannose-4,6-dehydratase MUR1 [Arabidopsis
  misc_feature (1)..(289): Homolog of NCBI NO: 1764100 NR Description: GDP-D-mannose-4,6-dehydratase [Arabidopsis
  misc_feature (1)..(289): Homolog of NCBI NO: 28373938 NR Description: Chain A, Crystal Structure Of The Gdp-Mannose
  misc_feature (1)..(289): Homolog of NCBI NO: 15230418 NR Description: GDP-D-mannose-4,6-dehydratase (MUR1) [Arabidopsis
  misc_feature (1)..(289): Homolog of NCBI NO: 15239334 NR Description: GDP-D-mannose 4,6-dehydratase, putative
  misc_feature (1)..(268): Homolog of NCBI NO: 22298176 NR Description: GDP-mannose 4,6-dehydratase [Thermosynechococcus
  misc_feature (1)..(268): Homolog of NCBI NO: 16329177 NR Description: GDP-D-mannose dehydratase [Synechocystis sp. PCC
  misc_feature (1)..(289): Homolog of NCBI NO: 15239334 NR Description: GDP-D-mannose 4,6-dehydratase, putative
  misc_feature (1)..(289): Homolog of NCBI NO: 15230418 NR Description: GDP-D-mannose-4,6-dehydratase (MUR1) [Arabidopsis
  misc_feature (1)..(289): Homolog of NCBI NO: 28373938 NR Description: Chain A, Crystal Structure Of The Gdp-Mannose
  misc_feature (1)..(289): Homolog of NCBI NO: 1764100 NR Description: GDP-D-mannose-4,6-dehydratase [Arabidopsis
  misc_feature (1)..(289): Homolog of NCBI NO: 21536808 NR Description: GDP-D-mannose-4,6-dehydratase MUR1 [Arabidopsis

SEQ ID NO: 29397 - protein, 209 aa, Arabidopsis thaliana; identical to SEQ ID NO: 28617
  peptide (1)..(209): Ceres Seq. ID no. 13487517
  misc_feature (1)..(191): Pfam Name: NAD dependent epimerase/dehydratase family Pfam Description: NAD dependent epimerase/dehydratase family
  misc_feature (1)..(191): Pfam Name: NAD dependent epimerase/dehydratase family Pfam Description: NAD dependent epimerase/dehydratase family
  misc_feature (1)..(189): Homolog of NCBI NO: 23128163 NR Description: hypothetical protein [Nostoc punctiforme]
  misc_feature (1)..(188): Homolog of NCBI NO: 16329177 NR Description: GDP-D-mannose dehydratase [Synechocystis sp. PCC
  misc_feature (1)..(189): Homolog of NCBI NO: 4097914 NR Description: putative GDP-D-mannose dehydratase [Anabaena sp.
  misc_feature (1)..(188): Homolog of NCBI NO: 22298176 NR Description: GDP-mannose 4,6-dehydratase [Thermosynechococcus
  misc_feature (1)..(209): Homolog of NCBI NO: 7939611 NR Description: root cap-specific protein [Zea mays]
  misc_feature (1)..(189): Homolog of NCBI NO: 23128163 NR Description: hypothetical protein [Nostoc punctiforme]
  misc_feature (1)..(189): Homolog of NCBI NO: 4097914 NR Description: putative GDP-D-mannose dehydratase [Anabaena sp.
  misc_feature (1)..(209): Homolog of NCBI NO: 7939611 NR Description: root cap-specific protein [Zea mays]
  misc_feature (1)..(209): Homolog of NCBI NO: 21536808 NR Description: GDP-D-mannose-4,6-dehydratase MUR1 [Arabidopsis
  misc_feature (1)..(209): Homolog of NCBI NO: 1764100 NR Description: GDP-D-mannose-4,6-dehydratase [Arabidopsis
  misc_feature (1)..(209): Homolog of NCBI NO: 28373938 NR Description: Chain A, Crystal Structure Of The Gdp-Mannose
  misc_feature (1)..(209): Homolog of NCBI NO: 15230418 NR Description: GDP-D-mannose-4,6-dehydratase (MUR1) [Arabidopsis
  misc_feature (1)..(209): Homolog of NCBI NO: 15239334 NR Description: GDP-D-mannose 4,6-dehydratase, putative
  misc_feature (1)..(188): Homolog of NCBI NO: 22298176 NR Description: GDP-mannose 4,6-dehydratase [Thermosynechococcus
  misc_feature (1)..(188): Homolog of NCBI NO: 16329177 NR Description: GDP-D-mannose dehydratase [Synechocystis sp. PCC
  misc_feature (1)..(209): Homolog of NCBI NO: 15239334 NR Description: GDP-D-mannose 4,6-dehydratase, putative
  misc_feature (1)..(209): Homolog of NCBI NO: 15230418 NR Description: GDP-D-mannose-4,6-dehydratase (MUR1) [Arabidopsis
  misc_feature (1)..(209): Homolog of NCBI NO: 28373938 NR Description: Chain A, Crystal Structure Of The Gdp-Mannose
  misc_feature (1)..(209): Homolog of NCBI NO: 1764100 NR Description: GDP-D-mannose-4,6-dehydratase [Arabidopsis
  misc_feature (1)..(209): Homolog of NCBI NO: 21536808 NR Description: GDP-D-mannose-4,6-dehydratase MUR1 [Arabidopsis

SEQ ID NO: 29398 - DNA, 965 bp, Arabidopsis thaliana
  misc_feature (1)..(965): Ceres Seq. ID no. 12782031
  misc_feature: MA Experiment ID: 108435 Result: Down-regulated in Transcription
  misc_feature: MA Experiment 108435 PARAMETER Experiment Name: At_stm_Mutants_cDNA_P Parameter: Plant Line Value: wt Landsburg vs stm
  misc_feature: MA Experiment 108435 PARAMETER Experiment Name: At_stm_Mutants_cDNA_P Parameter: Tissue Value: Shoot Apical Meristem Region
  misc_feature: MA Experiment ID: 108463 Result: Up-regulated in Transcription
  misc_feature: MA Experiment 108463 PARAMETER Experiment Name: At_Germinating_Seeds_cDNA_P Parameter: Age (day) Value: 3 vs. 0
  misc_feature: MA Experiment 108463 PARAMETER Experiment Name: At_Germinating_Seeds_cDNA_P Parameter: Tissue Value: Germinating Seeds
  misc_feature: MA Experiment ID: 108464 Result: Up-regulated in Transcription
  misc_feature: MA Experiment 108464 PARAMETER Experiment Name: At_Germinating_Seeds_cDNA_P Parameter: Age (day) Value: 4 vs. 0
  misc_feature: MA Experiment 108464 PARAMETER Experiment Name: At_Germinating_Seeds_cDNA_P Parameter: Tissue Value: Germinating Seeds
  misc_feature: MA Experiment ID: 108488 Result: Up-regulated in Transcription
  misc_feature: MA Experiment ID: 108577 Result: Up-regulated in Transcription
  misc_feature: MA Experiment 108577 PARAMETER Experiment Name: At_42deg_Heat_cDNA_P Parameter: Temperature (deg C) Value: 42 vs. 22
  misc_feature: MA Experiment 108577 PARAMETER Experiment Name: At_42deg_Heat_cDNA_P Parameter: Timepoint (hr) Value: 6
  misc_feature: MA Experiment 108577 PARAMETER Experiment Name: At_42deg_Heat_cDNA_P Parameter: Tissue Value: Aerial
  misc_feature: MA Experiment ID: 108594 Result: Down-regulated in Transcription
  misc_feature: MA Experiment 108594 PARAMETER Experiment Name: At_Ler-rhl_Root_cDNA_P Parameter: Plant Line Value: null
  misc_feature: MA Experiment ID: 108595 Result: Down-regulated in Transcription
  misc_feature: MA Experiment 108595 PARAMETER Experiment Name: At_Ler-pi_Ovule_cDNA_P Parameter: Plant Line Value: null
  misc_feature: MA Experiment ID: 20000086 Result: Down-regulated in Transcription
  misc_feature: MA Experiment 20000086 PARAMETER Experiment Name: At_100uM_ABA_Mutants_cDNA_P Parameter: Plant Line Value: CS22
  misc_feature: MA Experiment 20000086 PARAMETER Experiment Name: At_100uM_ABA_Mutants_cDNA_P Parameter: Timepoint (hr) Value: 6
  misc_feature: MA Experiment 20000086 PARAMETER Experiment Name: At_100uM_ABA_Mutants_cDNA_P Parameter: Tissue Value: Aerial
  misc_feature: MA Experiment 20000086 PARAMETER Experiment Name: At_100uM_ABA_Mutants_cDNA_P Parameter: Treatment Value: 100uM ABA vs. No Treatment
  misc_feature: MA Experiment ID: 20000087 Result: Down-regulated in Transcription
  misc_feature: MA Experiment 20000087 PARAMETER Experiment Name: At_100uM_ABA_Mutants_cDNA_P Parameter: Plant Line Value: WS
  misc_feature: MA Experiment 20000087 PARAMETER Experiment Name: At_100uM_ABA_Mutants_cDNA_P Parameter: Timepoint (hr) Value: 6
  misc_feature: MA Experiment 20000087 PARAMETER Experiment Name: At_100uM_ABA_Mutants_cDNA_P Parameter: Tissue Value: Aerial
  misc_feature: MA Experiment 20000087 PARAMETER Experiment Name: At_100uM_ABA_Mutants_cDNA_P Parameter: Treatment Value: 100uM ABA vs. No Treatment
  misc_feature: MA Experiment ID: 20000090 Result: Down-regulated in Transcription
  misc_feature: MA Experiment ID: 20000185 Result: Down-regulated in Transcription
  misc_feature: MA Experiment 20000185 PARAMETER Experiment Name: At_Roots__P Parameter: Age (day) Value: 7 vs. 21
  misc_feature: MA Experiment 20000185 PARAMETER Experiment Name: At_Roots__P Parameter: Organism Value: A. thaliana
  misc_feature: MA Experiment 20000185 PARAMETER Experiment Name: At_Roots__P Parameter: Tissue Value: Roots vs. Whole Plant
  misc_feature: MA Experiment ID: 20000227 Result: Down-regulated in Transcription
  misc_feature: MA Experiment 20000227 PARAMETER Experiment Name: At_Root-Tips-vs-Tops_P Parameter: Tissue Value: Root Tips vs. Root Tops
  misc_feature: MA Experiment ID: 20000234 Result: Down-regulated in Transcription
  misc_feature: MA Experiment 20000234 PARAMETER Experiment Name: At_Siliques_P Parameter: Age (day) Value: 21
  misc_feature: MA Experiment 20000234 PARAMETER Experiment Name: At_Siliques_P Parameter: Organism Value: A. thaliana
  misc_feature: MA Experiment 20000234 PARAMETER Experiment Name: At_Siliques_P Parameter: Plant Line Value: WS
  misc_feature: MA Experiment 20000234 PARAMETER Experiment Name: At_Siliques_P Parameter: Tissue Value: Less Than 5mm Siliques vs. Whole Plant
  misc_feature: MA Experiment ID: 20000235 Result: Down-regulated in Transcription
  misc_feature: MA Experiment 20000235 PARAMETER Experiment Name: At_Siliques_P Parameter: Age (day) Value: 21
  misc_feature: MA Experiment 20000235 PARAMETER Experiment Name: At_Siliques_P Parameter: Organism Value: A. thaliana
  misc_feature: MA Experiment 20000235 PARAMETER Experiment Name: At_Siliques_P Parameter: Plant Line Value: WS
  misc_feature: MA Experiment 20000235 PARAMETER Experiment Name: At_Siliques_P Parameter: Tissue Value: 5-10mm Siliques vs. Whole Plant
  misc_feature: MA Experiment ID: 20000286 Result: Down-regulated in Transcription
  misc_feature: MA Experiment 20000286 PARAMETER Experiment Name: At_Open_Flower_P Parameter: Age (day) Value: 21
  misc_feature: MA Experiment 20000286 PARAMETER Experiment Name: At_Open_Flower_P Parameter: Plant Line Value: WS
  misc_feature: MA Experiment 20000286 PARAMETER Experiment Name: At_Open_Flower_P Parameter: Tissue Value: Half Open vs. Whole Plant
  misc_feature: MA Experiment ID: 20000308 Result: Down-regulated in Transcription
  misc_feature: MA Experiment 20000308 PARAMETER Experiment Name: At_100mM_NaCl__P Parameter: Age (day) Value: 17
  misc_feature: MA Experiment 20000308 PARAMETER Experiment Name: At_100mM_NaCl__P Parameter: Organism Value: A. thaliana
  misc_feature: MA Experiment 20000308 PARAMETER Experiment Name: At_100mM_NaCl__P Parameter: Plant Line Value: WS
  misc_feature: MA Experiment 20000308 PARAMETER Experiment Name: At_100mM_NaCl__P Parameter: Timepoint (hr) Value: 72
  misc_feature: MA Experiment 20000308 PARAMETER Experiment Name: At_100mM_NaCl__P Parameter: Tissue Value: Whole Plant
  misc_feature: MA Experiment 20000308 PARAMETER Experiment Name: At_100mM_NaCl__P Parameter: Treatment Value: 100mM NaCl vs. No Treatment
  misc_feature: MA Experiment ID: 20000438 Result: Up-regulated in Transcription
  misc_feature: MA Experiment 20000438 PARAMETER Experiment Name: At_Shoots__P Parameter: Age (day) Value: 14
  misc_feature: MA Experiment 20000438 PARAMETER Experiment Name: At_Shoots__P Parameter: Tissue Value: Shoots vs. Whole Plant
  misc_feature: MA Experiment ID: 20000439 Result: Down-regulated in Transcription
  misc_feature: MA Experiment 20000439 PARAMETER Experiment Name: At_Roots__P Parameter: Age (day) Value: 14 vs. 21
  misc_feature: MA Experiment 20000439 PARAMETER Experiment Name: At_Roots__P Parameter: Organism Value: A. thaliana
  misc_feature: MA Experiment 20000439 PARAMETER Experiment Name: At_Roots__P Parameter: Tissue Value: Roots vs. Whole Plant
  misc_feature: MA Experiment ID: 20000527 Result: Up-regulated in Transcription
  misc_feature: MA Experiment 20000527 PARAMETER Experiment Name: At_10percent_PEG_P Parameter: Age (day) Value: 20
  misc_feature: MA Experiment 20000527 PARAMETER Experiment Name: At_10percent_PEG_P Parameter: Organism Value: A. thaliana
  misc_feature: MA Experiment 20000527 PARAMETER Experiment Name: At_10percent_PEG_P Parameter: Plant Line Value: WS
  misc_feature: MA Experiment 20000527 PARAMETER Experiment Name: At_10percent_PEG_P Parameter: Timepoint (day) Value: 20
  misc_feature: MA Experiment 20000527 PARAMETER Experiment Name: At_10percent_PEG_P Parameter: Tissue Value: Whole Plant
  misc_feature: MA Experiment 20000527 PARAMETER Experiment Name: At_10percent_PEG_P Parameter: Treatment Value: 10percent PEG vs. No Treatment
  misc_feature: MA Experiment ID: 20001247 Result: Up-regulated in Transcription
  misc_feature: MA Experiment 20001247 PARAMETER Experiment Name: At_Far-red-induction_P Parameter: Age (day) Value: 7
  misc_feature: MA Experiment 20001247 PARAMETER Experiment Name: At_Far-red-induction_P Parameter: Light Value: Far-red vs. White
  misc_feature: MA Experiment 20001247 PARAMETER Experiment Name: At_Far-red-induction_P Parameter: Organism Value: A. thaliana
  misc_feature: MA Experiment 20001247 PARAMETER Experiment Name: At_Far-red-induction_P Parameter: Plant Line Value: Columbia
  misc_feature: MA Experiment 20001247 PARAMETER Experiment Name: At_Far-red-induction_P Parameter: Timepoint (hr) Value: 1
  misc_feature: MA Experiment 20001247 PARAMETER Experiment Name: At_Far-red-induction_P Parameter: Tissue Value: Whole Plant
  misc_feature: MA Experiment ID: 20001248 Result: Down-regulated in Transcription
  misc_feature: MA Experiment 20001248 PARAMETER Experiment Name: At_Far-red-induction_P Parameter: Age (day) Value: 7
  misc_feature: MA Experiment 20001248 PARAMETER Experiment Name: At_Far-red-induction_P Parameter: Light Value: Far-red vs. White
  misc_feature: MA Experiment 20001248 PARAMETER Experiment Name: At_Far-red-induction_P Parameter: Organism Value: A. thaliana
  misc_feature: MA Experiment 20001248 PARAMETER Experiment Name: At_Far-red-induction_P Parameter: Plant Line Value: Columbia
  misc_feature: MA Experiment 20001248 PARAMETER Experiment Name: At_Far-red-induction_P Parameter: Timepoint (hr) Value: 4
  misc_feature: MA Experiment 20001248 PARAMETER Experiment Name: At_Far-red-induction_P Parameter: Tissue Value: Whole Plant
  misc_feature: MA Experiment ID: 20001556 Result: Down-regulated in Transcription
  misc_feature: MA Experiment 20001556 PARAMETER Experiment Name: At_Drought_Soil_Dry_P Parameter: Age (day) Value: 26
  misc_feature: MA Experiment 20001556 PARAMETER Experiment Name: At_Drought_Soil_Dry_P Parameter: Organism Value: A. thaliana
  misc_feature: MA Experiment 20001556 PARAMETER Experiment Name: At_Drought_Soil_Dry_P Parameter: Plant Line Value: WS
  misc_feature: MA Experiment 20001556 PARAMETER Experiment Name: At_Drought_Soil_Dry_P Parameter: Post Timepoint (hr) Value: None
  misc_feature: MA Experiment 20001556 PARAMETER Experiment Name: At_Drought_Soil_Dry_P Parameter: Post-Treatment Value: None
  misc_feature: MA Experiment 20001556 PARAMETER Experiment Name: At_Drought_Soil_Dry_P Parameter: Timepoint (day) Value: 12
  misc_feature: MA Experiment 20001556 PARAMETER Experiment Name: At_Drought_Soil_Dry_P Parameter: Treatment Value: Drought vs. No Drought
  misc_feature: MA Experiment ID: 20001557 Result: Down-regulated in Transcription
  misc_feature: MA Experiment 20001557 PARAMETER Experiment Name: At_Drought_Soil_Dry_P Parameter: Age (day) Value: 27
  misc_feature: MA Experiment 20001557 PARAMETER Experiment Name: At_Drought_Soil_Dry_P Parameter: Organism Value: A. thaliana
  misc_feature: MA Experiment 20001557 PARAMETER Experiment Name: At_Drought_Soil_Dry_P Parameter: Plant Line Value: WS
  misc_feature: MA Experiment 20001557 PARAMETER Experiment Name: At_Drought_Soil_Dry_P Parameter: Post Timepoint (hr) Value: 3
  misc_feature: MA Experiment 20001557 PARAMETER Experiment Name: At_Drought_Soil_Dry_P Parameter: Post-Treatment Value: Re-Water vs. No Drought
  misc_feature: MA Experiment 20001557 PARAMETER Experiment Name: At_Drought_Soil_Dry_P Parameter: Timepoint (day) Value: 13
  misc_feature: MA Experiment 20001557 PARAMETER Experiment Name: At_Drought_Soil_Dry_P Parameter: Treatment Value: Drought vs. No Drought
  misc_feature: MA Experiment ID: 20001558 Result: Down-regulated in Transcription
  misc_feature: MA Experiment 20001558 PARAMETER Experiment Name: At_Drought_Soil_Dry_P Parameter: Age (day) Value: 27
  misc_feature: MA Experiment 20001558 PARAMETER Experiment Name: At_Drought_Soil_Dry_P Parameter: Organism Value: A. thaliana
  misc_feature: MA Experiment 20001558 PARAMETER Experiment Name: At_Drought_Soil_Dry_P Parameter: Plant Line Value: WS
  misc_feature: MA Experiment 20001558 PARAMETER Experiment Name: At_Drought_Soil_Dry_P Parameter: Post Timepoint (hr) Value: 6
  misc_feature: MA Experiment 20001558 PARAMETER Experiment Name: At_Drought_Soil_Dry_P Parameter: Post-Treatment Value: Re-Water vs. No Drought
  misc_feature: MA Experiment 20001558 PARAMETER Experiment Name: At_Drought_Soil_Dry_P Parameter: Timepoint (day) Value: 13
  misc_feature: MA Experiment 20001558 PARAMETER Experiment Name: At_Drought_Soil_Dry_P Parameter: Treatment Value: Drought vs. No Drought
  misc_feature: MA Experiment ID: 20001559 Result: Down-regulated in Transcription
  misc_feature: MA Experiment 20001559 PARAMETER Experiment Name: At_Drought_Soil_Dry_P Parameter: Age (day) Value: 28
  misc_feature: MA Experiment 20001559 PARAMETER Experiment Name: At_Drought_Soil_Dry_P Parameter: Organism Value: A. thaliana
  misc_feature: MA Experiment 20001559 PARAMETER Experiment Name: At_Drought_Soil_Dry_P Parameter: Plant Line Value: WS
  misc_feature: MA Experiment 20001559 PARAMETER Experiment Name: At_Drought_Soil_Dry_P Parameter: Post Timepoint (hr) Value: 29
  misc_feature: MA Experiment 20001559 PARAMETER Experiment Name: At_Drought_Soil_Dry_P Parameter: Post-Treatment Value: Re-Water vs. No Drought
  misc_feature: MA Experiment 20001559 PARAMETER Experiment Name: At_Drought_Soil_Dry_P Parameter: Timepoint (day) Value: 14
  misc_feature: MA Experiment 20001559 PARAMETER Experiment Name: At_Drought_Soil_Dry_P Parameter: Treatment Value: Drought vs. No Drought
  misc_feature: MA Experiment ID: 20001560 Result: Down-regulated in Transcription
  misc_feature: MA Experiment 20001560 PARAMETER Experiment Name: At_Drought_Soil_Dry_P Parameter: Age (day) Value: 28
  misc_feature: MA Experiment 20001560 PARAMETER Experiment Name: At_Drought_Soil_Dry_P Parameter: Organism Value: A. thaliana
  misc_feature: MA Experiment 20001560 PARAMETER Experiment Name: At_Drought_Soil_Dry_P Parameter: Plant Line Value: WS
  misc_feature: MA Experiment 20001560 PARAMETER Experiment Name: At_Drought_Soil_Dry_P Parameter: Post Timepoint (hr) Value: None
  misc_feature: MA Experiment 20001560 PARAMETER Experiment Name: At_Drought_Soil_Dry_P Parameter: Post-Treatment Value: None
  misc_feature: MA Experiment 20001560 PARAMETER Experiment Name: At_Drought_Soil_Dry_P Parameter: Timepoint (day) Value: 14
  misc_feature: MA Experiment 20001560 PARAMETER Experiment Name: At_Drought_Soil_Dry_P Parameter: Treatment Value: Drought vs. No Drought
  misc_feature: MA Experiment ID: 20001757 Result: Up-regulated in Transcription
  misc_feature: MA Experiment 20001757 PARAMETER Experiment Name: At_50mM_NH4NO3_L-to-H_P Parameter: Timepoint (hr) Value: 6
  misc_feature: MA Experiment 20001757 PARAMETER Experiment Name: At_50mM_NH4NO3_L-to-H_P Parameter: Tissue Value: Leaf
  misc_feature: MA Experiment 20001757 PARAMETER Experiment Name: At_50mM_NH4NO3_L-to-H_P Parameter: Treatment Value: 50mM NH4NO3 vs 100mM Mannitol
  misc_feature: MA Experiment ID: 20001904 Result: Down-regulated in Transcription
  misc_feature: MA Experiment 20001904 PARAMETER Experiment Name: At_Drought_Reproduction_P Parameter: Age (day) Value: 37
  misc_feature: MA Experiment 20001904 PARAMETER Experiment Name: At_Drought_Reproduction_P Parameter: Organism Value: A. thaliana
  misc_feature: MA Experiment 20001904 PARAMETER Experiment Name: At_Drought_Reproduction_P Parameter: Plant Line Value: WS
  misc_feature: MA Experiment 20001904 PARAMETER Experiment Name: At_Drought_Reproduction_P Parameter: Timepoint (day) Value: 7
  misc_feature: MA Experiment 20001904 PARAMETER Experiment Name: At_Drought_Reproduction_P Parameter: Tissue Value: Rosettes
  misc_feature: MA Experiment 20001904 PARAMETER Experiment Name: At_Drought_Reproduction_P Parameter: Treatment Value: Drought vs. No Drought
  misc_feature: MA Experiment ID: 20001905 Result: Down-regulated in Transcription
  misc_feature: MA Experiment 20001905 PARAMETER Experiment Name: At_Drought_Reproduction_P Parameter: Age (day) Value: 40
  misc_feature: MA Experiment 20001905 PARAMETER Experiment Name: At_Drought_Reproduction_P Parameter: Organism Value: A. thaliana
  misc_feature: MA Experiment 20001905 PARAMETER Experiment Name: At_Drought_Reproduction_P Parameter: Plant Line Value: WS
  misc_feature: MA Experiment 20001905 PARAMETER Experiment Name: At_Drought_Reproduction_P Parameter: Timepoint (day) Value: 10
  misc_feature: MA Experiment 20001905 PARAMETER Experiment Name: At_Drought_Reproduction_P Parameter: Tissue Value: Rosettes
  misc_feature: MA Experiment 20001905 PARAMETER Experiment Name: At_Drought_Reproduction_P Parameter: Treatment Value: Drought vs. No Drought
atctctcggtttcactattgaacgtgtaacactggtcgaaagaagacgaacataaactcgtctccggtaaccaaaaatggtttccatgactacttcatcttcttcgtacggaacattctctacagtcttcaacagttctagacctaattcctcagcaacctttctcgtcccttccttgaaattctccaccggaatatcgaatttcgcgaatctgagtaatgggttttctctaaaatctccaattaatcctgggtttctcttcaagtctcgtcctttcactgtccaagctagagctgctgcagaaaaaaccgttcacgatttcaccgttaaggacattgatgggaaggatgttgctttgaacaaattcaaggggaaagttatgttgattgtcaatgttgcttcaagatgtggtttgacatcatcaaattactcagagctttcacatctgtacgagaaatacaaaactcaaggatttgagattctagcttttccctgcaatcagtttggtttccaagagcccgggtcaaactccgagatcaaacaattcgcttgcacccggtttaaagcagagttccctatatttgataaggttgacgtgaatggaccaagcacagcgccgatctacgagttcttgaaatcaaacgcaggaggattcttgggtggtctcattaaatggaactttgagaagttcttgattgataaaaagggaaaggtcgttgagaggtaccctcccaccacatcccctttccaaatcgagaaagacatccagaagttgcttgccgcttaaaaacttttgctcatgagtgagcatatagagactgatggttaaagtaaccgtaaattgtgacataaagtttccggttattgcttgtataccttcttacattctaagttgtactaatcgcttaataatttgcgtataatggtaatgttatatacattatattataaaaatggtgttatat

SEQ ID NO: 29399 - protein, 236 aa, Arabidopsis thaliana
  peptide (1)..(236): Ceres Seq. ID no. 12782032
  misc_feature (78)..(187): Pfam Name: Glutathione peroxidase Pfam Description: Glutathione peroxidase
  misc_feature (21)..(236): Homolog of NCBI NO: 6179600 NR Description: GPX12Hv, glutathione peroxidase-like protein
  misc_feature (71)..(236): Homolog of NCBI NO: 21360380 NR Description: glutathione peroxidase 1 [Oryza sativa]
  misc_feature (1)..(236): Homolog of NCBI NO: 20138099 NR Description: Phospholipid hydroperoxide glutathione
  misc_feature (22)..(236): Homolog of NCBI NO: 2982362 NR Description: glutathione peroxidase [Zantedeschia aethiopica]
  misc_feature (7)..(236): Homolog of NCBI NO: 40388501 NR Description: GPx [Brassica oleracea var. botrytis]
  misc_feature (7)..(236): Homolog of NCBI NO: 20147455 NR Description: glutathione peroxidase [Brassica napus]
  misc_feature (10)..(233): Homolog of NCBI NO: 7433114 NR Description: glutathione peroxidase (EC 1.11.1.9) F11C18.70 -
  misc_feature (10)..(236): Homolog of NCBI NO: 22329066 NR Description: glutathione peroxidase, putative; protein id:
  misc_feature (1)..(236): Homolog of NCBI NO: 15224678 NR Description: glutathione peroxidase, putative
  misc_feature (1)..(235): Homolog of NCBI NO: 2129599 NR Description: glutathione peroxidase (EC 1.11.1.9) precursor -
MVSMTTSSSSYGTFSTVFNSSRPNSSATFLVPSLKFSTGISNFANLSNGFSLKSPINPGFLFKSRPFTVQARAAAEKTVHDFTVKDIDGKDVALNKFKGKVMLIVNVASRCGLTSSNYSELSHLYEKYKTQGFEILAFPCNQFGFQEPGSNSEIKQFACTRFKAEFPIFDKVDVNGPSTAPIYEFLKSNAGGFLGGLIKWNFEKFLIDKKGKVVERYPPTTSPFQIEKDIQKLLAA

SEQ ID NO: 29400 - protein, 233 aa, Arabidopsis thaliana
  peptide (1)..(233): Ceres Seq. ID no. 12782033
  misc_feature (75)..(184): Pfam Name: Glutathione peroxidase Pfam Description: Glutathione peroxidase
  misc_feature (18)..(233): Homolog of NCBI NO: 6179600 NR Description: GPX12Hv, glutathione peroxidase-like protein
  misc_feature (68)..(233): Homolog of NCBI NO: 21360380 NR Description: glutathione peroxidase 1 [Oryza sativa]
  misc_feature (1)..(233): Homolog of NCBI NO: 20138099 NR Description: Phospholipid hydroperoxide glutathione
  misc_feature (19)..(233): Homolog of NCBI NO: 2982362 NR Description: glutathione peroxidase [Zantedeschia aethiopica]
  misc_feature (4)..(233): Homolog of NCBI NO: 40388501 NR Description: GPx [Brassica oleracea var. botrytis]
  misc_feature (4)..(233): Homolog of NCBI NO: 20147455 NR Description: glutathione peroxidase [Brassica napus]
  misc_feature (7)..(230): Homolog of NCBI NO: 7433114 NR Description: glutathione peroxidase (EC 1.11.1.9) F11C18.70 -
  misc_feature (7)..(233): Homolog of NCBI NO: 22329066 NR Description: glutathione peroxidase, putative; protein id:
  misc_feature (1)..(233): Homolog of NCBI NO: 15224678 NR Description: glutathione peroxidase, putative
  misc_feature (1)..(232): Homolog of NCBI NO: 2129599 NR Description: glutathione peroxidase (EC 1.11.1.9) precursor -
MTTSSSSYGTFSTVFNSSRPNSSATFLVPSLKFSTGISNFANLSNGFSLKSPINPGFLFKSRPFTVQARAAAEKTVHDFTVKDIDGKDVALNKFKGKVMLIVNVASRCGLTSSNYSELSHLYEKYKTQGFEILAFPCNQFGFQEPGSNSEIKQFACTRFKAEFPIFDKVDVNGPSTAPIYEFLKSNAGGFLGGLIKWNFEKFLIDKKGKVVERYPPTTSPFQIEKDIQKLLAA

SEQ ID NO: 29401 - protein, 135 aa, Arabidopsis thaliana
  peptide (1)..(135): Ceres Seq. ID no. 12782034
  misc_feature (1)..(86): Pfam Name: Glutathione peroxidase Pfam Description: Glutathione peroxidase
  misc_feature (1)..(135): Homolog of NCBI NO: 6179600 NR Description: GPX12Hv, glutathione peroxidase-like protein
  misc_feature (1)..(135): Homolog of NCBI NO: 21360380 NR Description: glutathione peroxidase 1 [Oryza sativa]
  misc_feature (1)..(135): Homolog of NCBI NO: 20138099 NR Description: Phospholipid hydroperoxide glutathione
  misc_feature (1)..(135): Homolog of NCBI NO: 2982362 NR Description: glutathione peroxidase [Zantedeschia aethiopica]
  misc_feature (1)..(135): Homolog of NCBI NO: 40388501 NR Description: GPx [Brassica oleracea var. botrytis]
  misc_feature (1)..(135): Homolog of NCBI NO: 20147455 NR Description: glutathione peroxidase [Brassica napus]
  misc_feature (1)..(132): Homolog of NCBI NO: 7433114 NR Description: glutathione peroxidase (EC 1.11.1.9) F11C18.70 -
  misc_feature (1)..(135): Homolog of NCBI NO: 22329066 NR Description: glutathione peroxidase, putative; protein id:
  misc_feature (1)..(135): Homolog of NCBI NO: 15224678 NR Description: glutathione peroxidase, putative
  misc_feature (1)..(134): Homolog of NCBI NO: 2129599 NR Description: glutathione peroxidase (EC 1.11.1.9) precursor -
MLIVNVASRCGLTSSNYSELSHLYEKYKTQGFEILAFPCNQFGFQEPGSNSEIKQFACTRFKAEFPIFDKVDVNGPSTAPIYEFLKSNAGGFLGGLIKWNFEKFLIDKKGKVVERYPPTTSPFQIEKDIQKLLAA

SEQ ID NO: 29402 - DNA, 976 bp, Arabidopsis thaliana
  misc_feature (1)..(976): Ceres Seq. ID no. 12369947
  misc_feature: MA Experiment ID: 108435 Result: Down-regulated in Transcription
  misc_feature: MA Experiment 108435 PARAMETER Experiment Name: At_stm_Mutants_cDNA_P Parameter: Plant Line Value: wt Landsburg vs stm
  misc_feature: MA Experiment 108435 PARAMETER Experiment Name: At_stm_Mutants_cDNA_P Parameter: Tissue Value: Shoot Apical Meristem Region
  misc_feature: MA Experiment ID: 108461 Result: Up-regulated in Transcription
  misc_feature: MA Experiment 108461 PARAMETER Experiment Name: At_Germinating_Seeds_cDNA_P Parameter: Age (day) Value: 1 vs. 0
  misc_feature: MA Experiment 108461 PARAMETER Experiment Name: At_Germinating_Seeds_cDNA_P Parameter: Tissue Value: Germinating Seeds
  misc_feature: MA Experiment ID: 108462 Result: Up-regulated in Transcription
  misc_feature: MA Experiment 108462 PARAMETER Experiment Name: At_Germinating_Seeds_cDNA_P Parameter: Age (day) Value: 2 vs. 0
  misc_feature: MA Experiment 108462 PARAMETER Experiment Name: At_Germinating_Seeds_cDNA_P Parameter: Tissue Value: Germinating Seeds
  misc_feature: MA Experiment ID: 108463 Result: Up-regulated in Transcription
  misc_feature: MA Experiment 108463 PARAMETER Experiment Name: At_Germinating_Seeds_cDNA_P Parameter: Age (day) Value: 3 vs. 0
  misc_feature: MA Experiment 108463 PARAMETER Experiment Name: At_Germinating_Seeds_cDNA_P Parameter: Tissue Value: Germinating Seeds
  misc_feature: MA Experiment ID: 108488 Result: Up-regulated in Transcription
  misc_feature: MA Experiment ID: 108573 Result: Down-regulated in Transcription
  misc_feature: MA Experiment 108573 PARAMETER Experiment Name: At_Drought_cDNA_P Parameter: Timepoint (hr) Value: 6
  misc_feature: MA Experiment 108573 PARAMETER Experiment Name: At_Drought_cDNA_P Parameter: Tissue Value: Aerial
  misc_feature: MA Experiment 108573 PARAMETER Experiment Name: At_Drought_cDNA_P Parameter: Treatment Value: Drought vs. No Drought
  misc_feature: MA Experiment ID: 108576 Result: Down-regulated in Transcription
  misc_feature: MA Experiment 108576 PARAMETER Experiment Name: At_42deg_Heat_cDNA_P Parameter: Temperature (deg C) Value: 42 vs. 22
  misc_feature: MA Experiment 108576 PARAMETER Experiment Name: At_42deg_Heat_cDNA_P Parameter: Timepoint (hr) Value: 1
  misc_feature: MA Experiment 108576 PARAMETER Experiment Name: At_42deg_Heat_cDNA_P Parameter: Tissue Value: Aerial
  misc_feature: MA Experiment ID: 108585 Result: Down-regulated in Transcription
  misc_feature: MA Experiment 108585 PARAMETER Experiment Name: At_5mM_NaNP_cDNA_P Parameter: Timepoint (hr) Value: 6
  misc_feature: MA Experiment 108585 PARAMETER Experiment Name: At_5mM_NaNP_cDNA_P Parameter: Tissue Value: Aerial
  misc_feature: MA Experiment 108585 PARAMETER Experiment Name: At_5mM_NaNP_cDNA_P Parameter: Treatment Value: null
  misc_feature: MA Experiment ID: 108595 Result: Down-regulated in Transcription
  misc_feature: MA Experiment 108595 PARAMETER Experiment Name: At_Ler-pi_Ovule_cDNA_P Parameter: Plant Line Value: null
  misc_feature: MA Experiment ID: 20000111 Result: Down-regulated in Transcription
  misc_feature: MA Experiment 20000111 PARAMETER Experiment Name: At_42deg_Heat_cDNA_P Parameter: Temperature (deg C) Value: 42 vs. 22
  misc_feature: MA Experiment 20000111 PARAMETER Experiment Name: At_42deg_Heat_cDNA_P Parameter: Timepoint (hr) Value: 6
  misc_feature: MA Experiment 20000111 PARAMETER Experiment Name: At_42deg_Heat_cDNA_P Parameter: Tissue Value: Aerial
  misc_feature: MA Experiment ID: 20000112 Result: Down-regulated in Transcription
  misc_feature: MA Experiment 20000112 PARAMETER Experiment Name: At_42deg_Heat_cDNA_P Parameter: Temperature (deg C) Value: 42 vs. 22
  misc_feature: MA Experiment 20000112 PARAMETER Experiment Name: At_42deg_Heat_cDNA_P Parameter: Timepoint (hr) Value: 2
  misc_feature: MA Experiment 20000112 PARAMETER Experiment Name: At_42deg_Heat_cDNA_P Parameter: Tissue Value: Aerial
  misc_feature: MA Experiment ID: 20000179 Result: Up-regulated in Transcription
  misc_feature: MA Experiment 20000179 PARAMETER Experiment Name: At_Germinating_Seeds_P Parameter: Age (hr) Value: 6 vs. 0
  misc_feature: MA Experiment 20000179 PARAMETER Experiment Name: At_Germinating_Seeds_P Parameter: Tissue Value: Germinating Seeds
  misc_feature: MA Experiment ID: 20000180 Result: Up-regulated in Transcription
  misc_feature: MA Experiment 20000180 PARAMETER Experiment Name: At_Germinating_Seeds_P Parameter: Age (hr) Value: 24 vs. 0
  misc_feature: MA Experiment 20000180 PARAMETER Experiment Name: At_Germinating_Seeds_P Parameter: Tissue Value: Germinating Seeds
  misc_feature: MA Experiment ID: 20000185 Result: Down-regulated in Transcription
  misc_feature: MA Experiment 20000185 PARAMETER Experiment Name: At_Roots__P Parameter: Age (day) Value: 7 vs. 21
  misc_feature: MA Experiment 20000185 PARAMETER Experiment Name: At_Roots__P Parameter: Organism Value: A. thaliana
  misc_feature: MA Experiment 20000185 PARAMETER Experiment Name: At_Roots__P Parameter: Tissue Value: Roots vs. Whole Plant
  misc_feature: MA Experiment ID: 20000224 Result: Up-regulated in Transcription
  misc_feature: MA Experiment ID: 20000227 Result: Down-regulated in Transcription
  misc_feature: MA Experiment 20000227 PARAMETER Experiment Name: At_Root-Tips-vs-Tops_P Parameter: Tissue Value: Root Tips vs. Root Tops
  misc_feature: MA Experiment ID: 20000438 Result: Up-regulated in Transcription
  misc_feature: MA Experiment 20000438 PARAMETER Experiment Name: At_Shoots__P Parameter: Age (day) Value: 14
  misc_feature: MA Experiment 20000438 PARAMETER Experiment Name: At_Shoots__P Parameter: Tissue Value: Shoots vs. Whole Plant
  misc_feature: MA Experiment ID: 20000439 Result: Down-regulated in Transcription
  misc_feature: MA Experiment 20000439 PARAMETER Experiment Name: At_Roots__P Parameter: Age (day) Value: 14 vs. 21
  misc_feature: MA Experiment 20000439 PARAMETER Experiment Name: At_Roots__P Parameter: Organism Value: A. thaliana
  misc_feature: MA Experiment 20000439 PARAMETER Experiment Name: At_Roots__P Parameter: Tissue Value: Roots vs. Whole Plant
  misc_feature: MA Experiment ID: 20000794 Result: Down-regulated in Transcription
  misc_feature: MA Experiment 20000794 PARAMETER Experiment Name: At_Petals_P Parameter: Age (day) Value: 23-25 days
  misc_feature: MA Experiment 20000794 PARAMETER Experiment Name: At_Petals_P Parameter: Plant Line Value: WS
  misc_feature: MA Experiment 20000794 PARAMETER Experiment Name: At_Petals_P Parameter: Tissue Value: Petals vs. Whole plant
  misc_feature: MA Experiment ID: 20001248 Result: Down-regulated in Transcription
  misc_feature: MA Experiment 20001248 PARAMETER Experiment Name: At_Far-red-induction_P Parameter: Age (day) Value: 7
  misc_feature: MA Experiment 20001248 PARAMETER Experiment Name: At_Far-red-induction_P Parameter: Light Value: Far-red vs. White
  misc_feature: MA Experiment 20001248 PARAMETER Experiment Name: At_Far-red-induction_P Parameter: Organism Value: A. thaliana
  misc_feature: MA Experiment 20001248 PARAMETER Experiment Name: At_Far-red-induction_P Parameter: Plant Line Value: Columbia
  misc_feature: MA Experiment 20001248 PARAMETER Experiment Name: At_Far-red-induction_P Parameter: Timepoint (hr) Value: 4
  misc_feature: MA Experiment 20001248 PARAMETER Experiment Name: At_Far-red-induction_P Parameter: Tissue Value: Whole Plant
  misc_feature: MA Experiment ID: 20001450 Result: Down-regulated in Transcription
  misc_feature: MA Experiment 20001450 PARAMETER Experiment Name: At_Far-red-induction_P Parameter: Age (day) Value: 7
  misc_feature: MA Experiment 20001450 PARAMETER Experiment Name: At_Far-red-induction_P Parameter: Light Value: Far-red vs. White
  misc_feature: MA Experiment 20001450 PARAMETER Experiment Name: At_Far-red-induction_P Parameter: Organism Value: A. thaliana
  misc_feature: MA Experiment 20001450 PARAMETER Experiment Name: At_Far-red-induction_P Parameter: Plant Line Value: Columbia
  misc_feature: MA Experiment 20001450 PARAMETER Experiment Name: At_Far-red-induction_P Parameter: Timepoint (hr) Value: 8
  misc_feature: MA Experiment 20001450 PARAMETER Experiment Name: At_Far-red-induction_P Parameter: Tissue Value: Whole Plant
  misc_feature: MA Experiment ID: 20001557 Result: Down-regulated in Transcription
  misc_feature: MA Experiment 20001557 PARAMETER Experiment Name: At_Drought_Soil_Dry_P Parameter: Age (day) Value: 27
  misc_feature: MA Experiment 20001557 PARAMETER Experiment Name: At_Drought_Soil_Dry_P Parameter: Organism Value: A. thaliana
  misc_feature: MA Experiment 20001557 PARAMETER Experiment Name: At_Drought_Soil_Dry_P Parameter: Plant Line Value: WS
  misc_feature: MA Experiment 20001557 PARAMETER Experiment Name: At_Drought_Soil_Dry_P Parameter: Post Timepoint (hr) Value: 3
  misc_feature: MA Experiment 20001557 PARAMETER Experiment Name: At_Drought_Soil_Dry_P Parameter: Post-Treatment Value: Re-Water vs. No Drought
  misc_feature: MA Experiment 20001557 PARAMETER Experiment Name: At_Drought_Soil_Dry_P Parameter: Timepoint (day) Value: 13
  misc_feature: MA Experiment 20001557 PARAMETER Experiment Name: At_Drought_Soil_Dry_P Parameter: Treatment Value: Drought vs. No Drought
aagcaccacatgttcagattttttcctaacaagaagaaaagaagtcgcagtttcatcgtctttcttccattatcgtgcaattaaattctctcattttcaagaaaatatctgaaaagacagaaacttaacagaagcagcttcgatcaagagatggcttcacttacttcaatagccacgccttacccatcttcatcgcaggctttgcgtctgaaatcctccggaaacactcttttctctgccggagttcgatcggcagcaatggtttccggtcacaaaacgcttaagattcaatgcacttcaaccaaacctgccaaacctgcagctgaagtcgattggagacagaagagagagcttctattggagaaaagggtgagaagtgtggacgtgaaggaagctcaacggttacaaaaagaaaacaactttgtgattcttgatgtaagaccagaggcagagtacaaggcgggtcatcctccgggagctatcaatgtggagatgtacagactcataagggaatggacggcatgggacatagctcgccgtcttggctttgctttctttggtatcttctctggcacagaagagaaccctgagtttattcaaagtgtagaagctaaacttgacaaagaggcaaagatcatagtagcttgttcatccgcgggtacaatgaagccgacacaaaatcttcccgaaggccaacaatcgaggtctctcatagctgcttatcttctggtccttaacggctataagaacgtatttcacctagaaggtggaatctacacatggggcaaggaaggtcttcctgttgaaacaattgaagaagactaaccaacttctttactctagagttgtccagttttgtatatctgtccatttcagttagttgcatttagagatttggcttttcagagagtgttttgaggtttgtaaaacttcagactttaccatgaaatccagcaaactcgaccggaatccaagg

SEQ ID NO: 29403 - protein, 224 aa, Arabidopsis thaliana
  peptide (1)..(224): Ceres Seq. ID no. 12369948
  misc_feature (78)..(214): Pfam Name: Rhodanese-like domain Pfam Description: Rhodanese-like domain
  misc_feature (66)..(223): Homolog of NCBI NO: 18398296 NR Description: rhodanese-like domain protein
  misc_feature (66)..(223): Homolog of NCBI NO: 18491227 NR Description: putative rhodanese family protein [Arabidopsis
  misc_feature (1)..(224): Homolog of NCBI NO: 7487511 NR Description: hypothetical protein T29A15.190 - Arabidopsis
  misc_feature (1)..(224): Homolog of NCBI NO: 21553366 NR Description: unknown [Arabidopsis thaliana]
  misc_feature (1)..(224): Homolog of NCBI NO: 18417050 NR Description: rhodanese-like domain protein
MASLTSIATPYPSSSQALRLKSSGNTLFSAGVRSAAMVSGHKTLKIQCTSTKPAKPAAEVDWRQKRELLLEKRVRSVDVKEAQRLQKENNFVILDVRPEAEYKAGHPPGAINVEMYRLIREWTAWDIARRLGFAFFGIFSGTEENPEFIQSVEAKLDKEAKIIVACSSAGTMKPTQNLPEGQQSRSLIAAYLLVLNGYKNVFHLEGGIYTWGKEGLPVETIEED

SEQ ID NO: 29404 - protein, 188 aa, Arabidopsis thaliana
  peptide (1)..(188): Ceres Seq. ID no. 12369949
  misc_feature (42)..(178): Pfam Name: Rhodanese-like domain Pfam Description: Rhodanese-like domain
  misc_feature (30)..(187): Homolog of NCBI NO: 18398296 NR Description: rhodanese-like domain protein
  misc_feature (30)..(187): Homolog of NCBI NO: 18491227 NR Description: putative rhodanese family protein [Arabidopsis
  misc_feature (1)..(188): Homolog of NCBI NO: 7487511 NR Description: hypothetical protein T29A15.190 - Arabidopsis
  misc_feature (1)..(188): Homolog of NCBI NO: 21553366 NR Description: unknown [Arabidopsis thaliana]
  misc_feature (1)..(188): Homolog of NCBI NO: 18417050 NR Description: rhodanese-like domain protein
MVSGHKTLKIQCTSTKPAKPAAEVDWRQKRELLLEKRVRSVDVKEAQRLQKENNFVILDVRPEAEYKAGHPPGAINVEMYRLIREWTAWDIARRLGFAFFGIFSGTEENPEFIQSVEAKLDKEAKIIVACSSAGTMKPTQNLPEGQQSRSLIAAYLLVLNGYKNVFHLEGGIYTWGKEGLPVETIEED

SEQ ID NO: 29405 - DNA, 1740 bp, Arabidopsis thaliana
  misc_feature (1)..(1740): Ceres Seq. ID no. 13488118
  misc_feature: MA Experiment ID: 108434 Result: Up-regulated in Transcription
  misc_feature: MA Experiment 108434 PARAMETER Experiment Name: At_Root_Tips_cDNA_P Parameter: Tissue Value: Root Tips
  misc_feature: MA Experiment ID: 108462 Result: Down-regulated in Transcription
  misc_feature: MA Experiment 108462 PARAMETER Experiment Name: At_Germinating_Seeds_cDNA_P Parameter: Age (day) Value: 2 vs. 0
  misc_feature: MA Experiment 108462 PARAMETER Experiment Name: At_Germinating_Seeds_cDNA_P Parameter: Tissue Value: Germinating Seeds
  misc_feature: MA Experiment ID: 108463 Result: Down-regulated in Transcription
  misc_feature: MA Experiment 108463 PARAMETER Experiment Name: At_Germinating_Seeds_cDNA_P Parameter: Age (day) Value: 3 vs. 0
  misc_feature: MA Experiment 108463 PARAMETER Experiment Name: At_Germinating_Seeds_cDNA_P Parameter: Tissue Value: Germinating Seeds
  misc_feature: MA Experiment ID: 108573 Result: Down-regulated in Transcription
  misc_feature: MA Experiment 108573 PARAMETER Experiment Name: At_Drought_cDNA_P Parameter: Timepoint (hr) Value: 6
  misc_feature: MA Experiment 108573 PARAMETER Experiment Name: At_Drought_cDNA_P Parameter: Tissue Value: Aerial
  misc_feature: MA Experiment 108573 PARAMETER Experiment Name: At_Drought_cDNA_P Parameter: Treatment Value: Drought vs. No Drought
  misc_feature: MA Experiment ID: 108576 Result: Up-regulated in Transcription
  misc_feature: MA Experiment 108576 PARAMETER Experiment Name: At_42deg_Heat_cDNA_P Parameter: Temperature (deg C) Value: 42 vs. 22
  misc_feature: MA Experiment 108576 PARAMETER Experiment Name: At_42deg_Heat_cDNA_P Parameter: Timepoint (hr) Value: 1
  misc_feature: MA Experiment 108576 PARAMETER Experiment Name: At_42deg_Heat_cDNA_P Parameter: Tissue Value: Aerial
  misc_feature: MA Experiment ID: 20000093 Result: Up-regulated in Transcription
  misc_feature: MA Experiment 20000093 PARAMETER Experiment Name: At_42deg_Heat_cDNA_P Parameter: Temperature (deg C) Value: 42 vs. 22
  misc_feature: MA Experiment 20000093 PARAMETER Experiment Name: At_42deg_Heat_cDNA_P Parameter: Timepoint (hr) Value: 0.5
  misc_feature: MA Experiment 20000093 PARAMETER Experiment Name: At_42deg_Heat_cDNA_P Parameter: Tissue Value: Aerial
  misc_feature: MA Experiment ID: 20000111 Result: Up-regulated in Transcription
  misc_feature: MA Experiment 20000111 PARAMETER Experiment Name: At_42deg_Heat_cDNA_P Parameter: Temperature (deg C) Value: 42 vs. 22
  misc_feature: MA Experiment 20000111 PARAMETER Experiment Name: At_42deg_Heat_cDNA_P Parameter: Timepoint (hr) Value: 6
  misc_feature: MA Experiment 20000111 PARAMETER Experiment Name: At_42deg_Heat_cDNA_P Parameter: Tissue Value: Aerial
  misc_feature: MA Experiment ID: 20000112 Result: Up-regulated in Transcription
  misc_feature: MA Experiment 20000112 PARAMETER Experiment Name: At_42deg_Heat_cDNA_P Parameter: Temperature (deg C) Value: 42 vs. 22
  misc_feature: MA Experiment 20000112 PARAMETER Experiment Name: At_42deg_Heat_cDNA_P Parameter: Timepoint (hr) Value: 2
  misc_feature: MA Experiment 20000112 PARAMETER Experiment Name: At_42deg_Heat_cDNA_P Parameter: Tissue Value: Aerial
  misc_feature: MA Experiment ID: 20000113 Result: Up-regulated in Transcription
  misc_feature: MA Experiment 20000113 PARAMETER Experiment Name: At_42deg_Heat_cDNA_P Parameter: Temperature (deg C) Value: 42 vs. 22
  misc_feature: MA Experiment 20000113 PARAMETER Experiment Name: At_42deg_Heat_cDNA_P Parameter: Timepoint (hr) Value: 8
  misc_feature: MA Experiment 20000113 PARAMETER Experiment Name: At_42deg_Heat_cDNA_P Parameter: Tissue Value: Aerial
  misc_feature: MA Experiment ID: 20000144 Result: Up-regulated in Transcription
  misc_feature: MA Experiment 20000144 PARAMETER Experiment Name: At_42deg_Heat_cDNA_P Parameter: Temperature (deg C) Value: 42 vs. 22
  misc_feature: MA Experiment 20000144 PARAMETER Experiment Name: At_42deg_Heat_cDNA_P Parameter: Timepoint (hr) Value: 1
  misc_feature: MA Experiment 20000144 PARAMETER Experiment Name: At_42deg_Heat_cDNA_P Parameter: Tissue Value: Aerial
  misc_feature: MA Experiment ID: 20000171 Result: Up-regulated in Transcription
  misc_feature: MA Experiment 20000171 PARAMETER Experiment Name: At_42deg_Heat_P Parameter: Age (day) Value: 14
  misc_feature: MA Experiment 20000171 PARAMETER Experiment Name: At_42deg_Heat_P Parameter: Organism Value: A. thaliana
  misc_feature: MA Experiment 20000171 PARAMETER Experiment Name: At_42deg_Heat_P Parameter: Plant Line Value: WS
  misc_feature: MA Experiment 20000171 PARAMETER Experiment Name: At_42deg_Heat_P Parameter: Temperature (deg C) Value: 42 vs. 22
  misc_feature: MA Experiment 20000171 PARAMETER Experiment Name: At_42deg_Heat_P Parameter: Timepoint (hr) Value: 1
  misc_feature: MA Experiment 20000171 PARAMETER Experiment Name: At_42deg_Heat_P Parameter: Tissue Value: Aerial
  misc_feature: MA Experiment ID: 20000224 Result: Up-regulated in Transcription
atcttctacacagttctgaagcaacaaaacagggttttggctagggttttaactttggctgctctgtctcaatccctcgagacttaaacccacttagtacaatctccatataatttgagtagaacctaaaagatcgaagcttgaggaaaatggtcccttccaatggcgcaaaggttcttcgcttgttgagtcgtcgatgtctctcttcatcgcttattcaagatttagccaatcagaaactgagaggagtatgtattgggagttataggagattgaatacgagtgttggcaatcatgctaacgtgattggagattacgcttcaaaatctggacatgatcggaaatggatcaactttggaggttttaatactaattttggttctacaaggtcttttcatggaacaggttcttcgtttatgtctgctaaggactactatagtgttcttggagtgagtaagaatgctcaagaaggtgaaatcaagaaggcttattatgggcttgctaagaaactccatcctgatatgaataaagatgatccagaagctgagacgaagttccaggaagtctcaaaagcatatgaaattttgaaagataaggagaagcgtgacctttatgaccaggttggtcatgaagcatttgagcaaaatgctagtggtggatttccaaatgatcaaggcttcggtggtggtggtggtggtgggtttaacccatttgatatctttgggagcttcaatggcgatatttttaacatgtaccggcaagatattggaggtcaagatgtcaaggttttgcttgatctttctttcatggaagctgttcaaggatgctccaaaactgtgacttttcaaaccgagatggcttgtaatacttgtggtggacaaggtgttcctcctggtaccaaacgagagaaatgcaaagcctgtaatggctctgggatgacctcactgaggaggggtatgttaagcatccaaacaacttgccagaagtgtggtggagctggtcaaacgttctcaagtatttgcaaatcctgtagaggggctagagtggttcgaggacagaagtcagtgaaagtcactattgatccaggggttgacaatagtgatacattaaaggtggcaagggtgggtggggctgatcctgaaggtgaccagcctggagatctttatgttactctcaaggttcgtgaagatcctgtgttccgcagagaaggatcggatattcatgtggacgcggttctcagtgttacccaggccattcttggaggaaccattcaagttccaaccctcactggtgatgttgtcgtgaaggtccgtcctggaacccaacctggtcacaaagtagtgctaagaaataaaggaattagagcaagaaagtcgactaaatttggggatcagtatgtgcatttcaacgtcagcatccctgcaaatataacgcagagacagcgtgaactgcttgaggaatttagtaaagcagaacaaggtgaatacgagcagcgcacagcaactggatcttcccagtgaaaaatgcaaatgctgctataagcctaaaaagctattgttgtggctgtatcaatggatatataatcaatcagacaatgattgagattatattgcgtaggattagtggagagtattgtctgggttttacttttaactaattctacaatgctacaagataaaaagaaggaaaagcctgtgctgttattgccttctcaaagttatagaacttttgatacggttc

SEQ ID NO: 29406 - protein, 456 aa, Arabidopsis thaliana
  peptide (1)..(456): Ceres Seq. ID no. 13488119
  misc_feature (318)..(439): Pfam Name: DnaJ C terminal region Pfam Description: DnaJ C terminal region
  misc_feature (90)..(445): Homolog of NCBI NO: 27363826 NR Description: DnaJ chaperone [Vibrio vulnificus CMCP6]
  misc_feature (90)..(445): Homolog of NCBI NO: 15640872 NR Description: dnaJ protein [Vibrio cholerae]
  misc_feature (90)..(454): Homolog of NCBI NO: 16759006 NR Description: DnaJ protein [Salmonella enterica subsp. enterica
  misc_feature (90)..(445): Homolog of NCBI NO: 34497100 NR Description: heat shock protein dnaJ; chaperone with DnaK
  misc_feature (93)..(445): Homolog of NCBI NO: 39995145 NR Description: chaperone protein dnaJ [Geobacter sulfurreducens
  misc_feature (90)..(450): Homolog of NCBI NO: 15675997 NR Description: dnaJ protein [Neisseria meningitidis MC58]
  misc_feature (1)..(456): Homolog of NCBI NO: 10177754 NR Description: DnaJ protein-like [Arabidopsis thaliana]
  misc_feature (1)..(456): Homolog of NCBI NO: 21553367 NR Description: DnaJ protein-like [Arabidopsis thaliana]
  misc_feature (1)..(456): Homolog of NCBI NO: 21429604 NR Description: GFA2 [Arabidopsis thaliana]
  misc_feature (1)..(456): Homolog of NCBI NO: 18422864 NR Description: DnaJ protein GFA2, putative [Arabidopsis
MVPSNGAKVLRLLSRRCLSSSLIQDLANQKLRGVCIGSYRRLNTSVGNHANVIGDYASKSGHDRKWINFGGFNTNFGSTRSFHGTGSSFMSAKDYYSVLGVSKNAQEGEIKKAYYGLAKKLHPDMNKDDPEAETKFQEVSKAYEILKDKEKRDLYDQVGHEAFEQNASGGFPNDQGFGGGGGGGFNPFDIFGSFNGDIFNMYRQDIGGQDVKVLLDLSFMEAVQGCSKTVTFQTEMACNTCGGQGVPPGTKREKCKACNGSGMTSLRRGMLSIQTTCQKCGGAGQTFSSICKSCRGARVVRGQKSVKVTIDPGVDNSDTLKVARVGGADPEGDQPGDLYVTLKVREDPVFRREGSDIHVDAVLSVTQAILGGTIQVPTLTGDVVVKVRPGTQPGHKVVLRNKGIRARKSTKFGDQYVHFNVSIPANITQRQRELLEEFSKAEQGEYEQRTATGSSQ

SEQ ID NO: 29407 - protein, 367 aa, Arabidopsis thaliana
  peptide (1)..(367): Ceres Seq. ID no. 13488120
  misc_feature (229)..(350): Pfam Name: DnaJ C terminal region Pfam Description: DnaJ C terminal region
  misc_feature (1)..(356): Homolog of NCBI NO: 27363826 NR Description: DnaJ chaperone [Vibrio vulnificus CMCP6]
  misc_feature (1)..(356): Homolog of NCBI NO: 15640872 NR Description: dnaJ protein [Vibrio cholerae]
  misc_feature (1)..(365): Homolog of NCBI NO: 16759006 NR Description: DnaJ protein [Salmonella enterica subsp. enterica
  misc_feature (1)..(356): Homolog of NCBI NO: 34497100 NR Description: heat shock protein dnaJ; chaperone with DnaK
  misc_feature (4)..(356): Homolog of NCBI NO: 39995145 NR Description: chaperone protein dnaJ [Geobacter sulfurreducens
  misc_feature (1)..(361): Homolog of NCBI NO: 15675997 NR Description: dnaJ protein [Neisseria meningitidis MC58]
  misc_feature (1)..(367): Homolog of NCBI NO: 10177754 NR Description: DnaJ protein-like [Arabidopsis thaliana]
  misc_feature (1)..(367): Homolog of NCBI NO: 21553367 NR Description: DnaJ protein-like [Arabidopsis thaliana]
  misc_feature (1)..(367): Homolog of NCBI NO: 21429604 NR Description: GFA2 [Arabidopsis thaliana]
  misc_feature (1)..(367): Homolog of NCBI NO: 18422864 NR Description: DnaJ protein GFA2, putative [Arabidopsis
MSAKDYYSVLGVSKNAQEGEIKKAYYGLAKKLHPDMNKDDPEAETKFQEVSKAYEILKDKEKRDLYDQVGHEAFEQNASGGFPNDQGFGGGGGGGFNPFDIFGSFNGDIFNMYRQDIGGQDVKVLLDLSFMEAVQGCSKTVTFQTEMACNTCGGQGVPPGTKREKCKACNGSGMTSLRRGMLSIQTTCQKCGGAGQTFSSICKSCRGARVVRGQKSVKVTIDPGVDNSDTLKVARVGGADPEGDQPGDLYVTLKVREDPVFRREGSDIHVDAVLSVTQAILGGTIQVPTLTGDVVVKVRPGTQPGHKVVLRNKGIRARKSTKFGDQYVHFNVSIPANITQRQRELLEEFSKAEQGEYEQRTATGSSQ

SEQ ID NO: 29408 - protein, 332 aa, Arabidopsis thaliana
  peptide (1)..(332): Ceres Seq. ID no. 13488121
  misc_feature (194)..(315): Pfam Name: DnaJ C terminal region Pfam Description: DnaJ C terminal region
  misc_feature (1)..(321): Homolog of NCBI NO: 27363826 NR Description: DnaJ chaperone [Vibrio vulnificus CMCP6]
  misc_feature (1)..(321): Homolog of NCBI NO: 15640872 NR Description: dnaJ protein [Vibrio cholerae]
  misc_feature (1)..(330): Homolog of NCBI NO: 16759006 NR Description: DnaJ protein [Salmonella enterica subsp. enterica
  misc_feature (1)..(321): Homolog of NCBI NO: 34497100 NR Description: heat shock protein dnaJ; chaperone with DnaK
  misc_feature (1)..(321): Homolog of NCBI NO: 39995145 NR Description: chaperone protein dnaJ [Geobacter sulfurreducens
  misc_feature (1)..(326): Homolog of NCBI NO: 15675997 NR Description: dnaJ protein [Neisseria meningitidis MC58]
  misc_feature (1)..(332): Homolog of NCBI NO: 10177754 NR Description: DnaJ protein-like [Arabidopsis thaliana]
  misc_feature (1)..(332): Homolog of NCBI NO: 21553367 NR Description: DnaJ protein-like [Arabidopsis thaliana]
  misc_feature (1)..(332): Homolog of NCBI NO: 21429604 NR Description: GFA2 [Arabidopsis thaliana]
  misc_feature (1)..(332): Homolog of NCBI NO: 18422864 NR Description: DnaJ protein GFA2, putative [Arabidopsis
MNKDDPEAETKFQEVSKAYEILKDKEKRDLYDQVGHEAFEQNASGGFPNDQGFGGGGGGGFNPFDIFGSFNGDIFNMYRQDIGGQDVKVLLDLSFMEAVQGCSKTVTFQTEMACNTCGGQGVPPGTKREKCKACNGSGMTSLRRGMLSIQTTCQKCGGAGQTFSSICKSCRGARVVRGQKSVKVTIDPGVDNSDTLKVARVGGADPEGDQPGDLYVTLKVREDPVFRREGSDIHVDAVLSVTQAILGGTIQVPTLTGDVVVKVRPGTQPGHKVVLRNKGIRARKSTKFGDQYVHFNVSIPANITQRQRELLEEFSKAEQGEYEQRTATGSSQ

SEQ ID NO: 29409 - DNA, 1189 bp, Arabidopsis thaliana
  misc_feature (1)..(1189): Ceres Seq. ID no. 12325946
  misc_feature: MA Experiment ID: 108595 Result: Down-regulated in Transcription
  misc_feature: MA Experiment 108595 PARAMETER Experiment Name: At_Ler-pi_Ovule_cDNA_P Parameter: Plant Line Value: null
  misc_feature: MA Experiment ID: 20000185 Result: Down-regulated in Transcription
  misc_feature: MA Experiment 20000185 PARAMETER Experiment Name: At_Roots__P Parameter: Age (day) Value: 7 vs. 21
  misc_feature: MA Experiment 20000185 PARAMETER Experiment Name: At_Roots__P Parameter: Organism Value: A. thaliana
  misc_feature: MA Experiment 20000185 PARAMETER Experiment Name: At_Roots__P Parameter: Tissue Value: Roots vs. Whole Plant
  misc_feature: MA Experiment ID: 20000439 Result: Down-regulated in Transcription
  misc_feature: MA Experiment 20000439 PARAMETER Experiment Name: At_Roots__P Parameter: Age (day) Value: 14 vs. 21
  misc_feature: MA Experiment 20000439 PARAMETER Experiment Name: At_Roots__P Parameter: Organism Value: A. thaliana
  misc_feature: MA Experiment 20000439 PARAMETER Experiment Name: At_Roots__P Parameter: Tissue Value: Roots vs. Whole Plant
  misc_feature: MA Experiment ID: 20000495 Result: Down-regulated in Transcription
  misc_feature: MA Experiment 20000495 PARAMETER Experiment Name: At_Guard_Cells_P Parameter: Harvest Date Value: 8/2/2002
  misc_feature: MA Experiment 20000495 PARAMETER Experiment Name: At_Guard_Cells_P Parameter: Organism Value: A. thaliana
  misc_feature: MA Experiment 20000495 PARAMETER Experiment Name: At_Guard_Cells_P Parameter: Tissue Value: Guard Cells vs. Leaves
  misc_feature: MA Experiment ID: 20001557 Result: Down-regulated in Transcription
  misc_feature: MA Experiment 20001557 PARAMETER Experiment Name: At_Drought_Soil_Dry_P Parameter: Age (day) Value: 27
  misc_feature: MA Experiment 20001557 PARAMETER Experiment Name: At_Drought_Soil_Dry_P Parameter: Organism Value: A. thaliana
  misc_feature: MA Experiment 20001557 PARAMETER Experiment Name: At_Drought_Soil_Dry_P Parameter: Plant Line Value: WS
  misc_feature: MA Experiment 20001557 PARAMETER Experiment Name: At_Drought_Soil_Dry_P Parameter: Post Timepoint (hr) Value: 3
  misc_feature: MA Experiment 20001557 PARAMETER Experiment Name: At_Drought_Soil_Dry_P Parameter: Post-Treatment Value: Re-Water vs. No Drought
  misc_feature: MA Experiment 20001557 PARAMETER Experiment Name: At_Drought_Soil_Dry_P Parameter: Timepoint (day) Value: 13
  misc_feature: MA Experiment 20001557 PARAMETER Experiment Name: At_Drought_Soil_Dry_P Parameter: Treatment Value: Drought vs. No Drought
  misc_feature: MA Experiment ID: 20001558 Result: Down-regulated in Transcription
  misc_feature: MA Experiment 20001558 PARAMETER Experiment Name: At_Drought_Soil_Dry_P Parameter: Age (day) Value: 27
  misc_feature: MA Experiment 20001558 PARAMETER Experiment Name: At_Drought_Soil_Dry_P Parameter: Organism Value: A. thaliana
  misc_feature: MA Experiment 20001558 PARAMETER Experiment Name: At_Drought_Soil_Dry_P Parameter: Plant Line Value: WS
  misc_feature: MA Experiment 20001558 PARAMETER Experiment Name: At_Drought_Soil_Dry_P Parameter: Post Timepoint (hr) Value: 6
  misc_feature: MA Experiment 20001558 PARAMETER Experiment Name: At_Drought_Soil_Dry_P Parameter: Post-Treatment Value: Re-Water vs. No Drought
  misc_feature: MA Experiment 20001558 PARAMETER Experiment Name: At_Drought_Soil_Dry_P Parameter: Timepoint (day) Value: 13
  misc_feature: MA Experiment 20001558 PARAMETER Experiment Name: At_Drought_Soil_Dry_P Parameter: Treatment Value: Drought vs. No Drought
gagcttctgtaatggctacttggagtggtttcaacgtctcttcttctccgttgcttaggcttcggtcttcctccgtctcaaatgtcactaagcttccgtttctctctcctatttgccggcgtcggttactggcagaacgctttggtctcgcaactgtcgttgttacgcgccaaaacctcacggttactccgtcgtctgcggcggtggaagctcgtatctcagggaaaagagaacctatgacgcctccgtataacatattgatcactggctcaaccaaaggtataggatatgcattagctagagagtttctgaaagcaggcgacaatgttgtgatttgctctagatcagctgaacgagttgagactgctgttcagagtcttaaggaagaatttggggagcatgtgtggggaactaagtgtgatgttacggaagggaaggatgtgagggaacttgtagcttatagtcagaagaatcttaaatacattgacatttggataaataatgcgggatctaatgcatatagctttaaacctttggcagaggcctcagatgaggatcttattgaagttgtgaaaaccaacactctaggtctcatgttatgttgccgagaggcaatgaatatgatgttgacccaatctcgaggtggtcatatcttcaatattgatggagctggttcagatgggagaccaacacccagatttgctgcatatggtgcaactaaacggagtgtcgttcacctgacaaagtcattacaggcagagttgcagatgcaagatgtcaaaaatgtcgtggtgcataatctatcgcctggaatggtcacaactgatctgctcatgtccggagcaactacaaaacaagccaagttcttcattaatgttttggcagagccagccgaagtggtggctgagtaccttgtcccaaacataagggcaataccggctagcggatctatgaagccgacttacatccgtttcctaactggaatcaaagcctacaccaaaatattctcaagagttgcattgggagcaaggaagaacaggtatgttactgaagagtaggtgtcaaactaagtattagaattgtattgctttctcagtttgttcaatggtaaataaaaacctctacattttgttcatgacaactccaaaacatgcaatctattgtacaatttggatttaagctcatttgc

SEQ ID NO: 29410 - protein, 351 aa, Arabidopsis thaliana
  peptide (1)..(351): Ceres Seq. ID no. 12325947
  misc_feature (86)..(276): Homolog of NCBI NO: 118571 NR Description: Granaticin polyketide synthase putative ketoacyl
  misc_feature (86)..(305): Homolog of NCBI NO: 21674585 NR Description: oxidoreductase, short-chain
  misc_feature (86)..(285): Homolog of NCBI NO: 31213111 NR Description: ENSANGP00000021713 [Anopheles gambiae]
  misc_feature (117)..(315): Homolog of NCBI NO: 7485669 NR Description: hypothetical protein F17N18.140 - Arabidopsis
  misc_feature (86)..(351): Homolog of NCBI NO: 34904226 NR Description: P0443E07.30 [Oryza sativa (japonica
  misc_feature (79)..(351): Homolog of NCBI NO: 21673969 NR Description: oxidoreductase, short-chain
  misc_feature (82)..(315): Homolog of NCBI NO: 18413962 NR Description: putative protein
  misc_feature (17)..(351): Homolog of NCBI NO: 29244639 NR Description: putative oxidoreductase protein
  misc_feature (4)..(336): Homolog of NCBI NO: 10178029 NR Description: gene_id:MUG13.25~pir||T07705~similar to unknown
  misc_feature (4)..(351): Homolog of NCBI NO: 18414726 NR Description: putative protein
ASVMATWSGFNVSSSPLLRLRSSSVSNVTKLPFLSPICRRRLLAERFGLATVVVTRQNLTVTPSSAAVEARISGKREPMTPPYNILITGSTKGIGYALAREFLKAGDNVVICSRSAERVETAVQSLKEEFGEHVWGTKCDVTEGKDVRELVAYSQKNLKYIDIWINNAGSNAYSFKPLAEASDEDLIEVVKTNTLGLMLCCREAMNMMLTQSRGGHIFNIDGAGSDGRPTPRFAAYGATKRSVVHLTKSLQAELQMQDVKNVVVHNLSPGMVTTDLLMSGATTKQAKFFINVLAEPAEVVAEYLVPNIRAIPASGSMKPTYIRFLTGIKAYTKIFSRVALGARKNRYVTEE

SEQ ID NO: 29411 - protein, 348 aa, Arabidopsis thaliana
  peptide (1)..(348): Ceres Seq. ID no. 12325948
  misc_feature (83)..(273): Homolog of NCBI NO: 118571 NR Description: Granaticin polyketide synthase putative ketoacyl
  misc_feature (83)..(302): Homolog of NCBI NO: 21674585 NR Description: oxidoreductase, short-chain
  misc_feature (83)..(282): Homolog of NCBI NO: 31213111 NR Description: ENSANGP00000021713 [Anopheles gambiae]
  misc_feature (114)..(312): Homolog of NCBI NO: 7485669 NR Description: hypothetical protein F17N18.140 - Arabidopsis
  misc_feature (83)..(348): Homolog of NCBI NO: 34904226 NR Description: P0443E07.30 [Oryza sativa (japonica
  misc_feature (76)..(348): Homolog of NCBI NO: 21673969 NR Description: oxidoreductase, short-chain
  misc_feature (79)..(312): Homolog of NCBI NO: 18413962 NR Description: putative protein
  misc_feature (14)..(348): Homolog of NCBI NO: 29244639 NR Description: putative oxidoreductase protein
  misc_feature (1)..(333): Homolog of NCBI NO: 10178029 NR Description: gene_id:MUG13.25~pir||T07705~similar to unknown
  misc_feature (1)..(348): Homolog of NCBI NO: 18414726 NR Description: putative protein
MATWSGFNVSSSPLLRLRSSSVSNVTKLPFLSPICRRRLLAERFGLATVVVTRQNLTVTPSSAAVEARISGKREPMTPPYNILITGSTKGIGYALAREFLKAGDNVVICSRSAERVETAVQSLKEEFGEHVWGTKCDVTEGKDVRELVAYSQKNLKYIDIWINNAGSNAYSFKPLAEASDEDLIEVVKTNTLGLMLCCREAMNMMLTQSRGGHIFNIDGAGSDGRPTPRFAAYGATKRSVVHLTKSLQAELQMQDVKNVVVHNLSPGMVTTDLLMSGATTKQAKFFINVLAEPAEVVAEYLVPNIRAIPASGSMKPTYIRFLTGIKAYTKIFSRVALGARKNRYVTEE

SEQ ID NO: 29412 - protein, 273 aa, Arabidopsis thaliana
  peptide (1)..(273): Ceres Seq. ID no. 12325949
  misc_feature (8)..(198): Homolog of NCBI NO: 118571 NR Description: Granaticin polyketide synthase putative ketoacyl
  misc_feature (8)..(227): Homolog of NCBI NO: 21674585 NR Description: oxidoreductase, short-chain
  misc_feature (8)..(207): Homolog of NCBI NO: 31213111 NR Description: ENSANGP00000021713 [Anopheles gambiae]
  misc_feature (39)..(237): Homolog of NCBI NO: 7485669 NR Description: hypothetical protein F17N18.140 - Arabidopsis
  misc_feature (8)..(273): Homolog of NCBI NO: 34904226 NR Description: P0443E07.30 [Oryza sativa (japonica
  misc_feature (1)..(273): Homolog of NCBI NO: 21673969 NR Description: oxidoreductase, short-chain
  misc_feature (4)..(237): Homolog of NCBI NO: 18413962 NR Description: putative protein
  misc_feature (1)..(273): Homolog of NCBI NO: 29244639 NR Description: putative oxidoreductase protein
  misc_feature (1)..(258): Homolog of NCBI NO: 10178029 NR Description: gene_id:MUG13.25~pir||T07705~similar to unknown
  misc_feature (1)..(273): Homolog of NCBI NO: 18414726 NR Description: putative protein
MTPPYNILITGSTKGIGYALAREFLKAGDNVVICSRSAERVETAVQSLKEEFGEHVWGTKCDVTEGKDVRELVAYSQKNLKYIDIWINNAGSNAYSFKPLAEASDEDLIEVVKTNTLGLMLCCREAMNMMLTQSRGGHIFNIDGAGSDGRPTPRFAAYGATKRSVVHLTKSLQAELQMQDVKNVVVHNLSPGMVTTDLLMSGATTKQAKFFINVLAEPAEVVAEYLVPNIRAIPASGSMKPTYIRFLTGIKAYTKIFSRVALGARKNRYVTEE

SEQ ID NO: 29413 - DNA, 1221 bp, Arabidopsis thaliana
  misc_feature (1)..(1221): Ceres Seq. ID no. 12336049
  misc_feature: MA Experiment ID: 108434 Result: Up-regulated in Transcription
  misc_feature: MA Experiment 108434 PARAMETER Experiment Name: At_Root_Tips_cDNA_P Parameter: Tissue Value: Root Tips
  misc_feature: MA Experiment ID: 108462 Result: Down-regulated in Transcription
  misc_feature: MA Experiment 108462 PARAMETER Experiment Name: At_Germinating_Seeds_cDNA_P Parameter: Age (day) Value: 2 vs. 0
  misc_feature: MA Experiment 108462 PARAMETER Experiment Name: At_Germinating_Seeds_cDNA_P Parameter: Tissue Value: Germinating Seeds
  misc_feature: MA Experiment ID: 108463 Result: Down-regulated in Transcription
  misc_feature: MA Experiment 108463 PARAMETER Experiment Name: At_Germinating_Seeds_cDNA_P Parameter: Age (day) Value: 3 vs. 0
  misc_feature: MA Experiment 108463 PARAMETER Experiment Name: At_Germinating_Seeds_cDNA_P Parameter: Tissue Value: Germinating Seeds
  misc_feature: MA Experiment ID: 108464 Result: Down-regulated in Transcription
  misc_feature: MA Experiment 108464 PARAMETER Experiment Name: At_Germinating_Seeds_cDNA_P Parameter: Age (day) Value: 4 vs. 0
  misc_feature: MA Experiment 108464 PARAMETER Experiment Name: At_Germinating_Seeds_cDNA_P Parameter: Tissue Value: Germinating Seeds
  misc_feature: MA Experiment ID: 108573 Result: Down-regulated in Transcription
  misc_feature: MA Experiment 108573 PARAMETER Experiment Name: At_Drought_cDNA_P Parameter: Timepoint (hr) Value: 6
  misc_feature: MA Experiment 108573 PARAMETER Experiment Name: At_Drought_cDNA_P Parameter: Tissue Value: Aerial
  misc_feature: MA Experiment 108573 PARAMETER Experiment Name: At_Drought_cDNA_P Parameter: Treatment Value: Drought vs. No Drought
  misc_feature: MA Experiment ID: 108595 Result: Down-regulated in Transcription
  misc_feature: MA Experiment 108595 PARAMETER Experiment Name: At_Ler-pi_Ovule_cDNA_P Parameter: Plant Line Value: null
  misc_feature: MA Experiment ID: 20000227 Result: Up-regulated in Transcription
  misc_feature: MA Experiment 20000227 PARAMETER Experiment Name: At_Root-Tips-vs-Tops_P Parameter: Tissue Value: Root Tips vs. Root Tops
  misc_feature: Phenotype: WHOLE PLANT Size-Small
  misc_feature: Phenotype: WHOLE PLANT Size-Small
tagctcttcactgaaatctcataaaccctaaatccccaaaatggaataatcaaaatttcatcaggagatctctaaaatcgaaatctacttgatcccgcaacgaagaaatgttaagaagaagactcttgtcgatcatatcaacatcactcatcaattcttcgtttcatcaaaccgcgaaacccagattcatcatttcttcaccacttcttcaatgccgtccttctccgatctctactcaaattccgacctctacgagcagggctttgtcgtttcaaggaatcagggcttatagtttattgagcttgaacgatctgagagacaatgtgccgagaaaactcaagacgaggaaaggaagaggtattgggtctggtaaaggtaaaactgctggaagaggtcacaaggggcaaaaagcgagaggaacgatgaagtttggtttcgaaggtggtcagactccactacgacgtcgtttacccaaacgtggcttcaagaacaaatttaagctccattttcagccggttggtctagggaagattgctaaactcataaacgctgggaagatagattctcatgaattgattacaatgaaaacgctcaaggatgtgggagccataggaaagcaaatagaagatggagtaagactaatgggtcgtggtgctgatgatatcaaatggccacttcatttcgaggtttcgagagtgacggttagggccaaagaggtggtggaagcagcaggaggatcagtgagaagagtgtattacaacaagttgggcttaagggcattgcttaaaccggaatggtttgagaagaaaggaaggttattgccaaaagcagcgcgaccacctcctaaacaacaagataaggttgatagcattggacgtcttccagctccgaaaaaacccattcccttctttgcagctgaggagaccaaagttgaatctcctgttgaatcataattttgggctgccatttaacgtttgatgtttctgtttaagttgtttgtgttgtttcttggtcaatgttcaccactagaaaattgagaatgtcggattttaatttgacaaataaggtctttctcgttttactttatctgtagttggccacaacaagttattcaaccattttcagacttgttgtttgggatcaaggcctgttcttgtagaaggttgagaaaaccagagaacaatcacgttagatttgaattcattattatccggtttggtt

SEQ ID NO: 29414 - protein, 281 aa, Arabidopsis thaliana
  peptide (1)..(281): Ceres Seq. ID no. 12336050
  misc_feature (64)..(162): Pfam Name: Ribosomal protein L15 amino terminal region Pfam Description: Ribosomal protein L15 amino terminal region
  misc_feature (64)..(213): Homolog of NCBI NO: 27380492 NR Description: 50S ribosomal protein L15 [Bradyrhizobium
  misc_feature (64)..(213): Homolog of NCBI NO: 13470570 NR Description: 50S ribosomal protein L15 [Mesorhizobium loti]
  misc_feature (64)..(213): Homolog of NCBI NO: 22965142 NR Description: hypothetical protein [Rhodopseudomonas palustris]
  misc_feature (64)..(212): Homolog of NCBI NO: 23014069 NR Description: hypothetical protein [Magnetospirillum
  misc_feature (50)..(250): Homolog of NCBI NO: 6324045 NR Description: Mitochondrial ribosomal protein MRPL10 (YmL10);
  misc_feature (64)..(212): Homolog of NCBI NO: 22966103 NR Description: hypothetical protein [Rhodospirillum rubrum]
  misc_feature (64)..(213): Homolog of NCBI NO: 17987059 NR Description: LSU ribosomal protein L15P [Brucella melitensis]
  misc_feature (34)..(227): Homolog of NCBI NO: 32410177 NR Description: hypothetical protein [Neurospora crassa]
  misc_feature (1)..(271): Homolog of NCBI NO: 34015188 NR Description: putative ribosomal protein L15
  misc_feature (1)..(281): Homolog of NCBI NO: 15237756 NR Description: putative protein
MLRRRLLSIISTSLINSSFHQTAKPRFIISSPLLQCRPSPISTQIPTSTSRALSFQGIRAYSLLSLNDLRDNVPRKLKTRKGRGIGSGKGKTAGRGHKGQKARGTMKFGFEGGQTPLRRRLPKRGFKNKFKLHFQPVGLGKIAKLINAGKIDSHELITMKTLKDVGAIGKQIEDGVRLMGRGADDIKWPLHFEVSRVTVRAKEVVEAAGGSVRRVYYNKLGLRALLKPEWFEKKGRLLPKAARPPPKQQDKVDSIGRLPAPKKPIPFFAAEETKVESPVES

SEQ ID NO: 29415 - protein, 176 aa, Arabidopsis thaliana
  peptide (1)..(176): Ceres Seq. ID no. 12336051
  misc_feature (1)..(57): Pfam Name: Ribosomal protein L15 amino terminal region Pfam Description: Ribosomal protein L15 amino terminal region
  misc_feature (1)..(108): Homolog of NCBI NO: 27380492 NR Description: 50S ribosomal protein L15 [Bradyrhizobium
  misc_feature (1)..(108): Homolog of NCBI NO: 13470570 NR Description: 50S ribosomal protein L15 [Mesorhizobium loti]
  misc_feature (1)..(108): Homolog of NCBI NO: 22965142 NR Description: hypothetical protein [Rhodopseudomonas palustris]
  misc_feature (1)..(107): Homolog of NCBI NO: 23014069 NR Description: hypothetical protein [Magnetospirillum
  misc_feature (1)..(145): Homolog of NCBI NO: 6324045 NR Description: Mitochondrial ribosomal protein MRPL10 (YmL10);
  misc_feature (1)..(107): Homolog of NCBI NO: 22966103 NR Description: hypothetical protein [Rhodospirillum rubrum]
  misc_feature (1)..(108): Homolog of NCBI NO: 17987059 NR Description: LSU ribosomal protein L15P [Brucella melitensis]
  misc_feature (1)..(122): Homolog of NCBI NO: 32410177 NR Description: hypothetical protein [Neurospora crassa]
  misc_feature (1)..(166): Homolog of NCBI NO: 34015188 NR Description: putative ribosomal protein L15
  misc_feature (1)..(176): Homolog of NCBI NO: 15237756 NR Description: putative protein
MKFGFEGGQTPLRRRLPKRGFKNKFKLHFQPVGLGKIAKLINAGKIDSHELITMKTLKDVGAIGKQIEDGVRLMGRGADDIKWPLHFEVSRVTVRAKEVVEAAGGSVRRVYYNKLGLRALLKPEWFEKKGRLLPKAARPPPKQQDKVDSIGRLPAPKKPIPFFAAEETKVESPVES

SEQ ID NO: 29416 - DNA, 641 bp, Arabidopsis thaliana
  misc_feature (1)..(641): Ceres Seq. ID no. 13496822
  misc_feature: MA Experiment ID: 108595 Result: Down-regulated in Transcription
  misc_feature: MA Experiment 108595 PARAMETER Experiment Name: At_Ler-pi_Ovule_cDNA_P Parameter: Plant Line Value: null
  misc_feature: MA Experiment ID: 20000113 Result: Down-regulated in Transcription
  misc_feature: MA Experiment 20000113 PARAMETER Experiment Name: At_42deg_Heat_cDNA_P Parameter: Temperature (deg C) Value: 42 vs. 22
  misc_feature: MA Experiment 20000113 PARAMETER Experiment Name: At_42deg_Heat_cDNA_P Parameter: Timepoint (hr) Value: 8
  misc_feature: MA Experiment 20000113 PARAMETER Experiment Name: At_42deg_Heat_cDNA_P Parameter: Tissue Value: Aerial
  misc_feature: MA Experiment ID: 20000307 Result: Up-regulated in Transcription
  misc_feature: MA Experiment 20000307 PARAMETER Experiment Name: At_Germinating_Seeds_Sub_P Parameter: Age (hr) Value: 24 vs. 0
  misc_feature: MA Experiment 20000307 PARAMETER Experiment Name: At_Germinating_Seeds_Sub_P Parameter: Organism Value: A. thaliana
  misc_feature: MA Experiment 20000307 PARAMETER Experiment Name: At_Germinating_Seeds_Sub_P Parameter: Plant Line Value: WS
  misc_feature: MA Experiment 20000307 PARAMETER Experiment Name: At_Germinating_Seeds_Sub_P Parameter: Tissue Value: Germinating Seeds
  misc_feature: MA Experiment ID: 20000328 Result: Down-regulated in Transcription
  misc_feature: MA Experiment 20000328 PARAMETER Experiment Name: At_42deg_Heat_Sub_P Parameter: Age (day) Value: 14
  misc_feature: MA Experiment 20000328 PARAMETER Experiment Name: At_42deg_Heat_Sub_P Parameter: Organism Value: A. thaliana
  misc_feature: MA Experiment 20000328 PARAMETER Experiment Name: At_42deg_Heat_Sub_P Parameter: Plant Line Value: WS
  misc_feature: MA Experiment 20000328 PARAMETER Experiment Name: At_42deg_Heat_Sub_P Parameter: Temperature (deg C) Value: 42 vs. 22
  misc_feature: MA Experiment 20000328 PARAMETER Experiment Name: At_42deg_Heat_Sub_P Parameter: Timepoint (hr) Value: 6
  misc_feature: MA Experiment 20000328 PARAMETER Experiment Name: At_42deg_Heat_Sub_P Parameter: Tissue Value: Aerial
attacacacaccaacgttgattcttcttcttcttcttcttctctctttctcatctaaaccaaaaaatggcagatcagctcaccgatgatcagatctctgagttcaaggaagcttttagccttttcgacaaagacggagatggttgcatcacaacgaaagagctaggaacagtgatgagatcattaggtcaaaatccaacagaagcagagttacaagatatgataaacgaagtagatgctgatggtaacggaaccatagacttccctgagtttctgaacctaatggctaggaagatgaaggacactgactctgaagaagagctcaaagaagctttcagggttttcgataaggaccagaacggtttcatctcggcagctgagttaagacatgtaatgacaaatcttggtgagaagttaactgatgaagaagttgatgagatgatcaaagaagctgatgttgatggagatggtcagatcaattatgaagagtttgtcaaagttatgatggcaaagtgaggaaactattctcatatcttttctctctttttctttctttctttttttgaattgaacaactctgattattgctttattctatgtttgactgttcattattatgcattcgtcccaaatttcatgttg

SEQ ID NO: 29417 - protein, 149 aa, Arabidopsis thaliana
  peptide (1)..(149): Ceres Seq. ID no. 13496823
  misc_feature (12)..(40): Pfam Name: EF hand Pfam Description: EF hand
  misc_feature (1)..(149): Homolog of NCBI NO: 289525 NR Description: calmodulin
  misc_feature (1)..(149): Homolog of NCBI NO: 30688187 NR Description: calmodulin-6 (CAM6) [Arabidopsis thaliana]
  misc_feature (1)..(149): Homolog of NCBI NO: 3121849 NR Description: CALMODULIN
  misc_feature (1)..(149): Homolog of NCBI NO: 115515 NR Description: Calmodulin
  misc_feature (1)..(149): Homolog of NCBI NO: 34903134 NR Description: unnamed protein product [Oryza sativa (japonica
  misc_feature (1)..(149): Homolog of NCBI NO: 3121848 NR Description: CALMODULIN
  misc_feature (1)..(149): Homolog of NCBI NO: 34304715 NR Description: calmodulin 4 [Daucus carota]
  misc_feature (1)..(149): Homolog of NCBI NO: 15229784 NR Description: calmodulin [Arabidopsis thaliana]
  misc_feature (1)..(149): Homolog of NCBI NO: 30683369 NR Description: calmodulin [Arabidopsis thaliana]
  misc_feature (1)..(149): Homolog of NCBI NO: 15225840 NR Description: calmodulin [Arabidopsis thaliana]
MADQLTDDQISEFKEAFSLFDKDGDGCITTKELGTVMRSLGQNPTEAELQDMINEVDADGNGTIDFPEFLNLMARKMKDTDSEEELKEAFRVFDKDQNGFISAAELRHVMTNLGEKLTDEEVDEMIKEADVDGDGQINYEEFVKVMMAK

SEQ ID NO: 29418 - protein, 113 aa, Arabidopsis thaliana
  peptide (1)..(113): Ceres Seq. ID no. 13496824
  misc_feature (1)..(113): Homolog of NCBI NO: 289525 NR Description: calmodulin
  misc_feature (1)..(113): Homolog of NCBI NO: 30688187 NR Description: calmodulin-6 (CAM6) [Arabidopsis thaliana]
  misc_feature (1)..(113): Homolog of NCBI NO: 3121849 NR Description: CALMODULIN
  misc_feature (1)..(113): Homolog of NCBI NO: 115515 NR Description: Calmodulin
  misc_feature (1)..(113): Homolog of NCBI NO: 34903134 NR Description: unnamed protein product [Oryza sativa (japonica
  misc_feature (1)..(113): Homolog of NCBI NO: 3121848 NR Description: CALMODULIN
  misc_feature (1)..(113): Homolog of NCBI NO: 34304715 NR Description: calmodulin 4 [Daucus carota]
  misc_feature (1)..(113): Homolog of NCBI NO: 15229784 NR Description: calmodulin [Arabidopsis thaliana]
  misc_feature (1)..(113): Homolog of NCBI NO: 30683369 NR Description: calmodulin [Arabidopsis thaliana]
  misc_feature (1)..(113): Homolog of NCBI NO: 15225840 NR Description: calmodulin [Arabidopsis thaliana]
MRSLGQNPTEAELQDMINEVDADGNGTIDFPEFLNLMARKMKDTDSEEELKEAFRVFDKDQNGFISAAELRHVMTNLGEKLTDEEVDEMIKEADVDGDGQINYEEFVKVMMAK

SEQ ID NO: 29419 - protein, 98 aa, Arabidopsis thaliana
  peptide (1)..(98): Ceres Seq. ID no. 13496825
  misc_feature (1)..(98): Homolog of NCBI NO: 289525 NR Description: calmodulin
  misc_feature (1)..(98): Homolog of NCBI NO: 30688187 NR Description: calmodulin-6 (CAM6) [Arabidopsis thaliana]
  misc_feature (1)..(98): Homolog of NCBI NO: 3121849 NR Description: CALMODULIN
  misc_feature (1)..(98): Homolog of NCBI NO: 115515 NR Description: Calmodulin
  misc_feature (1)..(98): Homolog of NCBI NO: 34903134 NR Description: unnamed protein product [Oryza sativa (japonica
  misc_feature (1)..(98): Homolog of NCBI NO: 3121848 NR Description: CALMODULIN
  misc_feature (1)..(98): Homolog of NCBI NO: 34304715 NR Description: calmodulin 4 [Daucus carota]
  misc_feature (1)..(98): Homolog of NCBI NO: 15229784 NR Description: calmodulin [Arabidopsis thaliana]
  misc_feature (1)..(98): Homolog of NCBI NO: 30683369 NR Description: calmodulin [Arabidopsis thaliana]
  misc_feature (1)..(98): Homolog of NCBI NO: 15225840 NR Description: calmodulin [Arabidopsis thaliana]
MINEVDADGNGTIDFPEFLNLMARKMKDTDSEEELKEAFRVFDKDQNGFISAAELRHVMTNLGEKLTDEEVDEMIKEADVDGDGQINYEEFVKVMMAK

SEQ ID NO: 29420 - DNA, 812 bp, Arabidopsis thaliana
  misc_feature (1)..(812): Ceres Seq. ID no. 12332082
  misc_feature: MA Experiment ID: 108434 Result: Up-regulated in Transcription
  misc_feature: MA Experiment 108434 PARAMETER Experiment Name: At_Root_Tips_cDNA_P Parameter: Tissue Value: Root Tips
  misc_feature: MA Experiment ID: 108461 Result: Down-regulated in Transcription
  misc_feature: MA Experiment 108461 PARAMETER Experiment Name: At_Germinating_Seeds_cDNA_P Parameter: Age (day) Value: 1 vs. 0
  misc_feature: MA Experiment 108461 PARAMETER Experiment Name: At_Germinating_Seeds_cDNA_P Parameter: Tissue Value: Germinating Seeds
  misc_feature: MA Experiment ID: 108462 Result: Down-regulated in Transcription
  misc_feature: MA Experiment 108462 PARAMETER Experiment Name: At_Germinating_Seeds_cDNA_P Parameter: Age (day) Value: 2 vs. 0
  misc_feature: MA Experiment 108462 PARAMETER Experiment Name: At_Germinating_Seeds_cDNA_P Parameter: Tissue Value: Germinating Seeds
  misc_feature: MA Experiment ID: 108463 Result: Down-regulated in Transcription
  misc_feature: MA Experiment 108463 PARAMETER Experiment Name: At_Germinating_Seeds_cDNA_P Parameter: Age (day) Value: 3 vs. 0
  misc_feature: MA Experiment 108463 PARAMETER Experiment Name: At_Germinating_Seeds_cDNA_P Parameter: Tissue Value: Germinating Seeds
  misc_feature: MA Experiment ID: 108464 Result: Down-regulated in Transcription
  misc_feature: MA Experiment 108464 PARAMETER Experiment Name: At_Germinating_Seeds_cDNA_P Parameter: Age (day) Value: 4 vs. 0
  misc_feature: MA Experiment 108464 PARAMETER Experiment Name: At_Germinating_Seeds_cDNA_P Parameter: Tissue Value: Germinating Seeds
  misc_feature: MA Experiment ID: 108577 Result: Up-regulated in Transcription
  misc_feature: MA Experiment 108577 PARAMETER Experiment Name: At_42deg_Heat_cDNA_P Parameter: Temperature (deg C) Value: 42 vs. 22
  misc_feature: MA Experiment 108577 PARAMETER Experiment Name: At_42deg_Heat_cDNA_P Parameter: Timepoint (hr) Value: 6
  misc_feature: MA Experiment 108577 PARAMETER Experiment Name: At_42deg_Heat_cDNA_P Parameter: Tissue Value: Aerial
  misc_feature: MA Experiment ID: 20000111 Result: Up-regulated in Transcription
  misc_feature: MA Experiment 20000111 PARAMETER Experiment Name: At_42deg_Heat_cDNA_P Parameter: Temperature (deg C) Value: 42 vs. 22
  misc_feature: MA Experiment 20000111 PARAMETER Experiment Name: At_42deg_Heat_cDNA_P Parameter: Timepoint (hr) Value: 6
  misc_feature: MA Experiment 20000111 PARAMETER Experiment Name: At_42deg_Heat_cDNA_P Parameter: Tissue Value: Aerial
  misc_feature: MA Experiment ID: 20000113 Result: Up-regulated in Transcription
  misc_feature: MA Experiment 20000113 PARAMETER Experiment Name: At_42deg_Heat_cDNA_P Parameter: Temperature (deg C) Value: 42 vs. 22
  misc_feature: MA Experiment 20000113 PARAMETER Experiment Name: At_42deg_Heat_cDNA_P Parameter: Timepoint (hr) Value: 8
  misc_feature: MA Experiment 20000113 PARAMETER Experiment Name: At_42deg_Heat_cDNA_P Parameter: Tissue Value: Aerial
caatcgattttgtttgttctctgcttttttggtttagggttttagcttttcaaagttaaaaccttttttttcccgaagaagaatcaatacgactcaaatcaatcaattgaatctatggcgatggctatgagacttccagcgatatctagagctgtgacggaagtagcttcagctccggttggtttgagacgactgttctgttcaaatgcttcaaggttctcttttttgtctccacaagctgaatcccaaacaccggctcgtcctcaggctgaacctagcaccaatctcttcgtctccgggcttagtaagcgcaccacttctgaaggactaaggactgcttttgctcagtttggagaagttgctgatgctaaggttgtcacagacagagtatcaggatattccaaagggtttggatttgttagatatgccactttagaagattctgccaaaggcatagctggaatggacgggaagtttcttgacggttgggtcatattcgcagagtatgcaagaccgagagagcaatcacagtcatatcaacctcagaacaacatgtctcgtcctccatactatggtaaccgctagagaaacagttttcttcggttcttatgaatcttttatattcatatttatgcttcattctatcctcttctatgatcgaactgtgttgtgcttcgtctcgtgttattacctttagaagattaaaaacttcaaattatattttgaaggaataatcagaaactgtcatttacaaaaccaaagtattaagtgtaatagttttttaagaggaagaggattttgcttacatggtt

SEQ ID NO: 29421 - protein, 156 aa, Arabidopsis thaliana
  peptide (1)..(156): Ceres Seq. ID no. 12332083
  misc_feature (58)..(129): Pfam Name: RNA recognition motif. (a.k.a. RRM, RBD, or RNP domain) Pfam Description: RNA recognition motif. (a.k.a. RRM, RBD, or RNP
  misc_feature (55)..(120): Homolog of NCBI NO: 19881711 NR Description: Putative RNA-binding protein [Oryza sativa]
  misc_feature (56)..(156): Homolog of NCBI NO: 21388662 NR Description: glycine-rich RNA-binding protein [Physcomitrella
  misc_feature (55)..(136): Homolog of NCBI NO: 15239958 NR Description: RRM-containing protein
  misc_feature (34)..(135): Homolog of NCBI NO: 34906972 NR Description: putative glycine-rich RNA-binding protein 2
  misc_feature (36)..(150): Homolog of NCBI NO: 15219486 NR Description: RRM-containing RNA-binding protein, putative
  misc_feature (1)..(70): Homolog of NCBI NO: 15226161 NR Description: DEAD/DEAH box RNA helicase, putative; protein id:
  misc_feature (25)..(144): Homolog of NCBI NO: 15224298 NR Description: RRM-containing protein
  misc_feature (18)..(148): Homolog of NCBI NO: 34898598 NR Description: P0534A03.25 [Oryza sativa (japonica
  misc_feature (18)..(150): Homolog of NCBI NO: 38636774 NR Description: putative RNA recognition motif (RRM)-containing
  misc_feature (1)..(156): Homolog of NCBI NO: 15239676 NR Description: RRM-containing protein
MAMAMRLPAISRAVTEVASAPVGLRRLFCSNASRFSFLSPQAESQTPARPQAEPSTNLFVSGLSKRTTSEGLRTAFAQFGEVADAKVVTDRVSGYSKGFGFVRYATLEDSAKGIAGMDGKFLDGWVIFAEYARPREQSQSYQPQNNMSRPPYYGNR

SEQ ID NO: 29422 - protein, 154 aa, Arabidopsis thaliana
  peptide (1)..(154): Ceres Seq. ID no. 12332084
  misc_feature (56)..(127): Pfam Name: RNA recognition motif. (a.k.a. RRM, RBD, or RNP domain) Pfam Description: RNA recognition motif. (a.k.a. RRM, RBD, or RNP
  misc_feature (53)..(118): Homolog of NCBI NO: 19881711 NR Description: Putative RNA-binding protein [Oryza sativa]
  misc_feature (54)..(154): Homolog of NCBI NO: 21388662 NR Description: glycine-rich RNA-binding protein [Physcomitrella
  misc_feature (53)..(134): Homolog of NCBI NO: 15239958 NR Description: RRM-containing protein
  misc_feature (32)..(133): Homolog of NCBI NO: 34906972 NR Description: putative glycine-rich RNA-binding protein 2
  misc_feature (34)..(148): Homolog of NCBI NO: 15219486 NR Description: RRM-containing RNA-binding protein, putative
  misc_feature (1)..(68): Homolog of NCBI NO: 15226161 NR Description: DEAD/DEAH box RNA helicase, putative; protein id:
  misc_feature (23)..(142): Homolog of NCBI NO: 15224298 NR Description: RRM-containing protein
  misc_feature (16)..(146): Homolog of NCBI NO: 34898598 NR Description: P0534A03.25 [Oryza sativa (japonica
  misc_feature (16)..(148): Homolog of NCBI NO: 38636774 NR Description: putative RNA recognition motif (RRM)-containing
  misc_feature (1)..(154): Homolog of NCBI NO: 15239676 NR Description: RRM-containing protein
MAMRLPAISRAVTEVASAPVGLRRLFCSNASRFSFLSPQAESQTPARPQAEPSTNLFVSGLSKRTTSEGLRTAFAQFGEVADAKVVTDRVSGYSKGFGFVRYATLEDSAKGIAGMDGKFLDGWVIFAEYARPREQSQSYQPQNNMSRPPYYGNR

SEQ ID NO: 29423 - protein, 152 aa, Arabidopsis thaliana
  peptide (1)..(152): Ceres Seq. ID no. 12332085
  misc_feature (54)..(125): Pfam Name: RNA recognition motif. (a.k.a. RRM, RBD, or RNP domain) Pfam Description: RNA recognition motif. (a.k.a. RRM, RBD, or RNP
  misc_feature (51)..(116): Homolog of NCBI NO: 19881711 NR Description: Putative RNA-binding protein [Oryza sativa]
  misc_feature (52)..(152): Homolog of NCBI NO: 21388662 NR Description: glycine-rich RNA-binding protein [Physcomitrella
  misc_feature (51)..(132): Homolog of NCBI NO: 15239958 NR Description: RRM-containing protein
  misc_feature (30)..(131): Homolog of NCBI NO: 34906972 NR Description: putative glycine-rich RNA-binding protein 2
  misc_feature (32)..(146): Homolog of NCBI NO: 15219486 NR Description: RRM-containing RNA-binding protein, putative
  misc_feature (1)..(66): Homolog of NCBI NO: 15226161 NR Description: DEAD/DEAH box RNA helicase, putative; protein id:
  misc_feature (21)..(140): Homolog of NCBI NO: 15224298 NR Description: RRM-containing protein
  misc_feature (14)..(144): Homolog of NCBI NO: 34898598 NR Description: P0534A03.25 [Oryza sativa (japonica
  misc_feature (14)..(146): Homolog of NCBI NO: 38636774 NR Description: putative RNA recognition motif (RRM)-containing
  misc_feature (1)..(152): Homolog of NCBI NO: 15239676 NR Description: RRM-containing protein
MRLPAISRAVTEVASAPVGLRRLFCSNASRFSFLSPQAESQTPARPQAEPSTNLFVSGLSKRTTSEGLRTAFAQFGEVADAKVVTDRVSGYSKGFGFVRYATLEDSAKGIAGMDGKFLDGWVIFAEYARPREQSQSYQPQNNMSRPPYYGNR

SEQ ID NO: 29424 - DNA, 998 bp, Arabidopsis thaliana
  misc_feature (1)..(998): Ceres Seq. ID no. 12321343
  misc_feature: MA Experiment ID: 20000184 Result: Down-regulated in Transcription
  misc_feature: MA Experiment 20000184 PARAMETER Experiment Name: At_Shoots__P Parameter: Age (day) Value: 7
  misc_feature: MA Experiment 20000184 PARAMETER Experiment Name: At_Shoots__P Parameter: Tissue Value: Shoots vs. Whole Plant
acaaataacaacaacaatttcgccggcgtcgtcgtcgtcgtctctccatcaccgtctctgctgcattgattcgcagcactgagtcctaaatttccagtgtaaaaaaaaatcagaaaatggacaacttggaagatttgaagattgtggcagagcagtggtctaaacaaggacttgaatttgttcaaaaaataccaccacctcagctttatactgccattggtgttctcttattagctaccatttggctcttatctattcgtttgtttagacgtacaaaatccaatactgtactcctctctgggctaagtggaagtggcaaaacagttctcttctatcaactacgagatggatcttcccatcagggtgctgtaacgtcaatggaaccgaacgaaggcacctttgtgcttcacaatgaaaacaacactaagaaaggaaaagtaaagcctgttcatcttattgatgttcctggacactctcggcttatatctaagctagaagaatacttgcctcgagccgccgctgttgtgtttgtagtagatgcattggagttcctcccaaatatccgggcagcttcagagtacctttacgacattctgaccaatgctagcgttattaagaataagaccccggttctgctttgctgtaacaagacagataaagtaactgcacacaccaaagagttcatccgcaagcagatggagaaagaaatagataaacttagggtttcgaggagcgcaatatcaacagctgatatagcgaatgacttcactcttgggattgaaggagaagtgttttccttttcgcattgccataacaaagtcacggtcgctgaggcgtctggactaacaggagaaacagatcaggtacaagagttcatcagagaacacgtaaagccatgaggattgtgtaagcatctcagagaatgtacttaaatgtcttttcatttgtttgtaaatgaaattataatttgagaacttagatgatattcgttggaaggc

SEQ ID NO: 29425 - protein, 260 aa, Arabidopsis thaliana
  peptide (1)..(260): Ceres Seq. ID no. 12321344
  misc_feature (60)..(194): Pfam Name: ADP-ribosylation factor family Pfam Description: ADP-ribosylation factor family
  misc_feature (22)..(248): Homolog of NCBI NO: 14042265 NR Description: unnamed protein product [Homo sapiens]
  misc_feature (22)..(248): Homolog of NCBI NO: 27721301 NR Description: similar to signal recognition particle receptor,
  misc_feature (22)..(248): Homolog of NCBI NO: 12842535 NR Description: unnamed protein product [Mus musculus]
  misc_feature (22)..(248): Homolog of NCBI NO: 6678137 NR Description: signal recognition particle receptor, B subunit
  misc_feature (22)..(241): Homolog of NCBI NO: 38174090 NR Description: Unknown (protein for MGC:75930) [Silurana
  misc_feature (22)..(248): Homolog of NCBI NO: 38649415 NR Description: Signal recognition particle receptor, beta
  misc_feature (22)..(248): Homolog of NCBI NO: 31340540 NR Description: Signal recognition particle receptor beta subunit
  misc_feature (19)..(241): Homolog of NCBI NO: 32450191 NR Description: Unknown (protein for MGC:64420) [Xenopus laevis]
  misc_feature (1)..(260): Homolog of NCBI NO: 15239201 NR Description: signal recognition particle receptor beta
  misc_feature (1)..(260): Homolog of NCBI NO: 15224229 NR Description: putative signal recognition particle receptor
MDNLEDLKIVAEQWSKQGLEFVQKIPPPQLYTAIGVLLLATIWLLSIRLFRRTKSNTVLLSGLSGSGKTVLFYQLRDGSSHQGAVTSMEPNEGTFVLHNENNTKKGKVKPVHLIDVPGHSRLISKLEEYLPRAAAVVFVVDALEFLPNIRAASEYLYDILTNASVIKNKTPVLLCCNKTDKVTAHTKEFIRKQMEKEIDKLRVSRSAISTADIANDFTLGIEGEVFSFSHCHNKVTVAEASGLTGETDQVQEFIREHVKP

SEQ ID NO: 29426 - protein, 173 aa, Arabidopsis thaliana
  peptide (1)..(173): Ceres Seq. ID no. 12321345
  misc_feature (1)..(107): Pfam Name: ADP-ribosylation factor family Pfam Description: ADP-ribosylation factor family
  misc_feature (1)..(161): Homolog of NCBI NO: 14042265 NR Description: unnamed protein product [Homo sapiens]
  misc_feature (1)..(161): Homolog of NCBI NO: 12842535 NR Description: unnamed protein product [Mus musculus]
  misc_feature (1)..(161): Homolog of NCBI NO: 27721301 NR Description: similar to signal recognition particle receptor,
  misc_feature (1)..(161): Homolog of NCBI NO: 6678137 NR Description: signal recognition particle receptor, B subunit
  misc_feature (1)..(154): Homolog of NCBI NO: 38174090 NR Description: Unknown (protein for MGC:75930) [Silurana
  misc_feature (1)..(161): Homolog of NCBI NO: 38649415 NR Description: Signal recognition particle receptor, beta
  misc_feature (1)..(161): Homolog of NCBI NO: 31340540 NR Description: Signal recognition particle receptor beta subunit
  misc_feature (1)..(154): Homolog of NCBI NO: 32450191 NR Description: Unknown (protein for MGC:64420) [Xenopus laevis]
  misc_feature (1)..(173): Homolog of NCBI NO: 15239201 NR Description: signal recognition particle receptor beta
  misc_feature (1)..(173): Homolog of NCBI NO: 15224229 NR Description: putative signal recognition particle receptor
MEPNEGTFVLHNENNTKKGKVKPVHLIDVPGHSRLISKLEEYLPRAAAVVFVVDALEFLPNIRAASEYLYDILTNASVIKNKTPVLLCCNKTDKVTAHTKEFIRKQMEKEIDKLRVSRSAISTADIANDFTLGIEGEVFSFSHCHNKVTVAEASGLTGETDQVQEFIREHVKP

SEQ ID NO: 29427 - DNA, 1133 bp, Arabidopsis thaliana; identical to SEQ ID NO: 29056
  misc_feature (1)..(1133): Ceres Seq. ID no. 12336045
  misc_feature: MA Experiment ID: 20000182 Result: Down-regulated in Transcription
  misc_feature: MA Experiment 20000182 PARAMETER Experiment Name: At_2mM_SA_P Parameter: Age (day) Value: 14
  misc_feature: MA Experiment 20000182 PARAMETER Experiment Name: At_2mM_SA_P Parameter: Organism Value: A. thaliana
  misc_feature: MA Experiment 20000182 PARAMETER Experiment Name: At_2mM_SA_P Parameter: Plant Line Value: WS
  misc_feature: MA Experiment 20000182 PARAMETER Experiment Name: At_2mM_SA_P Parameter: Timepoint (hr) Value: 6
  misc_feature: MA Experiment 20000182 PARAMETER Experiment Name: At_2mM_SA_P Parameter: Tissue Value: Aerial
  misc_feature: MA Experiment 20000182 PARAMETER Experiment Name: At_2mM_SA_P Parameter: Treatment Value: 2mM SA vs. No Treatment
  misc_feature: MA Experiment ID: 20000184 Result: Up-regulated in Transcription
  misc_feature: MA Experiment 20000184 PARAMETER Experiment Name: At_Shoots__P Parameter: Age (day) Value: 7
  misc_feature: MA Experiment 20000184 PARAMETER Experiment Name: At_Shoots__P Parameter: Tissue Value: Shoots vs. Whole Plant
  misc_feature: MA Experiment ID: 20000234 Result: Down-regulated in Transcription
  misc_feature: MA Experiment 20000234 PARAMETER Experiment Name: At_Siliques_P Parameter: Age (day) Value: 21
  misc_feature: MA Experiment 20000234 PARAMETER Experiment Name: At_Siliques_P Parameter: Organism Value: A. thaliana
  misc_feature: MA Experiment 20000234 PARAMETER Experiment Name: At_Siliques_P Parameter: Plant Line Value: WS
  misc_feature: MA Experiment 20000234 PARAMETER Experiment Name: At_Siliques_P Parameter: Tissue Value: Less Than 5mm Siliques vs. Whole Plant
  misc_feature: MA Experiment ID: 20000235 Result: Down-regulated in Transcription
  misc_feature: MA Experiment 20000235 PARAMETER Experiment Name: At_Siliques_P Parameter: Age (day) Value: 21
  misc_feature: MA Experiment 20000235 PARAMETER Experiment Name: At_Siliques_P Parameter: Organism Value: A. thaliana
  misc_feature: MA Experiment 20000235 PARAMETER Experiment Name: At_Siliques_P Parameter: Plant Line Value: WS
  misc_feature: MA Experiment 20000235 PARAMETER Experiment Name: At_Siliques_P Parameter: Tissue Value: 5-10mm Siliques vs. Whole Plant
  misc_feature: MA Experiment ID: 20000264 Result: Down-regulated in Transcription
  misc_feature: MA Experiment 20000264 PARAMETER Experiment Name: At_Open_Flower_P Parameter: Age (day) Value: 21
  misc_feature: MA Experiment 20000264 PARAMETER Experiment Name: At_Open_Flower_P Parameter: Plant Line Value: WS
  misc_feature: MA Experiment 20000264 PARAMETER Experiment Name: At_Open_Flower_P Parameter: Tissue Value: Open Flower vs. Whole Plant
  misc_feature: MA Experiment ID: 20000265 Result: Down-regulated in Transcription
  misc_feature: MA Experiment 20000265 PARAMETER Experiment Name: At_Open_Flower_P Parameter: Age (day) Value: 21
  misc_feature: MA Experiment 20000265 PARAMETER Experiment Name: At_Open_Flower_P Parameter: Plant Line Value: WS
  misc_feature: MA Experiment 20000265 PARAMETER Experiment Name: At_Open_Flower_P Parameter: Tissue Value: Closed Flower vs. Whole Plant
  misc_feature: MA Experiment ID: 20000308 Result: Down-regulated in Transcription
  misc_feature: MA Experiment 20000308 PARAMETER Experiment Name: At_100mM_NaCl__P Parameter: Age (day) Value: 17
  misc_feature: MA Experiment 20000308 PARAMETER Experiment Name: At_100mM_NaCl__P Parameter: Organism Value: A. thaliana
  misc_feature: MA Experiment 20000308 PARAMETER Experiment Name: At_100mM_NaCl__P Parameter: Plant Line Value: WS
  misc_feature: MA Experiment 20000308 PARAMETER Experiment Name: At_100mM_NaCl__P Parameter: Timepoint (hr) Value: 72
  misc_feature: MA Experiment 20000308 PARAMETER Experiment Name: At_100mM_NaCl__P Parameter: Tissue Value: Whole Plant
  misc_feature: MA Experiment 20000308 PARAMETER Experiment Name: At_100mM_NaCl__P Parameter: Treatment Value: 100mM NaCl vs. No Treatment
  misc_feature: MA Experiment ID: 20001247 Result: Up-regulated in Transcription
  misc_feature: MA Experiment 20001247 PARAMETER Experiment Name: At_Far-red-induction_P Parameter: Age (day) Value: 7
  misc_feature: MA Experiment 20001247 PARAMETER Experiment Name: At_Far-red-induction_P Parameter: Light Value: Far-red vs. White
  misc_feature: MA Experiment 20001247 PARAMETER Experiment Name: At_Far-red-induction_P Parameter: Organism Value: A. thaliana
  misc_feature: MA Experiment 20001247 PARAMETER Experiment Name: At_Far-red-induction_P Parameter: Plant Line Value: Columbia
  misc_feature: MA Experiment 20001247 PARAMETER Experiment Name: At_Far-red-induction_P Parameter: Timepoint (hr) Value: 1
  misc_feature: MA Experiment 20001247 PARAMETER Experiment Name: At_Far-red-induction_P Parameter: Tissue Value: Whole Plant
  misc_feature: MA Experiment ID: 20001450 Result: Up-regulated in Transcription
  misc_feature: MA Experiment 20001450 PARAMETER Experiment Name: At_Far-red-induction_P Parameter: Age (day) Value: 7
  misc_feature: MA Experiment 20001450 PARAMETER Experiment Name: At_Far-red-induction_P Parameter: Light Value: Far-red vs. White
  misc_feature: MA Experiment 20001450 PARAMETER Experiment Name: At_Far-red-induction_P Parameter: Organism Value: A. thaliana
  misc_feature: MA Experiment 20001450 PARAMETER Experiment Name: At_Far-red-induction_P Parameter: Plant Line Value: Columbia
  misc_feature: MA Experiment 20001450 PARAMETER Experiment Name: At_Far-red-induction_P Parameter: Timepoint (hr) Value: 8
  misc_feature: MA Experiment 20001450 PARAMETER Experiment Name: At_Far-red-induction_P Parameter: Tissue Value: Whole Plant
  misc_feature: MA Experiment ID: 20001451 Result: Up-regulated in Transcription
  misc_feature: MA Experiment 20001451 PARAMETER Experiment Name: At_Far-red-induction_P Parameter: Age (day) Value: 7
  misc_feature: MA Experiment 20001451 PARAMETER Experiment Name: At_Far-red-induction_P Parameter: Light Value: Far-red vs. White
  misc_feature: MA Experiment 20001451 PARAMETER Experiment Name: At_Far-red-induction_P Parameter: Organism Value: A. thaliana
  misc_feature: MA Experiment 20001451 PARAMETER Experiment Name: At_Far-red-induction_P Parameter: Plant Line Value: Columbia
  misc_feature: MA Experiment 20001451 PARAMETER Experiment Name: At_Far-red-induction_P Parameter: Timepoint (hr) Value: 24
  misc_feature: MA Experiment 20001451 PARAMETER Experiment Name: At_Far-red-induction_P Parameter: Tissue Value: Whole Plant
  misc_feature: MA Experiment ID: 20001555 Result: Down-regulated in Transcription
  misc_feature: MA Experiment 20001555 PARAMETER Experiment Name: At_Drought_Soil_Dry_P Parameter: Age (day) Value: 24
  misc_feature: MA Experiment 20001555 PARAMETER Experiment Name: At_Drought_Soil_Dry_P Parameter: Organism Value: A. thaliana
  misc_feature: MA Experiment 20001555 PARAMETER Experiment Name: At_Drought_Soil_Dry_P Parameter: Plant Line Value: WS
  misc_feature: MA Experiment 20001555 PARAMETER Experiment Name: At_Drought_Soil_Dry_P Parameter: Post Timepoint (hr) Value: None
  misc_feature: MA Experiment 20001555 PARAMETER Experiment Name: At_Drought_Soil_Dry_P Parameter: Post-Treatment Value: None
  misc_feature: MA Experiment 20001555 PARAMETER Experiment Name: At_Drought_Soil_Dry_P Parameter: Timepoint (day) Value: 10
  misc_feature: MA Experiment 20001555 PARAMETER Experiment Name: At_Drought_Soil_Dry_P Parameter: Treatment Value: Drought vs. No Drought
  misc_feature: MA Experiment ID: 20001556 Result: Down-regulated in Transcription
  misc_feature: MA Experiment 20001556 PARAMETER Experiment Name: At_Drought_Soil_Dry_P Parameter: Age (day) Value: 26
  misc_feature: MA Experiment 20001556 PARAMETER Experiment Name: At_Drought_Soil_Dry_P Parameter: Organism Value: A. thaliana
  misc_feature: MA Experiment 20001556 PARAMETER Experiment Name: At_Drought_Soil_Dry_P Parameter: Plant Line Value: WS
  misc_feature: MA Experiment 20001556 PARAMETER Experiment Name: At_Drought_Soil_Dry_P Parameter: Post Timepoint (hr) Value: None
  misc_feature: MA Experiment 20001556 PARAMETER Experiment Name: At_Drought_Soil_Dry_P Parameter: Post-Treatment Value: None
  misc_feature: MA Experiment 20001556 PARAMETER Experiment Name: At_Drought_Soil_Dry_P Parameter: Timepoint (day) Value: 12
  misc_feature: MA Experiment 20001556 PARAMETER Experiment Name: At_Drought_Soil_Dry_P Parameter: Treatment Value: Drought vs. No Drought
  misc_feature: MA Experiment ID: 20001558 Result: Down-regulated in Transcription
  misc_feature: MA Experiment 20001558 PARAMETER Experiment Name: At_Drought_Soil_Dry_P Parameter: Age (day) Value: 27
  misc_feature: MA Experiment 20001558 PARAMETER Experiment Name: At_Drought_Soil_Dry_P Parameter: Organism Value: A. thaliana
  misc_feature: MA Experiment 20001558 PARAMETER Experiment Name: At_Drought_Soil_Dry_P Parameter: Plant Line Value: WS
  misc_feature: MA Experiment 20001558 PARAMETER Experiment Name: At_Drought_Soil_Dry_P Parameter: Post Timepoint (hr) Value: 6
  misc_feature: MA Experiment 20001558 PARAMETER Experiment Name: At_Drought_Soil_Dry_P Parameter: Post-Treatment Value: Re-Water vs. No Drought
  misc_feature: MA Experiment 20001558 PARAMETER Experiment Name: At_Drought_Soil_Dry_P Parameter: Timepoint (day) Value: 13
  misc_feature: MA Experiment 20001558 PARAMETER Experiment Name: At_Drought_Soil_Dry_P Parameter: Treatment Value: Drought vs. No Drought
  misc_feature: MA Experiment ID: 20001904 Result: Down-regulated in Transcription
  misc_feature: MA Experiment 20001904 PARAMETER Experiment Name: At_Drought_Reproduction_P Parameter: Age (day) Value: 37
  misc_feature: MA Experiment 20001904 PARAMETER Experiment Name: At_Drought_Reproduction_P Parameter: Organism Value: A. thaliana
  misc_feature: MA Experiment 20001904 PARAMETER Experiment Name: At_Drought_Reproduction_P Parameter: Plant Line Value: WS
  misc_feature: MA Experiment 20001904 PARAMETER Experiment Name: At_Drought_Reproduction_P Parameter: Timepoint (day) Value: 7
  misc_feature: MA Experiment 20001904 PARAMETER Experiment Name: At_Drought_Reproduction_P Parameter: Tissue Value: Rosettes
  misc_feature: MA Experiment 20001904 PARAMETER Experiment Name: At_Drought_Reproduction_P Parameter: Treatment Value: Drought vs. No Drought

SEQ ID NO: 29428 - protein, 285 aa, Arabidopsis thaliana; identical to SEQ ID NO: 29057
  peptide (1)..(285): Ceres Seq. ID no. 12336046
  misc_feature (20)..(284): Pfam Name: Plant protein of unknown function (DUF868) Pfam Description: Plant protein of unknown function (DUF868)
  misc_feature (20)..(284): Pfam Name: Plant protein of unknown function (DUF868) Pfam Description: Plant protein of unknown function (DUF868)
  misc_feature (20)..(284): Pfam Name: Plant protein of unknown function (DUF868) Pfam Description: Plant protein of unknown function (DUF868)
  misc_feature (21)..(285): Homolog of NCBI NO: 18397034 NR Description: expressed protein
  misc_feature (21)..(285): Homolog of NCBI NO: 15241702 NR Description: putative protein
  misc_feature (25)..(283): Homolog of NCBI NO: 22331055 NR Description: hypothetical protein; protein id: At3g13229.1
  misc_feature (1)..(65): Homolog of NCBI NO: 20804936 NR Description: P0456E05.14 [Oryza sativa (japonica
  misc_feature (70)..(285): Homolog of NCBI NO: 20804936 NR Description: P0456E05.14 [Oryza sativa (japonica
  misc_feature (21)..(285): Homolog of NCBI NO: 18397034 NR Description: expressed protein
  misc_feature (25)..(283): Homolog of NCBI NO: 22331055 NR Description: hypothetical protein; protein id: At3g13229.1
  misc_feature (70)..(285): Homolog of NCBI NO: 20804936 NR Description: P0456E05.14 [Oryza sativa (japonica
  misc_feature (1)..(65): Homolog of NCBI NO: 20804936 NR Description: P0456E05.14 [Oryza sativa (japonica
  misc_feature (25)..(283): Homolog of NCBI NO: 22331055 NR Description: hypothetical protein; protein id: At3g13229.1
  misc_feature (21)..(285): Homolog of NCBI NO: 15241702 NR Description: putative protein
  misc_feature (21)..(285): Homolog of NCBI NO: 18397034 NR Description: expressed protein
  misc_feature (1)..(285): Homolog of NCBI NO: 15235452 NR Description: putative protein
  misc_feature (4)..(259): Homolog of NCBI NO: 15228105 NR Description: hypothetical protein; protein id: At2g04220.1
  misc_feature (1)..(250): Homolog of NCBI NO: 15238927 NR Description: putative protein; protein id: At5g48270.1
  misc_feature (251)..(285): Homolog of NCBI NO: 15238927 NR Description: putative protein; protein id: At5g48270.1
  misc_feature (58)..(259): Homolog of NCBI NO: 25334990 NR Description: hypothetical protein At2g04220 [imported] -
  misc_feature (1)..(285): Homolog of NCBI NO: 15235452 NR Description: putative protein
  misc_feature (4)..(259): Homolog of NCBI NO: 15228105 NR Description: hypothetical protein; protein id: At2g04220.1
  misc_feature (1)..(250): Homolog of NCBI NO: 15238927 NR Description: putative protein; protein id: At5g48270.1
  misc_feature (251)..(285): Homolog of NCBI NO: 15238927 NR Description: putative protein; protein id: At5g48270.1
  misc_feature (58)..(259): Homolog of NCBI NO: 25334990 NR Description: hypothetical protein At2g04220 [imported] -
  misc_feature (70)..(285): Homolog of NCBI NO: 20804936 NR Description: P0456E05.14 [Oryza sativa (japonica
  misc_feature (1)..(65): Homolog of NCBI NO: 20804936 NR Description: P0456E05.14 [Oryza sativa (japonica
  misc_feature (21)..(285): Homolog of NCBI NO: 15241702 NR Description: putative protein
  misc_feature (58)..(259): Homolog of NCBI NO: 25334990 NR Description: hypothetical protein At2g04220 [imported] -
  misc_feature (251)..(285): Homolog of NCBI NO: 15238927 NR Description: putative protein; protein id: At5g48270.1
  misc_feature (1)..(250): Homolog of NCBI NO: 15238927 NR Description: putative protein; protein id: At5g48270.1
  misc_feature (4)..(259): Homolog of NCBI NO: 15228105 NR Description: hypothetical protein; protein id: At2g04220.1
  misc_feature (1)..(285): Homolog of NCBI NO: 15235452 NR Description: putative protein

SEQ ID NO: 29429 - protein, 251 aa, Arabidopsis thaliana; identical to SEQ ID NO: 29058
  peptide (1)..(251): Ceres Seq. ID no. 12336047
  misc_feature (1)..(250): Pfam Name: Plant protein of unknown function (DUF868) Pfam Description: Plant protein of unknown function (DUF868)
  misc_feature (1)..(250): Pfam Name: Plant protein of unknown function (DUF868) Pfam Description: Plant protein of unknown function (DUF868)
  misc_feature (1)..(250): Pfam Name: Plant protein of unknown function (DUF868) Pfam Description: Plant protein of unknown function (DUF868)
  misc_feature (1)..(251): Homolog of NCBI NO: 18397034 NR Description: expressed protein
  misc_feature (1)..(251): Homolog of NCBI NO: 15241702 NR Description: putative protein
  misc_feature (1)..(249): Homolog of NCBI NO: 22331055 NR Description: hypothetical protein; protein id: At3g13229.1
  misc_feature (1)..(31): Homolog of NCBI NO: 20804936 NR Description: P0456E05.14 [Oryza sativa (japonica
  misc_feature (36)..(251): Homolog of NCBI NO: 20804936 NR Description: P0456E05.14 [Oryza sativa (japonica
  misc_feature (1)..(251): Homolog of NCBI NO: 18397034 NR Description: expressed protein
  misc_feature (1)..(249): Homolog of NCBI NO: 22331055 NR Description: hypothetical protein; protein id: At3g13229.1
  misc_feature (36)..(251): Homolog of NCBI NO: 20804936 NR Description: P0456E05.14 [Oryza sativa (japonica
  misc_feature (1)..(31): Homolog of NCBI NO: 20804936 NR Description: P0456E05.14 [Oryza sativa (japonica
  misc_feature (1)..(249): Homolog of NCBI NO: 22331055 NR Description: hypothetical protein; protein id: At3g13229.1
  misc_feature (1)..(251): Homolog of NCBI NO: 15241702 NR Description: putative protein
  misc_feature (1)..(251): Homolog of NCBI NO: 18397034 NR Description: expressed protein
  misc_feature (1)..(251): Homolog of NCBI NO: 15235452 NR Description: putative protein
  misc_feature (1)..(225): Homolog of NCBI NO: 15228105 NR Description: hypothetical protein; protein id: At2g04220.1
  misc_feature (1)..(216): Homolog of NCBI NO: 15238927 NR Description: putative protein; protein id: At5g48270.1
  misc_feature (217)..(251): Homolog of NCBI NO: 15238927 NR Description: putative protein; protein id: At5g48270.1
  misc_feature (24)..(225): Homolog of NCBI NO: 25334990 NR Description: hypothetical protein At2g04220 [imported] -
  misc_feature (1)..(251): Homolog of NCBI NO: 15235452 NR Description: putative protein
  misc_feature (1)..(225): Homolog of NCBI NO: 15228105 NR Description: hypothetical protein; protein id: At2g04220.1
  misc_feature (1)..(216): Homolog of NCBI NO: 15238927 NR Description: putative protein; protein id: At5g48270.1
  misc_feature (217)..(251): Homolog of NCBI NO: 15238927 NR Description: putative protein; protein id: At5g48270.1
  misc_feature (24)..(225): Homolog of NCBI NO: 25334990 NR Description: hypothetical protein At2g04220 [imported] -
  misc_feature (36)..(251): Homolog of NCBI NO: 20804936 NR Description: P0456E05.14 [Oryza sativa (japonica
  misc_feature (1)..(31): Homolog of NCBI NO: 20804936 NR Description: P0456E05.14 [Oryza sativa (japonica
  misc_feature (1)..(251): Homolog of NCBI NO: 15241702 NR Description: putative protein
  misc_feature (24)..(225): Homolog of NCBI NO: 25334990 NR Description: hypothetical protein At2g04220 [imported] -
  misc_feature (217)..(251): Homolog of NCBI NO: 15238927 NR Description: putative protein; protein id: At5g48270.1
  misc_feature (1)..(216): Homolog of NCBI NO: 15238927 NR Description: putative protein; protein id: At5g48270.1
  misc_feature (1)..(225): Homolog of NCBI NO: 15228105 NR Description: hypothetical protein; protein id: At2g04220.1
  misc_feature (1)..(251): Homolog of NCBI NO: 15235452 NR Description: putative protein

SEQ ID NO: 29430 - protein, 235 aa, Arabidopsis thaliana; identical to SEQ ID NO: 29059
  peptide (1)..(235): Ceres Seq. ID no. 12336048
  misc_feature (1)..(234): Pfam Name: Plant protein of unknown function (DUF868) Pfam Description: Plant protein of unknown function (DUF868)
  misc_feature (1)..(234): Pfam Name: Plant protein of unknown function (DUF868) Pfam Description: Plant protein of unknown function (DUF868)
  misc_feature (1)..(234): Pfam Name: Plant protein of unknown function (DUF868) Pfam Description: Plant protein of unknown function (DUF868)
  misc_feature (1)..(235): Homolog of NCBI NO: 18397034 NR Description: expressed protein
  misc_feature (1)..(235): Homolog of NCBI NO: 15241702 NR Description: putative protein
  misc_feature (1)..(233): Homolog of NCBI NO: 22331055 NR Description: hypothetical protein; protein id: At3g13229.1
  misc_feature (1)..(15): Homolog of NCBI NO: 20804936 NR Description: P0456E05.14 [Oryza sativa (japonica
  misc_feature (20)..(235): Homolog of NCBI NO: 20804936 NR Description: P0456E05.14 [Oryza sativa (japonica
  misc_feature (1)..(235): Homolog of NCBI NO: 18397034 NR Description: expressed protein
  misc_feature (1)..(233): Homolog of NCBI NO: 22331055 NR Description: hypothetical protein; protein id: At3g13229.1
  misc_feature (20)..(235): Homolog of NCBI NO: 20804936 NR Description: P0456E05.14 [Oryza sativa (japonica
  misc_feature (1)..(15): Homolog of NCBI NO: 20804936 NR Description: P0456E05.14 [Oryza sativa (japonica
  misc_feature (1)..(233): Homolog of NCBI NO: 22331055 NR Description: hypothetical protein; protein id: At3g13229.1
  misc_feature (1)..(235): Homolog of NCBI NO: 15241702 NR Description: putative protein
  misc_feature (1)..(235): Homolog of NCBI NO: 18397034 NR Description: expressed protein
  misc_feature (1)..(235): Homolog of NCBI NO: 15235452 NR Description: putative protein
  misc_feature (1)..(209): Homolog of NCBI NO: 15228105 NR Description: hypothetical protein; protein id: At2g04220.1
  misc_feature (1)..(200): Homolog of NCBI NO: 15238927 NR Description: putative protein; protein id: At5g48270.1
  misc_feature (201)..(235): Homolog of NCBI NO: 15238927 NR Description: putative protein; protein id: At5g48270.1
  misc_feature (8)..(209): Homolog of NCBI NO: 25334990 NR Description: hypothetical protein At2g04220 [imported] -
  misc_feature (1)..(235): Homolog of NCBI NO: 15235452 NR Description: putative protein
  misc_feature (1)..(209): Homolog of NCBI NO: 15228105 NR Description: hypothetical protein; protein id: At2g04220.1
  misc_feature (1)..(200): Homolog of NCBI NO: 15238927 NR Description: putative protein; protein id: At5g48270.1
  misc_feature (201)..(235): Homolog of NCBI NO: 15238927 NR Description: putative protein; protein id: At5g48270.1
  misc_feature (8)..(209): Homolog of NCBI NO: 25334990 NR Description: hypothetical protein At2g04220 [imported] -
  misc_feature (20)..(235): Homolog of NCBI NO: 20804936 NR Description: P0456E05.14 [Oryza sativa (japonica
  misc_feature (1)..(15): Homolog of NCBI NO: 20804936 NR Description: P0456E05.14 [Oryza sativa (japonica
  misc_feature (1)..(235): Homolog of NCBI NO: 15241702 NR Description: putative protein
  misc_feature (8)..(209): Homolog of NCBI NO: 25334990 NR Description: hypothetical protein At2g04220 [imported] -
  misc_feature (201)..(235): Homolog of NCBI NO: 15238927 NR Description: putative protein; protein id: At5g48270.1
  misc_feature (1)..(200): Homolog of NCBI NO: 15238927 NR Description: putative protein; protein id: At5g48270.1
  misc_feature (1)..(209): Homolog of NCBI NO: 15228105 NR Description: hypothetical protein; protein id: At2g04220.1
  misc_feature (1)..(235): Homolog of NCBI NO: 15235452 NR Description: putative protein

SEQ ID NO: 29431 - DNA, 1311 bp, Arabidopsis thaliana
  misc_feature (1)..(1311): Ceres Seq. ID no. 12580230
  misc_feature: MA Experiment ID: 20000184 Result: Down-regulated in Transcription
  misc_feature: MA Experiment 20000184 PARAMETER Experiment Name: At_Shoots__P Parameter: Age (day) Value: 7
  misc_feature: MA Experiment 20000184 PARAMETER Experiment Name: At_Shoots__P Parameter: Tissue Value: Shoots vs. Whole Plant
  misc_feature: MA Experiment ID: 20000227 Result: Up-regulated in Transcription
  misc_feature: MA Experiment 20000227 PARAMETER Experiment Name: At_Root-Tips-vs-Tops_P Parameter: Tissue Value: Root Tips vs. Root Tops
ctctcattattttgcttgagccacagatccgtttctcctctcgatttgtcttcttcactcagtttctcgcttgttctgtcaaagatcgaaactttccggcgtctattgtcttcgcactattgcactcgtcttcttcttcgttcttggtgtgaaccgaaactaaattctatctttttgctctacacgatgaacgatcttctgaagggttcgtttgagcttcccagaggtcaatcttctagagaaggagatgttgaactaggggaacaacaaggtggagatcaaggattggaagattttttcaaaaaggttcaagtgattgacaaacagtatgataagctagacaagcttctaaagaaactgcaggcttcccatgaggagtcaaaatctgtgaccaaagctcctgccatgaaggcgataaagaagacaatggaaaaagacgttgatgaagttggaagtattgcccgtttcataaaggggaaactcgaggagttggacagagagaacttggcaaatagacaaaaacctggatgtgcaaaaggatctggtgtggatcgatcaagaacagcaacaacactttccttaaagaagaagttgaaagacaagatggccgagtttcaggttctacgagagaacattcaacaagagtatcgcgatgttgttgataggcgagtttatacagtaactggggagcgggcggatgaagatactattgatgaattgattgaaactggaaacagcgaacagatcttccagaaagcgattcaggagcaaggaagaggacaggtaatggacaccttggcggaaatccaagaacgtcatgatgctgtcagagacttggaaaagaaacttcttgacttacaacaaatattcttggatatggcagttttggttgatgcacaaggagaaatgcttgacaatatagaatctcaggtgtcaagtgcagtagatcacgtgcaatcgggaaacacggcacttcaaagagcaaagagcttgcagaagaactcaagaaaatggatgtgtattgcaattatcatcctcctcattgtggttgcagtgatcgttgttggtgttctcaagccttggaaaaacaagagtgcttgaggaaagaaagaatgtacaaaagaatatcaaatccttattcacggctttgagtgagagtgttttgtttatgatgtgtgtttttttttttaccaagaaacgaaaaaaaaaagaaacaaaattctacattcttttaattggatcaaacaaaccaatttccccttatgattgtgcaatttcacgtggattaaaggaggtacttctaattatttc

SEQ ID NO: 29432 - protein, 366 aa, Arabidopsis thaliana
  peptide (1)..(366): Ceres Seq. ID no. 12580231
  misc_feature (271)..(333): Pfam Name: SNARE domain Pfam Description: SNARE domain
  misc_feature (63)..(358): Homolog of NCBI NO: 15220328 NR Description: syntaxin SYP125; protein id: At1g11250.1
  misc_feature (63)..(366): Homolog of NCBI NO: 15231205 NR Description: syntaxin SYP122
  misc_feature (63)..(366): Homolog of NCBI NO: 11358871 NR Description: syntaxin synt4 [imported] - Arabidopsis thaliana
  misc_feature (63)..(366): Homolog of NCBI NO: 15229865 NR Description: syntaxin SYP121
  misc_feature (63)..(362): Homolog of NCBI NO: 4206787 NR Description: syntaxin-related protein Nt-syr1 [Nicotiana
  misc_feature (63)..(362): Homolog of NCBI NO: 34899960 NR Description: P0428D12.21 [Oryza sativa (japonica
  misc_feature (63)..(362): Homolog of NCBI NO: 33146794 NR Description: putative syntaxin-related protein
  misc_feature (63)..(365): Homolog of NCBI NO: 15228637 NR Description: syntaxin SYP131; protein id: At3g03800.1
  misc_feature (63)..(366): Homolog of NCBI NO: 11358872 NR Description: syntaxin-like protein - Arabidopsis thaliana
  misc_feature (63)..(366): Homolog of NCBI NO: 18415701 NR Description: syntaxin SYP132
LSLFCLSHRSVSPLDLSSSLSFSLVLSKIETFRRLLSSHYCTRLLLRSWCEPKLNSIFLLYTMNDLLKGSFELPRGQSSREGDVELGEQQGGDQGLEDFFKKVQVIDKQYDKLDKLLKKLQASHEESKSVTKAPAMKAIKKTMEKDVDEVGSIARFIKGKLEELDRENLANRQKPGCAKGSGVDRSRTATTLSLKKKLKDKMAEFQVLRENIQQEYRDVVDRRVYTVTGERADEDTIDELIETGNSEQIFQKAIQEQGRGQVMDTLAEIQERHDAVRDLEKKLLDLQQIFLDMAVLVDAQGEMLDNIESQVSSAVDHVQSGNTALQRAKSLQKNSRKWMCIAIIILLIVVAVIVVGVLKPWKNKSA

SEQ ID NO: 29433 - protein, 304 aa, Arabidopsis thaliana
  peptide (1)..(304): Ceres Seq. ID no. 12580232
  misc_feature (209)..(271): Pfam Name: SNARE domain Pfam Description: SNARE domain
  misc_feature (1)..(296): Homolog of NCBI NO: 15220328 NR Description: syntaxin SYP125; protein id: At1g11250.1
  misc_feature (1)..(304): Homolog of NCBI NO: 15231205 NR Description: syntaxin SYP122
  misc_feature (1)..(304): Homolog of NCBI NO: 11358871 NR Description: syntaxin synt4 [imported] - Arabidopsis thaliana
  misc_feature (1)..(304): Homolog of NCBI NO: 15229865 NR Description: syntaxin SYP121
  misc_feature (1)..(300): Homolog of NCBI NO: 4206787 NR Description: syntaxin-related protein Nt-syr1 [Nicotiana
  misc_feature (1)..(300): Homolog of NCBI NO: 34899960 NR Description: P0428D12.21 [Oryza sativa (japonica
  misc_feature (1)..(300): Homolog of NCBI NO: 33146794 NR Description: putative syntaxin-related protein
  misc_feature (1)..(303): Homolog of NCBI NO: 15228637 NR Description: syntaxin SYP131; protein id: At3g03800.1
  misc_feature (1)..(304): Homolog of NCBI NO: 11358872 NR Description: syntaxin-like protein - Arabidopsis thaliana
  misc_feature (1)..(304): Homolog of NCBI NO: 18415701 NR Description: syntaxin SYP132
MNDLLKGSFELPRGQSSREGDVELGEQQGGDQGLEDFFKKVQVIDKQYDKLDKLLKKLQASHEESKSVTKAPAMKAIKKTMEKDVDEVGSIARFIKGKLEELDRENLANRQKPGCAKGSGVDRSRTATTLSLKKKLKDKMAEFQVLRENIQQEYRDVVDRRVYTVTGERADEDTIDELIETGNSEQIFQKAIQEQGRGQVMDTLAEIQERHDAVRDLEKKLLDLQQIFLDMAVLVDAQGEMLDNIESQVSSAVDHVQSGNTALQRAKSLQKNSRKWMCIAIIILLIVVAVIVVGVLKPWKNKSA

SEQ ID NO: 29434 - protein, 231 aa, Arabidopsis thaliana
  peptide (1)..(231): Ceres Seq. ID no. 12580233
  misc_feature (136)..(198): Pfam Name: SNARE domain Pfam Description: SNARE domain
  misc_feature (1)..(223): Homolog of NCBI NO: 15220328 NR Description: syntaxin SYP125; protein id: At1g11250.1
  misc_feature (1)..(231): Homolog of NCBI NO: 15231205 NR Description: syntaxin SYP122
  misc_feature (1)..(231): Homolog of NCBI NO: 11358871 NR Description: syntaxin synt4 [imported] - Arabidopsis thaliana
  misc_feature (1)..(231): Homolog of NCBI NO: 15229865 NR Description: syntaxin SYP121
  misc_feature (1)..(227): Homolog of NCBI NO: 4206787 NR Description: syntaxin-related protein Nt-syr1 [Nicotiana
  misc_feature (1)..(227): Homolog of NCBI NO: 34899960 NR Description: P0428D12.21 [Oryza sativa (japonica
  misc_feature (1)..(227): Homolog of NCBI NO: 33146794 NR Description: putative syntaxin-related protein
  misc_feature (1)..(230): Homolog of NCBI NO: 15228637 NR Description: syntaxin SYP131; protein id: At3g03800.1
  misc_feature (1)..(231): Homolog of NCBI NO: 11358872 NR Description: syntaxin-like protein - Arabidopsis thaliana
  misc_feature (1)..(231): Homolog of NCBI NO: 18415701 NR Description: syntaxin SYP132
MKAIKKTMEKDVDEVGSIARFIKGKLEELDRENLANRQKPGCAKGSGVDRSRTATTLSLKKKLKDKMAEFQVLRENIQQEYRDVVDRRVYTVTGERADEDTIDELIETGNSEQIFQKAIQEQGRGQVMDTLAEIQERHDAVRDLEKKLLDLQQIFLDMAVLVDAQGEMLDNIESQVSSAVDHVQSGNTALQRAKSLQKNSRKWMCIAIIILLIVVAVIVVGVLKPWKNKSA

SEQ ID NO: 29435 - DNA, 1189 bp, Arabidopsis thaliana
  misc_feature (1)..(1189): Ceres Seq. ID no. 12371708
  misc_feature: MA Experiment ID: 20000184 Result: Down-regulated in Transcription
  misc_feature: MA Experiment 20000184 PARAMETER Experiment Name: At_Shoots__P Parameter: Age (day) Value: 7
  misc_feature: MA Experiment 20000184 PARAMETER Experiment Name: At_Shoots__P Parameter: Tissue Value: Shoots vs. Whole Plant
  misc_feature: Phenotype: ROSETTE LEAVES Curled-Curled 3
  misc_feature: Phenotype: ROSETTE LEAVES Curled-Curled 3
  misc_feature: Phenotype: ROSETTE LEAVES Curled-Curled 3
  misc_feature: Phenotype: ROSETTE LEAVES Curled-Curled 3
  misc_feature: Phenotype: ROSETTE LEAVES Curled-Curled 3
  misc_feature: Phenotype: ROSETTE LEAVES Curled-Curled 3
  misc_feature: Phenotype: ROSETTE LEAVES Curled-Curled 3
  misc_feature: Phenotype: ROSETTE LEAVES Curled-Curled 3
caacataactcttttgcttaagcctcaaaaaattgtcattaacccaatttcccagaaacttcaaaaacagttgggggaagaagaagaagatgaaacgacgaagaacccttttataaagtctcaatcttctaatccaagatctgccctttttcagattctatctcaaagctttcctcgatcttgtgatgtattgaagccggagactgagagagatgttgtgcttcaaaggctcggttaagcggaagaagcaatccggttctgttccggtttatctgaatgtctacgatctaactcctatgaatgcttatggttattggcttggacttggtgtttttcattctggtgttgaagttcatggagttgaatatgcatttggagcacatgaatcatcaagcacaggtatttttgaagtggaaccaaagaagtgtcctggtttcacgtttaggaaatcgattcttgtggggaaaaccgacttggttgcgaaagaagttcgtgtttttatggagaaattagctgaagagtatcaaggaaacaagtaccatctcatcacaaggaactgcaaccatttttgcaatgaagtttgtcttaaacttgctcagaaatcaatccctagatgggtgaatcgacttgctcgcttaggggttctctgcaactgtgtgttaccacctcgtttgaacgaggcaaaagtgagacgagtaggaaaaggagagctttcggaaagtgagaagaagaaactaagaaaccgatcacgatcagatcctttactgtcttcttctccgtcttcatcgacacctgataatcatcgttcacacattcgagcaaaatcaagtggtaatcatccttcttcttcttcttcttcgtcttcgggttctaagaaaaatcgaagacctaaagctcaagaccagaagtcgccaagcgtaagcatcaagacttgattgttatcatcattatttgaacatttaattattgtttatgaaaaggacaaaaagtaaaaagacaagaacagaggaacatgccaagcaaagtatcaatcatatatggggcatgctcgtgctttgttctaaggttattgaaaacctttttgggtgtgtagatcatttttctttgtacaattgcttataggagagagagaggtcatgagtatgtacaaaaagaatatgattcatatatttttctatgttttatctcc

SEQ ID NO: 29436 - protein, 240 aa, Arabidopsis thaliana
  peptide (1)..(240): Ceres Seq. ID no. 12371709
  misc_feature (17)..(140): Pfam Name: Eukaryotic protein of unknown function (DUF862) Pfam Description: Eukaryotic protein of unknown function (DUF862)
  misc_feature (1)..(169): Homolog of NCBI NO: 15238059 NR Description: putative protein; protein id: At5g47310.1
  misc_feature (3)..(224): Homolog of NCBI NO: 9802596 NR Description: T2E6.19 [Arabidopsis thaliana]
  misc_feature (3)..(224): Homolog of NCBI NO: 21593644 NR Description: unknown [Arabidopsis thaliana]
  misc_feature (3)..(224): Homolog of NCBI NO: 18401869 NR Description: expressed protein
  misc_feature (1)..(217): Homolog of NCBI NO: 25354458 NR Description: hypothetical protein F23A5.4 [imported] -
  misc_feature (1)..(217): Homolog of NCBI NO: 18412886 NR Description: expressed protein
  misc_feature (1)..(213): Homolog of NCBI NO: 18420889 NR Description: putative protein
  misc_feature (1)..(240): Homolog of NCBI NO: 15236618 NR Description: putative protein; protein id: At4g31980.1
  misc_feature (1)..(240): Homolog of NCBI NO: 17529024 NR Description: unknown protein [Arabidopsis thaliana]
  misc_feature (1)..(240): Homolog of NCBI NO: 18400749 NR Description: expressed protein
MLCFKGSVKRKKQSGSVPVYLNVYDLTPMNAYGYWLGLGVFHSGVEVHGVEYAFGAHESSSTGIFEVEPKKCPGFTFRKSILVGKTDLVAKEVRVFMEKLAEEYQGNKYHLITRNCNHFCNEVCLKLAQKSIPRWVNRLARLGVLCNCVLPPRLNEAKVRRVGKGELSESEKKKLRNRSRSDPLLSSSPSSSTPDNHRSHIRAKSSGNHPSSSSSSSSGSKKNRRPKAQDQKSPSVSIKT

SEQ ID NO: 29437 - protein, 212 aa, Arabidopsis thaliana
  peptide (1)..(212): Ceres Seq. ID no. 12371710
  misc_feature (1)..(112): Pfam Name: Eukaryotic protein of unknown function (DUF862) Pfam Description: Eukaryotic protein of unknown function (DUF862)
  misc_feature (1)..(141): Homolog of NCBI NO: 15238059 NR Description: putative protein; protein id: At5g47310.1
  misc_feature (1)..(196): Homolog of NCBI NO: 9802596 NR Description: T2E6.19 [Arabidopsis thaliana]
  misc_feature (1)..(196): Homolog of NCBI NO: 21593644 NR Description: unknown [Arabidopsis thaliana]
  misc_feature (1)..(196): Homolog of NCBI NO: 18401869 NR Description: expressed protein
  misc_feature (1)..(189): Homolog of NCBI NO: 25354458 NR Description: hypothetical protein F23A5.4 [imported] -
  misc_feature (1)..(189): Homolog of NCBI NO: 18412886 NR Description: expressed protein
  misc_feature (1)..(185): Homolog of NCBI NO: 18420889 NR Description: putative protein
  misc_feature (1)..(212): Homolog of NCBI NO: 15236618 NR Description: putative protein; protein id: At4g31980.1
  misc_feature (1)..(212): Homolog of NCBI NO: 17529024 NR Description: unknown protein [Arabidopsis thaliana]
  misc_feature (1)..(212): Homolog of NCBI NO: 18400749 NR Description: expressed protein
MNAYGYWLGLGVFHSGVEVHGVEYAFGAHESSSTGIFEVEPKKCPGFTFRKSILVGKTDLVAKEVRVFMEKLAEEYQGNKYHLITRNCNHFCNEVCLKLAQKSIPRWVNRLARLGVLCNCVLPPRLNEAKVRRVGKGELSESEKKKLRNRSRSDPLLSSSPSSSTPDNHRSHIRAKSSGNHPSSSSSSSSGSKKNRRPKAQDQKSPSVSIKT

SEQ ID NO: 29438 - protein, 144 aa, Arabidopsis thaliana
  peptide (1)..(144): Ceres Seq. ID no. 12371711
  misc_feature (1)..(73): Homolog of NCBI NO: 15238059 NR Description: putative protein; protein id: At5g47310.1
  misc_feature (1)..(128): Homolog of NCBI NO: 9802596 NR Description: T2E6.19 [Arabidopsis thaliana]
  misc_feature (1)..(128): Homolog of NCBI NO: 21593644 NR Description: unknown [Arabidopsis thaliana]
  misc_feature (1)..(128): Homolog of NCBI NO: 18401869 NR Description: expressed protein
  misc_feature (1)..(121): Homolog of NCBI NO: 25354458 NR Description: hypothetical protein F23A5.4 [imported] -
  misc_feature (1)..(121): Homolog of NCBI NO: 18412886 NR Description: expressed protein
  misc_feature (1)..(117): Homolog of NCBI NO: 18420889 NR Description: putative protein
  misc_feature (1)..(144): Homolog of NCBI NO: 15236618 NR Description: putative protein; protein id: At4g31980.1
  misc_feature (1)..(144): Homolog of NCBI NO: 17529024 NR Description: unknown protein [Arabidopsis thaliana]
  misc_feature (1)..(144): Homolog of NCBI NO: 18400749 NR Description: expressed protein
MEKLAEEYQGNKYHLITRNCNHFCNEVCLKLAQKSIPRWVNRLARLGVLCNCVLPPRLNEAKVRRVGKGELSESEKKKLRNRSRSDPLLSSSPSSSTPDNHRSHIRAKSSGNHPSSSSSSSSGSKKNRRPKAQDQKSPSVSIKT

SEQ ID NO: 29439 - DNA, 1608 bp, Arabidopsis thaliana
  misc_feature (1)..(1608): Ceres Seq. ID no. 13499783
  misc_feature: MA Experiment ID: 20000327 Result: Up-regulated in Transcription
  misc_feature: MA Experiment 20000327 PARAMETER Experiment Name: At_42deg_Heat_Sub_P Parameter: Age (day) Value: 14
  misc_feature: MA Experiment 20000327 PARAMETER Experiment Name: At_42deg_Heat_Sub_P Parameter: Organism Value: A. thaliana
  misc_feature: MA Experiment 20000327 PARAMETER Experiment Name: At_42deg_Heat_Sub_P Parameter: Plant Line Value: WS
  misc_feature: MA Experiment 20000327 PARAMETER Experiment Name: At_42deg_Heat_Sub_P Parameter: Temperature (deg C) Value: 42 vs. 22
  misc_feature: MA Experiment 20000327 PARAMETER Experiment Name: At_42deg_Heat_Sub_P Parameter: Timepoint (hr) Value: 1
  misc_feature: MA Experiment 20000327 PARAMETER Experiment Name: At_42deg_Heat_Sub_P Parameter: Tissue Value: Aerial
  misc_feature: MA Experiment ID: 20000328 Result: Up-regulated in Transcription
  misc_feature: MA Experiment 20000328 PARAMETER Experiment Name: At_42deg_Heat_Sub_P Parameter: Age (day) Value: 14
  misc_feature: MA Experiment 20000328 PARAMETER Experiment Name: At_42deg_Heat_Sub_P Parameter: Organism Value: A. thaliana
  misc_feature: MA Experiment 20000328 PARAMETER Experiment Name: At_42deg_Heat_Sub_P Parameter: Plant Line Value: WS
  misc_feature: MA Experiment 20000328 PARAMETER Experiment Name: At_42deg_Heat_Sub_P Parameter: Temperature (deg C) Value: 42 vs. 22
  misc_feature: MA Experiment 20000328 PARAMETER Experiment Name: At_42deg_Heat_Sub_P Parameter: Timepoint (hr) Value: 6
  misc_feature: MA Experiment 20000328 PARAMETER Experiment Name: At_42deg_Heat_Sub_P Parameter: Tissue Value: Aerial
  misc_feature: MA Experiment ID: 20000440 Result: Down-regulated in Transcription
  misc_feature: MA Experiment 20000440 PARAMETER Experiment Name: At_Closed-Flower__Sub_P Parameter: Tissue Value: Closed Flower vs. Whole Plant
  misc_feature: MA Experiment ID: 20001807 Result: Down-regulated in Transcription
  misc_feature: MA Experiment 20001807 PARAMETER Experiment Name: At_50mM_NH4NO3_L-to-H_Sub_P Parameter: Timepoint (hr) Value: 6
  misc_feature: MA Experiment 20001807 PARAMETER Experiment Name: At_50mM_NH4NO3_L-to-H_Sub_P Parameter: Tissue Value: Leaf
  misc_feature: MA Experiment 20001807 PARAMETER Experiment Name: At_50mM_NH4NO3_L-to-H_Sub_P Parameter: Treatment Value: 50mM NH4NO3 vs 100mM Mannitol
acaattcagatttcaatttctcaaaaatcttaaaaactttctctcaattctctctaccgtgatcaagatgcagattttcgttaagactctcaccggaaagactatcaccctcgaggtggaaagctctgacaccatcgacaacgttaaggccaagatccaggataaggaaggtattcctccggatcagcagaggcttatcttcgccggaaagcagttggaggatggccgcacgttggcggattacaatatccagaaggaatccaccctccacttggttctcaggctccgtggtggtatgcagattttcgttaaaaccctaacgggaaagacgattactcttgaggtggagagctctgacaccattgacaacgtcaaggccaagatccaagataaggagggtattcctccggaccagcagaggttgatcttcgccggaaagcagttggaggatggcagaactcttgctgactacaacatccagaaggagtctacccttcatcttgttctcaggcttcgtggtggtatgcagatctttgtcaagacgttgactggaaaaactatcactttggaggtggagagttctgacaccattgataacgtgaaagccaagatccaggacaaagagggtatcccaccggaccagcagagattgatcttcgctggaaagcaacttgaagatggaagaactttggctgactacaacattcagaaggagtccacacttcacttggtcttgcgtctgcgtggaggtatgcagatcttcgtgaagactctcaccggaaagaccatcactttggaggtagagagctctgacaccattgacaacgtgaaggccaagatccaggataaggaaggtatccctccggaccagcagaggttgatctttgccggaaaacaattggaggacggcagaactttagcggattacaacatccagaaggagtctacccttcacttggtcttgcgtctccgtggaggtatgcagatcttcgttaagactttgaccgggaagaccatcactcttgaagtggagagctctgacaccattgacaacgtgaaggccaagatccaggataaggaaggaatccctccggaccagcagaggttgatctttgccggaaaacaattggaggatggtcgtactttggcggattacaacatccagaaggagtcgacccttcacttggtgttgcgtctgcgtggaggtatgcagatctttgttaagactttgaccggcaagaccataacccttgaagtggagagctccgacaccattgacaacgtgaaggctaagatccaggacaaggaaggtatccctccggaccagcagcgtctcatcttcgctggaaagcagcttgaggatggacgtacattggccgactacaacatccagaaggagtctacccttcacttggtcctccgtcttcgtggaggtttctaaatctcgtctctgttatgctttaagaagttcaatgtctcgtttctgttaaaactttggtggcttgtgtttttgggggccttgtataatcccctgatgaataattgttccaactatgtttccattcctgttatctctttctttctaatgacaagtcgaacgtcttcttt

SEQ ID NO: 29440 - protein, 479 aa, Arabidopsis thaliana
  peptide (1)..(479): Ceres Seq. ID no. 13499784
  misc_feature (23)..(96): Pfam Name: Ubiquitin family Pfam Description: Ubiquitin family
  misc_feature (23)..(478): Homolog of NCBI NO: 902584 NR Description: polyubiquitin containing 7 ubiquitin monomers
  misc_feature (23)..(478): Homolog of NCBI NO: 481477 NR Description: polyubiquitin 6 - rice
  misc_feature (23)..(478): Homolog of NCBI NO: 2760347 NR Description: ubiquitin [Arabidopsis thaliana]
  misc_feature (23)..(478): Homolog of NCBI NO: 16660462 NR Description: polyubiquitin OUB2 [Olea europaea]
  misc_feature (23)..(478): Homolog of NCBI NO: 4115337 NR Description: ubiquitin [Pisum sativum]
  misc_feature (23)..(478): Homolog of NCBI NO: 100934 NR Description: polyubiquitin - maize
  misc_feature (23)..(478): Homolog of NCBI NO: 418854 NR Description: polyubiquitin 6 - parsley
  misc_feature (23)..(478): Homolog of NCBI NO: 100934 NR Description: polyubiquitin - maize
  misc_feature (23)..(478): Homolog of NCBI NO: 100524 NR Description: polyubiquitin 6 - common sunflower
  misc_feature (23)..(479): Homolog of NCBI NO: 170352 NR Description: hexameric polyubiquitin
QFRFQFLKNLKNFLSILSTVIKMQIFVKTLTGKTITLEVESSDTIDNVKAKIQDKEGIPPDQQRLIFAGKQLEDGRTLADYNIQKESTLHLVLRLRGGMQIFVKTLTGKTITLEVESSDTIDNVKAKIQDKEGIPPDQQRLIFAGKQLEDGRTLADYNIQKESTLHLVLRLRGGMQIFVKTLTGKTITLEVESSDTIDNVKAKIQDKEGIPPDQQRLIFAGKQLEDGRTLADYNIQKESTLHLVLRLRGGMQIFVKTLTGKTITLEVESSDTIDNVKAKIQDKEGIPPDQQRLIFAGKQLEDGRTLADYNIQKESTLHLVLRLRGGMQIFVKTLTGKTITLEVESSDTIDNVKAKIQDKEGIPPDQQRLIFAGKQLEDGRTLADYNIQKESTLHLVLRLRGGMQIFVKTLTGKTITLEVESSDTIDNVKAKIQDKEGIPPDQQRLIFAGKQLEDGRTLADYNIQKESTLHLVLRLRGGF

SEQ ID NO: 29441 - protein, 457 aa, Arabidopsis thaliana
  peptide (1)..(457): Ceres Seq. ID no. 13499785
  misc_feature (1)..(74): Pfam Name: Ubiquitin family Pfam Description: Ubiquitin family
  misc_feature (1)..(456): Homolog of NCBI NO: 902584 NR Description: polyubiquitin containing 7 ubiquitin monomers
  misc_feature (1)..(456): Homolog of NCBI NO: 2760347 NR Description: ubiquitin [Arabidopsis thaliana]
  misc_feature (1)..(456): Homolog of NCBI NO: 4115337 NR Description: ubiquitin [Pisum sativum]
  misc_feature (1)..(456): Homolog of NCBI NO: 16660462 NR Description: polyubiquitin OUB2 [Olea europaea]
  misc_feature (1)..(456): Homolog of NCBI NO: 100934 NR Description: polyubiquitin - maize
  misc_feature (1)..(456): Homolog of NCBI NO: 100934 NR Description: polyubiquitin - maize
  misc_feature (1)..(456): Homolog of NCBI NO: 418854 NR Description: polyubiquitin 6 - parsley
  misc_feature (1)..(456): Homolog of NCBI NO: 481477 NR Description: polyubiquitin 6 - rice
  misc_feature (1)..(456): Homolog of NCBI NO: 100524 NR Description: polyubiquitin 6 - common sunflower
  misc_feature (1)..(457): Homolog of NCBI NO: 170352 NR Description: hexameric polyubiquitin
MQIFVKTLTGKTITLEVESSDTIDNVKAKIQDKEGIPPDQQRLIFAGKQLEDGRTLADYNIQKESTLHLVLRLRGGMQIFVKTLTGKTITLEVESSDTIDNVKAKIQDKEGIPPDQQRLIFAGKQLEDGRTLADYNIQKESTLHLVLRLRGGMQIFVKTLTGKTITLEVESSDTIDNVKAKIQDKEGIPPDQQRLIFAGKQLEDGRTLADYNIQKESTLHLVLRLRGGMQIFVKTLTGKTITLEVESSDTIDNVKAKIQDKEGIPPDQQRLIFAGKQLEDGRTLADYNIQKESTLHLVLRLRGGMQIFVKTLTGKTITLEVESSDTIDNVKAKIQDKEGIPPDQQRLIFAGKQLEDGRTLADYNIQKESTLHLVLRLRGGMQIFVKTLTGKTITLEVESSDTIDNVKAKIQDKEGIPPDQQRLIFAGKQLEDGRTLADYNIQKESTLHLVLRLRGGF

SEQ ID NO: 29442 - protein, 381 aa, Arabidopsis thaliana
  peptide (1)..(381): Ceres Seq. ID no. 13499786
  misc_feature (1)..(74): Pfam Name: Ubiquitin family Pfam Description: Ubiquitin family
  misc_feature (1)..(380): Homolog of NCBI NO: 902584 NR Description: polyubiquitin containing 7 ubiquitin monomers
  misc_feature (1)..(380): Homolog of NCBI NO: 100934 NR Description: polyubiquitin - maize
  misc_feature (1)..(380): Homolog of NCBI NO: 2760347 NR Description: ubiquitin [Arabidopsis thaliana]
  misc_feature (1)..(380): Homolog of NCBI NO: 4115337 NR Description: ubiquitin [Pisum sativum]
  misc_feature (1)..(380): Homolog of NCBI NO: 16660462 NR Description: polyubiquitin OUB2 [Olea europaea]
  misc_feature (1)..(380): Homolog of NCBI NO: 481477 NR Description: polyubiquitin 6 - rice
  misc_feature (1)..(380): Homolog of NCBI NO: 418854 NR Description: polyubiquitin 6 - parsley
  misc_feature (1)..(380): Homolog of NCBI NO: 100934 NR Description: polyubiquitin - maize
  misc_feature (1)..(380): Homolog of NCBI NO: 100524 NR Description: polyubiquitin 6 - common sunflower
  misc_feature (1)..(381): Homolog of NCBI NO: 170352 NR Description: hexameric polyubiquitin
MQIFVKTLTGKTITLEVESSDTIDNVKAKIQDKEGIPPDQQRLIFAGKQLEDGRTLADYNIQKESTLHLVLRLRGGMQIFVKTLTGKTITLEVESSDTIDNVKAKIQDKEGIPPDQQRLIFAGKQLEDGRTLADYNIQKESTLHLVLRLRGGMQIFVKTLTGKTITLEVESSDTIDNVKAKIQDKEGIPPDQQRLIFAGKQLEDGRTLADYNIQKESTLHLVLRLRGGMQIFVKTLTGKTITLEVESSDTIDNVKAKIQDKEGIPPDQQRLIFAGKQLEDGRTLADYNIQKESTLHLVLRLRGGMQIFVKTLTGKTITLEVESSDTIDNVKAKIQDKEGIPPDQQRLIFAGKQLEDGRTLADYNIQKESTLHLVLRLRGGF

SEQ ID NO: 29443 - DNA, 1096 bp, Arabidopsis thaliana
  misc_feature (1)..(1096): Ceres Seq. ID no. 12333636
  misc_feature: MA Experiment ID: 108573 Result: Up-regulated in Transcription
  misc_feature: MA Experiment 108573 PARAMETER Experiment Name: At_Drought_cDNA_P Parameter: Timepoint (hr) Value: 6
  misc_feature: MA Experiment 108573 PARAMETER Experiment Name: At_Drought_cDNA_P Parameter: Tissue Value: Aerial
  misc_feature: MA Experiment 108573 PARAMETER Experiment Name: At_Drought_cDNA_P Parameter: Treatment Value: Drought vs. No Drought
  misc_feature: MA Experiment ID: 108579 Result: Down-regulated in Transcription
  misc_feature: MA Experiment 108579 PARAMETER Experiment Name: At_4deg_Cold_cDNA_P Parameter: Temperature (deg C) Value: 4 vs. 22
  misc_feature: MA Experiment 108579 PARAMETER Experiment Name: At_4deg_Cold_cDNA_P Parameter: Timepoint (hr) Value: 6
  misc_feature: MA Experiment 108579 PARAMETER Experiment Name: At_4deg_Cold_cDNA_P Parameter: Tissue Value: Aerial
  misc_feature: MA Experiment ID: 108585 Result: Up-regulated in Transcription
  misc_feature: MA Experiment 108585 PARAMETER Experiment Name: At_5mM_NaNP_cDNA_P Parameter: Timepoint (hr) Value: 6
  misc_feature: MA Experiment 108585 PARAMETER Experiment Name: At_5mM_NaNP_cDNA_P Parameter: Tissue Value: Aerial
  misc_feature: MA Experiment 108585 PARAMETER Experiment Name: At_5mM_NaNP_cDNA_P Parameter: Treatment Value: null
  misc_feature: MA Experiment ID: 108595 Result: Down-regulated in Transcription
  misc_feature: MA Experiment 108595 PARAMETER Experiment Name: At_Ler-pi_Ovule_cDNA_P Parameter: Plant Line Value: null
  misc_feature: MA Experiment ID: 20000224 Result: Down-regulated in Transcription
  misc_feature: MA Experiment ID: 20000234 Result: Down-regulated in Transcription
  misc_feature: MA Experiment 20000234 PARAMETER Experiment Name: At_Siliques_P Parameter: Age (day) Value: 21
  misc_feature: MA Experiment 20000234 PARAMETER Experiment Name: At_Siliques_P Parameter: Organism Value: A. thaliana
  misc_feature: MA Experiment 20000234 PARAMETER Experiment Name: At_Siliques_P Parameter: Plant Line Value: WS
  misc_feature: MA Experiment 20000234 PARAMETER Experiment Name: At_Siliques_P Parameter: Tissue Value: Less Than 5mm Siliques vs. Whole Plant
  misc_feature: MA Experiment ID: 20000235 Result: Down-regulated in Transcription
  misc_feature: MA Experiment 20000235 PARAMETER Experiment Name: At_Siliques_P Parameter: Age (day) Value: 21
  misc_feature: MA Experiment 20000235 PARAMETER Experiment Name: At_Siliques_P Parameter: Organism Value: A. thaliana
  misc_feature: MA Experiment 20000235 PARAMETER Experiment Name: At_Siliques_P Parameter: Plant Line Value: WS
  misc_feature: MA Experiment 20000235 PARAMETER Experiment Name: At_Siliques_P Parameter: Tissue Value: 5-10mm Siliques vs. Whole Plant
  misc_feature: MA Experiment ID: 20000286 Result: Down-regulated in Transcription
  misc_feature: MA Experiment 20000286 PARAMETER Experiment Name: At_Open_Flower_P Parameter: Age (day) Value: 21
  misc_feature: MA Experiment 20000286 PARAMETER Experiment Name: At_Open_Flower_P Parameter: Plant Line Value: WS
  misc_feature: MA Experiment 20000286 PARAMETER Experiment Name: At_Open_Flower_P Parameter: Tissue Value: Half Open vs. Whole Plant
aagctatattcttccttttgatcaaaacacccacacctcttcttcttcttcgcataaaccttaaaaaccatttccacgatcttcttcttcttcttccctcaaatatagcttaggattttcttaatttcctctacccaagctccatggctgctttcaatttcttcctctcttcttaattctctcaggtaggggagatttgagtagtagtagattgttagatttgtaattcagctattggtgaagaggaagggagagagagatgtgttgaattggttgagtttggtggaggaaagaagaagaagaaatgaatgtgagccatgcatcggtacatccagtggaagatcctcctgcagctgcgacggaagtagagaatccgcctcgggtgaggatggatgatatggaaggaatgcctggaacattgcttggtcttgcattgcgtttttttcagttcttgtttgctgctgctgctctttgtgtcatggcttctactagtgattttccttccgttaccgccttctgctacctagttgcagctactggtctgcagagcttgtggagtcttgcactagccatggttgacgtctatgccattatggtcaaacgctctctacagaaccgtcgacttgtgagcttgtttgcaattggtgatggggtgacatcgacgctgacttttgcagcagcttgtgcatcggcaggcataacggttctaatagacaacgatctgaatagctgcgcacaaaaccactgtgttcagtttgaaacatcaacggcattagctttcataagctggttcgctgctttgccttcgtttctcttcaatttctggtctcttgcatcccgttgacacgatactgctcagcaagatgtgttttcatggtgtgtttttcggtgtatagtgactgatttttcttcttctttcttgttttgggtttggaaccaactttcttcaaacccaatacttggaaactgggaattgttttgtagacgacgaccttattcattttgttgtacaatgaaactatctggtcggctttgttgtatgattgaagaaatttcagatgttgaatgcattattatgatatcttgactgaattgc

SEQ ID NO: 29444 - protein, 179 aa, Arabidopsis thaliana
  peptide (1)..(179): Ceres Seq. ID no. 12333637
  misc_feature (34)..(164): Pfam Name: Domain of unknown function (DUF588) Pfam Description: Domain of unknown function (DUF588)
  misc_feature (29)..(178): Homolog of NCBI NO: 22330130 NR Description: hypothetical protein; protein id: At1g49405.1
  misc_feature (29)..(176): Homolog of NCBI NO: 15241672 NR Description: putative protein; protein id: At5g02060.1
  misc_feature (29)..(73): Homolog of NCBI NO: 11357817 NR Description: hypothetical protein F5K20.150 - Arabidopsis
  misc_feature (64)..(178): Homolog of NCBI NO: 11357817 NR Description: hypothetical protein F5K20.150 - Arabidopsis
  misc_feature (29)..(178): Homolog of NCBI NO: 18409932 NR Description: putative protein
  misc_feature (29)..(178): Homolog of NCBI NO: 30686969 NR Description: expressed protein [Arabidopsis thaliana]
  misc_feature (35)..(162): Homolog of NCBI NO: 26006486 NR Description: Unknown protein [Oryza sativa (japonica
  misc_feature (1)..(178): Homolog of NCBI NO: 30687069 NR Description: expressed protein [Arabidopsis thaliana]
  misc_feature (1)..(178): Homolog of NCBI NO: 25408537 NR Description: hypothetical protein At2g37200 [imported] -
  misc_feature (1)..(179): Homolog of NCBI NO: 18401722 NR Description: expressed protein
MNVSHASVHPVEDPPAAATEVENPPRVRMDDMEGMPGTLLGLALRFFQFLFAAAALCVMASTSDFPSVTAFCYLVAATGLQSLWSLALAMVDVYAIMVKRSLQNRRLVSLFAIGDGVTSTLTFAAACASAGITVLIDNDLNSCAQNHCVQFETSTALAFISWFAALPSFLFNFWSLASR

SEQ ID NO: 29445 - protein, 151 aa, Arabidopsis thaliana
  peptide (1)..(151): Ceres Seq. ID no. 12333638
  misc_feature (6)..(136): Pfam Name: Domain of unknown function (DUF588) Pfam Description: Domain of unknown function (DUF588)
  misc_feature (1)..(150): Homolog of NCBI NO: 22330130 NR Description: hypothetical protein; protein id: At1g49405.1
  misc_feature (1)..(148): Homolog of NCBI NO: 15241672 NR Description: putative protein; protein id: At5g02060.1
  misc_feature (1)..(45): Homolog of NCBI NO: 11357817 NR Description: hypothetical protein F5K20.150 - Arabidopsis
  misc_feature (36)..(150): Homolog of NCBI NO: 11357817 NR Description: hypothetical protein F5K20.150 - Arabidopsis
  misc_feature (1)..(150): Homolog of NCBI NO: 18409932 NR Description: putative protein
  misc_feature (1)..(150): Homolog of NCBI NO: 30686969 NR Description: expressed protein [Arabidopsis thaliana]
  misc_feature (7)..(134): Homolog of NCBI NO: 26006486 NR Description: Unknown protein [Oryza sativa (japonica
  misc_feature (1)..(150): Homolog of NCBI NO: 30687069 NR Description: expressed protein [Arabidopsis thaliana]
  misc_feature (1)..(150): Homolog of NCBI NO: 25408537 NR Description: hypothetical protein At2g37200 [imported] -
  misc_feature (1)..(151): Homolog of NCBI NO: 18401722 NR Description: expressed protein
MDDMEGMPGTLLGLALRFFQFLFAAAALCVMASTSDFPSVTAFCYLVAATGLQSLWSLALAMVDVYAIMVKRSLQNRRLVSLFAIGDGVTSTLTFAAACASAGITVLIDNDLNSCAQNHCVQFETSTALAFISWFAALPSFLFNFWSLASR

SEQ ID NO: 29446 - protein, 148 aa, Arabidopsis thaliana
  peptide (1)..(148): Ceres Seq. ID no. 12333639
  misc_feature (3)..(133): Pfam Name: Domain of unknown function (DUF588) Pfam Description: Domain of unknown function (DUF588)
  misc_feature (1)..(147): Homolog of NCBI NO: 22330130 NR Description: hypothetical protein; protein id: At1g49405.1
  misc_feature (1)..(145): Homolog of NCBI NO: 15241672 NR Description: putative protein; protein id: At5g02060.1
  misc_feature (1)..(42): Homolog of NCBI NO: 11357817 NR Description: hypothetical protein F5K20.150 - Arabidopsis
  misc_feature (33)..(147): Homolog of NCBI NO: 11357817 NR Description: hypothetical protein F5K20.150 - Arabidopsis
  misc_feature (1)..(147): Homolog of NCBI NO: 18409932 NR Description: putative protein
  misc_feature (1)..(147): Homolog of NCBI NO: 30686969 NR Description: expressed protein [Arabidopsis thaliana]
  misc_feature (4)..(131): Homolog of NCBI NO: 26006486 NR Description: Unknown protein [Oryza sativa (japonica
  misc_feature (1)..(147): Homolog of NCBI NO: 30687069 NR Description: expressed protein [Arabidopsis thaliana]
  misc_feature (1)..(147): Homolog of NCBI NO: 25408537 NR Description: hypothetical protein At2g37200 [imported] -
  misc_feature (1)..(148): Homolog of NCBI NO: 18401722 NR Description: expressed protein
MEGMPGTLLGLALRFFQFLFAAAALCVMASTSDFPSVTAFCYLVAATGLQSLWSLALAMVDVYAIMVKRSLQNRRLVSLFAIGDGVTSTLTFAAACASAGITVLIDNDLNSCAQNHCVQFETSTALAFISWFAALPSFLFNFWSLASR

SEQ ID NO: 29447 - DNA, 1555 bp, Arabidopsis thaliana
  misc_feature (1)..(1555): Ceres Seq. ID no. 13497190
  misc_feature: MA Experiment ID: 108501 Result: Up-regulated in Transcription
  misc_feature: MA Experiment 108501 PARAMETER Experiment Name: At_ap2_floral_buds_cDNA_P Parameter: Plant Line Value: ap2 (Ler.)
  misc_feature: MA Experiment 108501 PARAMETER Experiment Name: At_ap2_floral_buds_cDNA_P Parameter: Tissue Value: Closed Flower
  misc_feature: MA Experiment ID: 20000173 Result: Up-regulated in Transcription
  misc_feature: MA Experiment 20000173 PARAMETER Experiment Name: At_42deg_Heat_P Parameter: Age (day) Value: 14
  misc_feature: MA Experiment 20000173 PARAMETER Experiment Name: At_42deg_Heat_P Parameter: Organism Value: A. thaliana
  misc_feature: MA Experiment 20000173 PARAMETER Experiment Name: At_42deg_Heat_P Parameter: Plant Line Value: WS
  misc_feature: MA Experiment 20000173 PARAMETER Experiment Name: At_42deg_Heat_P Parameter: Temperature (deg C) Value: 42 vs. 22
  misc_feature: MA Experiment 20000173 PARAMETER Experiment Name: At_42deg_Heat_P Parameter: Timepoint (hr) Value: 6
  misc_feature: MA Experiment 20000173 PARAMETER Experiment Name: At_42deg_Heat_P Parameter: Tissue Value: Aerial
  misc_feature: MA Experiment ID: 20000286 Result: Up-regulated in Transcription
  misc_feature: MA Experiment 20000286 PARAMETER Experiment Name: At_Open_Flower_P Parameter: Age (day) Value: 21
  misc_feature: MA Experiment 20000286 PARAMETER Experiment Name: At_Open_Flower_P Parameter: Plant Line Value: WS
  misc_feature: MA Experiment 20000286 PARAMETER Experiment Name: At_Open_Flower_P Parameter: Tissue Value: Half Open vs. Whole Plant
aacaaaaaaccaaatttggttcctttttcttcttcagacgagtaatatcttttgtcttcatcatgctctattcacctaagaagctgttcttgttcttcctctcgtgcattgtgctgtatgtcaactacaacaacagtggcttcgtaaccgcagcaaatagcatcggcttgaactacggactcctcggtgacaacctctcgtctccttccaatgttatcaacctttacaagtccataggcattagtagaatccgaatcttcgacccgaacactgaggtactcaatgccttacgtggtcaccgcgatattgaagtcactgttggcgttaaggaccaagacttggctgctcttgctgcaagcgaagaagctgttaagggctggttcgcggccaacatcgagtcttacttagctgacgtcaacatcacatttattaccgttgctaacgaagtcatccccggaccaatcggtcctcaagtgcttcccgtcatgcagtctctaaccaacctagtcaagtcgaggaatcttccgatctcgataagcaccgtggtggctatgtcgaacctggagcagtcgtatccaccttccgcgggaatgttcacctcccaggcgcgggaacaacttgttcccgtgttgaaactattgtctcaaacaagcacaccaatccttgtcaacatatacccttacttcgcttatgcgtccgacccagccaacatccgtctcgactatgccagctttaacactaagtccatcgtggtccaagatggatcattgggctattcaaacatgtttgatgcaatctttgatgcgttcgtgtgggcaatggagaaggaaggcgttaaaaatttaccaatggtggtgtccgagaccggatggccatccgcggggaacgggaactttaccacgccggctattgcgtccacctacaacagaaattttgtgaagcatatagcaagcggaaaagggacgcctaaaaggcctaacaagagcatgaacgggtttttgtttgcaacgttcaatgaaaatcagaagccggccgggactgaacaaaactttggtttatacaatccaagtgatatgaagcctatctacaagctattctaagtgtgaaagttacttagactttcccgattcactaataataatgctctactagttgttagtgaattaaagtaagattaacaatgatgcacatgctataagcaactggtgactatgagatgatggctctcgtagcgaacttagttgactttttgtaataaaatctgaatgtagtatttaaaaccaatttcctggttttataaacgaatgtactgcctcttcaataaagtaaggaacctttgcctacggcatcgaatttaatttgaagtcaccagttgacaacgaatgtactggtctggtttgtgcctctccacttaaagtaagttgacaagctaagtgctaagtattctcgttgttactgtataaactattcctaaattatagtttagaggtaatgcttagagcatcataatccatggtttcttaaaaagttaagaaaatctcttaaaatattatat

SEQ ID NO: 29448 - protein, 365 aa, Arabidopsis thaliana
  peptide (1)..(365): Ceres Seq. ID no. 13497191
  misc_feature (54)..(365): Pfam Name: Glycosyl hydrolases family 17 Pfam Description: Glycosyl hydrolases family 17
  misc_feature (49)..(364): Homolog of NCBI NO: 6073860 NR Description: beta-1, 3-glucananse [Musa acuminata]
  misc_feature (49)..(364): Homolog of NCBI NO: 6448757 NR Description: beta-1,3-glucanase [Musa acuminata]
  misc_feature (48)..(362): Homolog of NCBI NO: 4097944 NR Description: beta-1,3-glucanase precursor [Oryza sativa]
  misc_feature (48)..(362): Homolog of NCBI NO: 34908958 NR Description: beta-1,3-glucanase precursor
  misc_feature (23)..(355): Homolog of NCBI NO: 15241384 NR Description: glycosyl hydrolase family 17 (beta-1,3-glucanase)
  misc_feature (26)..(365): Homolog of NCBI NO: 15241345 NR Description: glycosyl hydrolase family 17 (beta-1,3-glucanase)
  misc_feature (21)..(365): Homolog of NCBI NO: 15217468 NR Description: glycosyl hydrolase family 17 (beta-1,3-glucanase)
  misc_feature (21)..(365): Homolog of NCBI NO: 15241326 NR Description: glycosyl hydrolase family 17 (beta-1,3-glucanase
  misc_feature (21)..(365): Homolog of NCBI NO: 15241325 NR Description: glycosyl hydrolase family 17 (beta-1,3-glucanase
  misc_feature (21)..(365): Homolog of NCBI NO: 21553380 NR Description: beta-1,3-glucanase bg4 [Arabidopsis thaliana]
QKTKFGSFFFFRRVISFVFIMLYSPKKLFLFFLSCIVLYVNYNNSGFVTAANSIGLNYGLLGDNLSSPSNVINLYKSIGISRIRIFDPNTEVLNALRGHRDIEVTVGVKDQDLAALAASEEAVKGWFAANIESYLADVNITFITVANEVIPGPIGPQVLPVMQSLTNLVKSRNLPISISTVVAMSNLEQSYPPSAGMFTSQAREQLVPVLKLLSQTSTPILVNIYPYFAYASDPANIRLDYASFNTKSIVVQDGSLGYSNMFDAIFDAFVWAMEKEGVKNLPMVVSETGWPSAGNGNFTTPAIASTYNRNFVKHIASGKGTPKRPNKSMNGFLFATFNENQKPAGTEQNFGLYNPSDMKPIYKLF

SEQ ID NO: 29449 - protein, 345 aa, Arabidopsis thaliana
  peptide (1)..(345): Ceres Seq. ID no. 13497192
  misc_feature (34)..(345): Pfam Name: Glycosyl hydrolases family 17 Pfam Description: Glycosyl hydrolases family 17
  misc_feature (29)..(344): Homolog of NCBI NO: 6073860 NR Description: beta-1, 3-glucananse [Musa acuminata]
  misc_feature (29)..(344): Homolog of NCBI NO: 6448757 NR Description: beta-1,3-glucanase [Musa acuminata]
  misc_feature (28)..(342): Homolog of NCBI NO: 4097944 NR Description: beta-1,3-glucanase precursor [Oryza sativa]
  misc_feature (28)..(342): Homolog of NCBI NO: 34908958 NR Description: beta-1,3-glucanase precursor
  misc_feature (3)..(335): Homolog of NCBI NO: 15241384 NR Description: glycosyl hydrolase family 17 (beta-1,3-glucanase)
  misc_feature (6)..(345): Homolog of NCBI NO: 15241345 NR Description: glycosyl hydrolase family 17 (beta-1,3-glucanase)
  misc_feature (1)..(345): Homolog of NCBI NO: 15217468 NR Description: glycosyl hydrolase family 17 (beta-1,3-glucanase)
  misc_feature (1)..(345): Homolog of NCBI NO: 15241326 NR Description: glycosyl hydrolase family 17 (beta-1,3-glucanase
  misc_feature (1)..(345): Homolog of NCBI NO: 15241325 NR Description: glycosyl hydrolase family 17 (beta-1,3-glucanase
  misc_feature (1)..(345): Homolog of NCBI NO: 21553380 NR Description: beta-1,3-glucanase bg4 [Arabidopsis thaliana]
MLYSPKKLFLFFLSCIVLYVNYNNSGFVTAANSIGLNYGLLGDNLSSPSNVINLYKSIGISRIRIFDPNTEVLNALRGHRDIEVTVGVKDQDLAALAASEEAVKGWFAANIESYLADVNITFITVANEVIPGPIGPQVLPVMQSLTNLVKSRNLPISISTVVAMSNLEQSYPPSAGMFTSQAREQLVPVLKLLSQTSTPILVNIYPYFAYASDPANIRLDYASFNTKSIVVQDGSLGYSNMFDAIFDAFVWAMEKEGVKNLPMVVSETGWPSAGNGNFTTPAIASTYNRNFVKHIASGKGTPKRPNKSMNGFLFATFNENQKPAGTEQNFGLYNPSDMKPIYKLF

SEQ ID NO: 29450 - protein, 204 aa, Arabidopsis thaliana
  peptide (1)..(204): Ceres Seq. ID no. 13497193
  misc_feature (1)..(204): Pfam Name: Glycosyl hydrolases family 17 Pfam Description: Glycosyl hydrolases family 17
  misc_feature (1)..(203): Homolog of NCBI NO: 6073860 NR Description: beta-1, 3-glucananse [Musa acuminata]
  misc_feature (1)..(203): Homolog of NCBI NO: 6448757 NR Description: beta-1,3-glucanase [Musa acuminata]
  misc_feature (1)..(201): Homolog of NCBI NO: 4097944 NR Description: beta-1,3-glucanase precursor [Oryza sativa]
  misc_feature (1)..(201): Homolog of NCBI NO: 34908958 NR Description: beta-1,3-glucanase precursor
  misc_feature (1)..(194): Homolog of NCBI NO: 15241384 NR Description: glycosyl hydrolase family 17 (beta-1,3-glucanase)
  misc_feature (1)..(204): Homolog of NCBI NO: 15241345 NR Description: glycosyl hydrolase family 17 (beta-1,3-glucanase)
  misc_feature (1)..(204): Homolog of NCBI NO: 15217468 NR Description: glycosyl hydrolase family 17 (beta-1,3-glucanase)
  misc_feature (1)..(204): Homolog of NCBI NO: 15241326 NR Description: glycosyl hydrolase family 17 (beta-1,3-glucanase
  misc_feature (1)..(204): Homolog of NCBI NO: 15241325 NR Description: glycosyl hydrolase family 17 (beta-1,3-glucanase
  misc_feature (1)..(204): Homolog of NCBI NO: 21553380 NR Description: beta-1,3-glucanase bg4 [Arabidopsis thaliana]
MQSLTNLVKSRNLPISISTVVAMSNLEQSYPPSAGMFTSQAREQLVPVLKLLSQTSTPILVNIYPYFAYASDPANIRLDYASFNTKSIVVQDGSLGYSNMFDAIFDAFVWAMEKEGVKNLPMVVSETGWPSAGNGNFTTPAIASTYNRNFVKHIASGKGTPKRPNKSMNGFLFATFNENQKPAGTEQNFGLYNPSDMKPIYKLF

SEQ ID NO: 29451 - DNA, 1162 bp, Arabidopsis thaliana
  misc_feature (1)..(1162): Ceres Seq. ID no. 13495779
  misc_feature: MA Experiment ID: 108573 Result: Up-regulated in Transcription
  misc_feature: MA Experiment 108573 PARAMETER Experiment Name: At_Drought_cDNA_P Parameter: Timepoint (hr) Value: 6
  misc_feature: MA Experiment 108573 PARAMETER Experiment Name: At_Drought_cDNA_P Parameter: Tissue Value: Aerial
  misc_feature: MA Experiment 108573 PARAMETER Experiment Name: At_Drought_cDNA_P Parameter: Treatment Value: Drought vs. No Drought
  misc_feature: MA Experiment ID: 108579 Result: Up-regulated in Transcription
  misc_feature: MA Experiment 108579 PARAMETER Experiment Name: At_4deg_Cold_cDNA_P Parameter: Temperature (deg C) Value: 4 vs. 22
  misc_feature: MA Experiment 108579 PARAMETER Experiment Name: At_4deg_Cold_cDNA_P Parameter: Timepoint (hr) Value: 6
  misc_feature: MA Experiment 108579 PARAMETER Experiment Name: At_4deg_Cold_cDNA_P Parameter: Tissue Value: Aerial
  misc_feature: MA Experiment ID: 108608 Result: Up-regulated in Transcription
  misc_feature: MA Experiment 108608 PARAMETER Experiment Name: At_100uM_ABA_cDNA_P Parameter: Timepoint (hr) Value: 1
  misc_feature: MA Experiment 108608 PARAMETER Experiment Name: At_100uM_ABA_cDNA_P Parameter: Tissue Value: Aerial
  misc_feature: MA Experiment 108608 PARAMETER Experiment Name: At_100uM_ABA_cDNA_P Parameter: Treatment Value: 100uM ABA vs. No Treatment
  misc_feature: MA Experiment ID: 108668 Result: Up-regulated in Transcription
  misc_feature: MA Experiment 108668 PARAMETER Experiment Name: At_2mM_SA_cDNA_P Parameter: Plant Line Value: WS
  misc_feature: MA Experiment 108668 PARAMETER Experiment Name: At_2mM_SA_cDNA_P Parameter: Timepoint (hr) Value: 6
  misc_feature: MA Experiment 108668 PARAMETER Experiment Name: At_2mM_SA_cDNA_P Parameter: Treatment Value: 2mM SA vs. No Treatment
  misc_feature: MA Experiment ID: 20000166 Result: Up-regulated in Transcription
  misc_feature: MA Experiment 20000166 PARAMETER Experiment Name: At_100uM_ABA_P Parameter: Age (day) Value: 14
  misc_feature: MA Experiment 20000166 PARAMETER Experiment Name: At_100uM_ABA_P Parameter: Organism Value: A. thaliana
  misc_feature: MA Experiment 20000166 PARAMETER Experiment Name: At_100uM_ABA_P Parameter: Plant Line Value: WS
  misc_feature: MA Experiment 20000166 PARAMETER Experiment Name: At_100uM_ABA_P Parameter: Timepoint (hr) Value: 1
  misc_feature: MA Experiment 20000166 PARAMETER Experiment Name: At_100uM_ABA_P Parameter: Tissue Value: Aerial
  misc_feature: MA Experiment 20000166 PARAMETER Experiment Name: At_100uM_ABA_P Parameter: Treatment Value: 100uM ABA vs. No Treatment
  misc_feature: MA Experiment ID: 20000173 Result: Up-regulated in Transcription
  misc_feature: MA Experiment 20000173 PARAMETER Experiment Name: At_42deg_Heat_P Parameter: Age (day) Value: 14
  misc_feature: MA Experiment 20000173 PARAMETER Experiment Name: At_42deg_Heat_P Parameter: Organism Value: A. thaliana
  misc_feature: MA Experiment 20000173 PARAMETER Experiment Name: At_42deg_Heat_P Parameter: Plant Line Value: WS
  misc_feature: MA Experiment 20000173 PARAMETER Experiment Name: At_42deg_Heat_P Parameter: Temperature (deg C) Value: 42 vs. 22
  misc_feature: MA Experiment 20000173 PARAMETER Experiment Name: At_42deg_Heat_P Parameter: Timepoint (hr) Value: 6
  misc_feature: MA Experiment 20000173 PARAMETER Experiment Name: At_42deg_Heat_P Parameter: Tissue Value: Aerial
  misc_feature: MA Experiment ID: 20000182 Result: Up-regulated in Transcription
  misc_feature: MA Experiment 20000182 PARAMETER Experiment Name: At_2mM_SA_P Parameter: Age (day) Value: 14
  misc_feature: MA Experiment 20000182 PARAMETER Experiment Name: At_2mM_SA_P Parameter: Organism Value: A. thaliana
  misc_feature: MA Experiment 20000182 PARAMETER Experiment Name: At_2mM_SA_P Parameter: Plant Line Value: WS
  misc_feature: MA Experiment 20000182 PARAMETER Experiment Name: At_2mM_SA_P Parameter: Timepoint (hr) Value: 6
  misc_feature: MA Experiment 20000182 PARAMETER Experiment Name: At_2mM_SA_P Parameter: Tissue Value: Aerial
  misc_feature: MA Experiment 20000182 PARAMETER Experiment Name: At_2mM_SA_P Parameter: Treatment Value: 2mM SA vs. No Treatment
  misc_feature: MA Experiment ID: 20000436 Result: Up-regulated in Transcription
  misc_feature: MA Experiment 20000436 PARAMETER Experiment Name: At_Drought_P Parameter: Age (day) Value: 7
  misc_feature: MA Experiment 20000436 PARAMETER Experiment Name: At_Drought_P Parameter: Organism Value: A. thaliana
  misc_feature: MA Experiment 20000436 PARAMETER Experiment Name: At_Drought_P Parameter: Plant Line Value: WS
  misc_feature: MA Experiment 20000436 PARAMETER Experiment Name: At_Drought_P Parameter: Timepoint (hr) Value: 12
  misc_feature: MA Experiment 20000436 PARAMETER Experiment Name: At_Drought_P Parameter: Tissue Value: Whole Plant
  misc_feature: MA Experiment 20000436 PARAMETER Experiment Name: At_Drought_P Parameter: Treatment Value: Drought vs. No Drought
  misc_feature: MA Experiment ID: 20000437 Result: Up-regulated in Transcription
  misc_feature: MA Experiment 20000437 PARAMETER Experiment Name: At_Drought_P Parameter: Age (day) Value: 8
  misc_feature: MA Experiment 20000437 PARAMETER Experiment Name: At_Drought_P Parameter: Organism Value: A. thaliana
  misc_feature: MA Experiment 20000437 PARAMETER Experiment Name: At_Drought_P Parameter: Plant Line Value: WS
  misc_feature: MA Experiment 20000437 PARAMETER Experiment Name: At_Drought_P Parameter: Timepoint (hr) Value: 24
  misc_feature: MA Experiment 20000437 PARAMETER Experiment Name: At_Drought_P Parameter: Tissue Value: Whole Plant
  misc_feature: MA Experiment 20000437 PARAMETER Experiment Name: At_Drought_P Parameter: Treatment Value: Drought vs. No Drought
  misc_feature: MA Experiment ID: 20001905 Result: Up-regulated in Transcription
  misc_feature: MA Experiment 20001905 PARAMETER Experiment Name: At_Drought_Reproduction_P Parameter: Age (day) Value: 40
  misc_feature: MA Experiment 20001905 PARAMETER Experiment Name: At_Drought_Reproduction_P Parameter: Organism Value: A. thaliana
  misc_feature: MA Experiment 20001905 PARAMETER Experiment Name: At_Drought_Reproduction_P Parameter: Plant Line Value: WS
  misc_feature: MA Experiment 20001905 PARAMETER Experiment Name: At_Drought_Reproduction_P Parameter: Timepoint (day) Value: 10
  misc_feature: MA Experiment 20001905 PARAMETER Experiment Name: At_Drought_Reproduction_P Parameter: Tissue Value: Rosettes
  misc_feature: MA Experiment 20001905 PARAMETER Experiment Name: At_Drought_Reproduction_P Parameter: Treatment Value: Drought vs. No Drought
  misc_feature: MA Experiment ID: 20001911 Result: Up-regulated in Transcription
  misc_feature: MA Experiment 20001911 PARAMETER Experiment Name: At_Drought_Reproduction_P Parameter: Age (day) Value: 40
  misc_feature: MA Experiment 20001911 PARAMETER Experiment Name: At_Drought_Reproduction_P Parameter: Organism Value: A. thaliana
  misc_feature: MA Experiment 20001911 PARAMETER Experiment Name: At_Drought_Reproduction_P Parameter: Plant Line Value: WS
  misc_feature: MA Experiment 20001911 PARAMETER Experiment Name: At_Drought_Reproduction_P Parameter: Timepoint (day) Value: 10
  misc_feature: MA Experiment 20001911 PARAMETER Experiment Name: At_Drought_Reproduction_P Parameter: Tissue Value: Flowers
  misc_feature: MA Experiment 20001911 PARAMETER Experiment Name: At_Drought_Reproduction_P Parameter: Treatment Value: Drought vs. No Drought
cattacctagaacatcctaatcaaaaaaaatcgaaaaaagctaagatctttgcgttttgaaacgatggcggaagaacataagcatgatgaatctgtgatcgctcctgagccagctgttgaggttgtggagagagaatcgttgatggataagatatcggagaagatccatcacggtggtgattcttcttcgtcttcttcatcttctgatgatgaagacgagaagaagaagactaagaagccctcttctccttcgtcttctatgaaatcgaaagtttaccgcttgttcggacgagagcagcctgttcataaggttctcggcggtggaaagccggctgatatattcatgtggaagaacaagaagatgtctggtggtgtacttggtggtgctacagctgcttgggttgtgtttgaattgatggagtaccatcttctcactctgctttgccacgtgatgattgttgttctcgctgtgctgtttttgtggtctaatgccactatgttcattaacaagtccccaccaaagattcctgaagttcatatccctgaagaacctattcttcagcttgcgtctgggctcaatcgagatcaaccgtggattctcttctctccgtgaaattgcatcaggaagggatctcaagaaattcctcattgctattgccgggttatgggttctctcaatcttgggcggttgcttcaacttcttgacattggcatacatagctcttgtgttgctcttcacggttcctcttgcctacgacaagtatgaagacaaagtcgacccattaggtgagaaagcaatgatcgagctcaagaagcagtatgcagtgttggatgagaaggtgttgagcaagatcccacttgggccgttgaagaacaagaagaaagattaggggtttacacaaggttgtccgtggctagcaaaacgggtgttgtgaaatggtatcgaagtaatgtgttttgggcgtttttttaggtggctctttcggttatgtgaatgaacttggaattttcctgactggtttgttctgttgtttatgtcattgttgatcagcgtcgagggataaaagtagtgatatttcttctctctctaagcctctatataactaagaatttcaagatatttgaattttgcaatctcgtggttaatgttgttctttctctt

SEQ ID NO: 29452 - protein, 182 aa, Arabidopsis thaliana
  peptide (1)..(182): Ceres Seq. ID no. 13495780
  misc_feature (51)..(171): Homolog of NCBI NO: 34899590 NR Description: hypothetical protein~similar to Oryza sativa
  misc_feature (53)..(168): Homolog of NCBI NO: 34897094 NR Description: unknown protein [Oryza sativa (japonica
  misc_feature (12)..(182): Homolog of NCBI NO: 15233147 NR Description: hypothetical protein [Arabidopsis thaliana]
  misc_feature (12)..(174): Homolog of NCBI NO: 18406991 NR Description: expressed protein [Arabidopsis thaliana]
  misc_feature (24)..(168): Homolog of NCBI NO: 34904202 NR Description: P0492F05.25 [Oryza sativa (japonica
  misc_feature (17)..(171): Homolog of NCBI NO: 15222616 NR Description: expressed protein [Arabidopsis thaliana]
  misc_feature (22)..(171): Homolog of NCBI NO: 34909318 NR Description: OSJNBb0021A09.5 [Oryza sativa (japonica
  misc_feature (24)..(171): Homolog of NCBI NO: 15238125 NR Description: expressed protein [Arabidopsis thaliana]
  misc_feature (1)..(171): Homolog of NCBI NO: 15237093 NR Description: expressed protein [Arabidopsis thaliana]
  misc_feature (1)..(171): Homolog of NCBI NO: 15236556 NR Description: expressed protein [Arabidopsis thaliana]
MAEEHKHDESVIAPEPAVEVVERESLMDKISEKIHHGGDSSSSSSSSDDEDEKKKTKKPSSPSSSMKSKVYRLFGREQPVHKVLGGGKPADIFMWKNKKMSGGVLGGATAAWVVFELMEYHLLTLLCHVMIVVLAVLFLWSNATMFINKSPPKIPEVHIPEEPILQLASGLNRDQPWILFSP

SEQ ID NO: 29453 - protein, 156 aa, Arabidopsis thaliana
  peptide (1)..(156): Ceres Seq. ID no. 13495781
  misc_feature (25)..(145): Homolog of NCBI NO: 34899590 NR Description: hypothetical protein~similar to Oryza sativa
  misc_feature (27)..(142): Homolog of NCBI NO: 34897094 NR Description: unknown protein [Oryza sativa (japonica
  misc_feature (1)..(156): Homolog of NCBI NO: 15233147 NR Description: hypothetical protein [Arabidopsis thaliana]
  misc_feature (1)..(148): Homolog of NCBI NO: 18406991 NR Description: expressed protein [Arabidopsis thaliana]
  misc_feature (1)..(142): Homolog of NCBI NO: 34904202 NR Description: P0492F05.25 [Oryza sativa (japonica
  misc_feature (1)..(145): Homolog of NCBI NO: 15222616 NR Description: expressed protein [Arabidopsis thaliana]
  misc_feature (1)..(145): Homolog of NCBI NO: 34909318 NR Description: OSJNBb0021A09.5 [Oryza sativa (japonica
  misc_feature (1)..(145): Homolog of NCBI NO: 15238125 NR Description: expressed protein [Arabidopsis thaliana]
  misc_feature (1)..(145): Homolog of NCBI NO: 15237093 NR Description: expressed protein [Arabidopsis thaliana]
  misc_feature (1)..(145): Homolog of NCBI NO: 15236556 NR Description: expressed protein [Arabidopsis thaliana]
MDKISEKIHHGGDSSSSSSSSDDEDEKKKTKKPSSPSSSMKSKVYRLFGREQPVHKVLGGGKPADIFMWKNKKMSGGVLGGATAAWVVFELMEYHLLTLLCHVMIVVLAVLFLWSNATMFINKSPPKIPEVHIPEEPILQLASGLNRDQPWILFSP

SEQ ID NO: 29454 - protein, 133 aa, Arabidopsis thaliana
  peptide (1)..(133): Ceres Seq. ID no. 13495782
  misc_feature (32)..(133): Homolog of NCBI NO: 34899590 NR Description: hypothetical protein~similar to Oryza sativa
  misc_feature (20)..(133): Homolog of NCBI NO: 34897094 NR Description: unknown protein [Oryza sativa (japonica
  misc_feature (58)..(130): Homolog of NCBI NO: 15233147 NR Description: hypothetical protein [Arabidopsis thaliana]
  misc_feature (32)..(132): Homolog of NCBI NO: 18406991 NR Description: expressed protein [Arabidopsis thaliana]
  misc_feature (8)..(131): Homolog of NCBI NO: 34904202 NR Description: P0492F05.25 [Oryza sativa (japonica
  misc_feature (31)..(133): Homolog of NCBI NO: 15222616 NR Description: expressed protein [Arabidopsis thaliana]
  misc_feature (21)..(131): Homolog of NCBI NO: 34909318 NR Description: OSJNBb0021A09.5 [Oryza sativa (japonica
  misc_feature (31)..(133): Homolog of NCBI NO: 15238125 NR Description: expressed protein [Arabidopsis thaliana]
  misc_feature (31)..(133): Homolog of NCBI NO: 15237093 NR Description: expressed protein [Arabidopsis thaliana]
  misc_feature (31)..(133): Homolog of NCBI NO: 15236556 NR Description: expressed protein [Arabidopsis thaliana]
MPLCSLTSPHQRFLKFISLKNLFFSLRLGSIEINRGFSSLREIASGRDLKKFLIAIAGLWVLSILGGCFNFLTLAYIALVLLFTVPLAYDKYEDKVDPLGEKAMIELKKQYAVLDEKVLSKIPLGPLKNKKKD

SEQ ID NO: 29455 - DNA, 1244 bp, Arabidopsis thaliana
  misc_feature (1)..(1244): Ceres Seq. ID no. 12385291
  misc_feature: MA Experiment ID: 108434 Result: Up-regulated in Transcription
  misc_feature: MA Experiment 108434 PARAMETER Experiment Name: At_Root_Tips_cDNA_P Parameter: Tissue Value: Root Tips
  misc_feature: MA Experiment ID: 108435 Result: Up-regulated in Transcription
  misc_feature: MA Experiment 108435 PARAMETER Experiment Name: At_stm_Mutants_cDNA_P Parameter: Plant Line Value: wt Landsburg vs stm
  misc_feature: MA Experiment 108435 PARAMETER Experiment Name: At_stm_Mutants_cDNA_P Parameter: Tissue Value: Shoot Apical Meristem Region
  misc_feature: MA Experiment ID: 108461 Result: Down-regulated in Transcription
  misc_feature: MA Experiment 108461 PARAMETER Experiment Name: At_Germinating_Seeds_cDNA_P Parameter: Age (day) Value: 1 vs. 0
  misc_feature: MA Experiment 108461 PARAMETER Experiment Name: At_Germinating_Seeds_cDNA_P Parameter: Tissue Value: Germinating Seeds
  misc_feature: MA Experiment ID: 108462 Result: Down-regulated in Transcription
  misc_feature: MA Experiment 108462 PARAMETER Experiment Name: At_Germinating_Seeds_cDNA_P Parameter: Age (day) Value: 2 vs. 0
  misc_feature: MA Experiment 108462 PARAMETER Experiment Name: At_Germinating_Seeds_cDNA_P Parameter: Tissue Value: Germinating Seeds
  misc_feature: MA Experiment ID: 108463 Result: Down-regulated in Transcription
  misc_feature: MA Experiment 108463 PARAMETER Experiment Name: At_Germinating_Seeds_cDNA_P Parameter: Age (day) Value: 3 vs. 0
  misc_feature: MA Experiment 108463 PARAMETER Experiment Name: At_Germinating_Seeds_cDNA_P Parameter: Tissue Value: Germinating Seeds
  misc_feature: MA Experiment ID: 108464 Result: Down-regulated in Transcription
  misc_feature: MA Experiment 108464 PARAMETER Experiment Name: At_Germinating_Seeds_cDNA_P Parameter: Age (day) Value: 4 vs. 0
  misc_feature: MA Experiment 108464 PARAMETER Experiment Name: At_Germinating_Seeds_cDNA_P Parameter: Tissue Value: Germinating Seeds
  misc_feature: MA Experiment ID: 108569 Result: Up-regulated in Transcription
  misc_feature: MA Experiment 108569 PARAMETER Experiment Name: At_0.001%_MeJA__cDNA_P Parameter: Timepoint (hr) Value: 6
  misc_feature: MA Experiment 108569 PARAMETER Experiment Name: At_0.001%_MeJA__cDNA_P Parameter: Tissue Value: Aerial
  misc_feature: MA Experiment 108569 PARAMETER Experiment Name: At_0.001%_MeJA__cDNA_P Parameter: Treatment Value: 0.001% MeJA vs. No Treatment
  misc_feature: MA Experiment ID: 108572 Result: Up-regulated in Transcription
  misc_feature: MA Experiment 108572 PARAMETER Experiment Name: At_Drought_cDNA_P Parameter: Timepoint (hr) Value: 1
  misc_feature: MA Experiment 108572 PARAMETER Experiment Name: At_Drought_cDNA_P Parameter: Tissue Value: Aerial
  misc_feature: MA Experiment 108572 PARAMETER Experiment Name: At_Drought_cDNA_P Parameter: Treatment Value: Drought vs. No Drought
  misc_feature: MA Experiment ID: 108573 Result: Up-regulated in Transcription
  misc_feature: MA Experiment 108573 PARAMETER Experiment Name: At_Drought_cDNA_P Parameter: Timepoint (hr) Value: 6
  misc_feature: MA Experiment 108573 PARAMETER Experiment Name: At_Drought_cDNA_P Parameter: Tissue Value: Aerial
  misc_feature: MA Experiment 108573 PARAMETER Experiment Name: At_Drought_cDNA_P Parameter: Treatment Value: Drought vs. No Drought
  misc_feature: MA Experiment ID: 108574 Result: Up-regulated in Transcription
  misc_feature: MA Experiment 108574 PARAMETER Experiment Name: At_Wounding__cDNA_P Parameter: Timepoint (hr) Value: 1
  misc_feature: MA Experiment 108574 PARAMETER Experiment Name: At_Wounding__cDNA_P Parameter: Tissue Value: Aerial
  misc_feature: MA Experiment 108574 PARAMETER Experiment Name: At_Wounding__cDNA_P Parameter: Treatment Value: Wounding vs. No Wounding
  misc_feature: MA Experiment ID: 108594 Result: Down-regulated in Transcription
  misc_feature: MA Experiment 108594 PARAMETER Experiment Name: At_Ler-rhl_Root_cDNA_P Parameter: Plant Line Value: null
  misc_feature: MA Experiment ID: 108595 Result: Down-regulated in Transcription
  misc_feature: MA Experiment 108595 PARAMETER Experiment Name: At_Ler-pi_Ovule_cDNA_P Parameter: Plant Line Value: null
  misc_feature: MA Experiment ID: 20000069 Result: Down-regulated in Transcription
  misc_feature: MA Experiment 20000069 PARAMETER Experiment Name: At_100uM_ABA_Mutants_cDNA_P Parameter: Plant Line Value: CS23
  misc_feature: MA Experiment 20000069 PARAMETER Experiment Name: At_100uM_ABA_Mutants_cDNA_P Parameter: Timepoint (hr) Value: 6
  misc_feature: MA Experiment 20000069 PARAMETER Experiment Name: At_100uM_ABA_Mutants_cDNA_P Parameter: Tissue Value: Aerial
  misc_feature: MA Experiment 20000069 PARAMETER Experiment Name: At_100uM_ABA_Mutants_cDNA_P Parameter: Treatment Value: 100uM ABA vs. No Treatment
  misc_feature: MA Experiment ID: 20000071 Result: Down-regulated in Transcription
  misc_feature: MA Experiment 20000071 PARAMETER Experiment Name: At_100uM_ABA_Mutants_cDNA_P Parameter: Plant Line Value: CS8104
  misc_feature: MA Experiment 20000071 PARAMETER Experiment Name: At_100uM_ABA_Mutants_cDNA_P Parameter: Timepoint (hr) Value: 6
  misc_feature: MA Experiment 20000071 PARAMETER Experiment Name: At_100uM_ABA_Mutants_cDNA_P Parameter: Tissue Value: Aerial
  misc_feature: MA Experiment 20000071 PARAMETER Experiment Name: At_100uM_ABA_Mutants_cDNA_P Parameter: Treatment Value: 100uM ABA vs. No Treatment
  misc_feature: MA Experiment ID: 20000072 Result: Down-regulated in Transcription
  misc_feature: MA Experiment 20000072 PARAMETER Experiment Name: At_100uM_ABA_Mutants_cDNA_P Parameter: Plant Line Value: CS8105
  misc_feature: MA Experiment 20000072 PARAMETER Experiment Name: At_100uM_ABA_Mutants_cDNA_P Parameter: Timepoint (hr) Value: 6
  misc_feature: MA Experiment 20000072 PARAMETER Experiment Name: At_100uM_ABA_Mutants_cDNA_P Parameter: Tissue Value: Aerial
  misc_feature: MA Experiment 20000072 PARAMETER Experiment Name: At_100uM_ABA_Mutants_cDNA_P Parameter: Treatment Value: 100uM ABA vs. No Treatment
  misc_feature: MA Experiment ID: 20000086 Result: Down-regulated in Transcription
  misc_feature: MA Experiment 20000086 PARAMETER Experiment Name: At_100uM_ABA_Mutants_cDNA_P Parameter: Plant Line Value: CS22
  misc_feature: MA Experiment 20000086 PARAMETER Experiment Name: At_100uM_ABA_Mutants_cDNA_P Parameter: Timepoint (hr) Value: 6
  misc_feature: MA Experiment 20000086 PARAMETER Experiment Name: At_100uM_ABA_Mutants_cDNA_P Parameter: Tissue Value: Aerial
  misc_feature: MA Experiment 20000086 PARAMETER Experiment Name: At_100uM_ABA_Mutants_cDNA_P Parameter: Treatment Value: 100uM ABA vs. No Treatment
  misc_feature: MA Experiment ID: 20000087 Result: Down-regulated in Transcription
  misc_feature: MA Experiment 20000087 PARAMETER Experiment Name: At_100uM_ABA_Mutants_cDNA_P Parameter: Plant Line Value: WS
  misc_feature: MA Experiment 20000087 PARAMETER Experiment Name: At_100uM_ABA_Mutants_cDNA_P Parameter: Timepoint (hr) Value: 6
  misc_feature: MA Experiment 20000087 PARAMETER Experiment Name: At_100uM_ABA_Mutants_cDNA_P Parameter: Tissue Value: Aerial
  misc_feature: MA Experiment 20000087 PARAMETER Experiment Name: At_100uM_ABA_Mutants_cDNA_P Parameter: Treatment Value: 100uM ABA vs. No Treatment
  misc_feature: MA Experiment ID: 20000171 Result: Down-regulated in Transcription
  misc_feature: MA Experiment 20000171 PARAMETER Experiment Name: At_42deg_Heat_P Parameter: Age (day) Value: 14
  misc_feature: MA Experiment 20000171 PARAMETER Experiment Name: At_42deg_Heat_P Parameter: Organism Value: A. thaliana
  misc_feature: MA Experiment 20000171 PARAMETER Experiment Name: At_42deg_Heat_P Parameter: Plant Line Value: WS
  misc_feature: MA Experiment 20000171 PARAMETER Experiment Name: At_42deg_Heat_P Parameter: Temperature (deg C) Value: 42 vs. 22
  misc_feature: MA Experiment 20000171 PARAMETER Experiment Name: At_42deg_Heat_P Parameter: Timepoint (hr) Value: 1
  misc_feature: MA Experiment 20000171 PARAMETER Experiment Name: At_42deg_Heat_P Parameter: Tissue Value: Aerial
  misc_feature: MA Experiment ID: 20000179 Result: Down-regulated in Transcription
  misc_feature: MA Experiment 20000179 PARAMETER Experiment Name: At_Germinating_Seeds_P Parameter: Age (hr) Value: 6 vs. 0
  misc_feature: MA Experiment 20000179 PARAMETER Experiment Name: At_Germinating_Seeds_P Parameter: Tissue Value: Germinating Seeds
  misc_feature: MA Experiment ID: 20000180 Result: Down-regulated in Transcription
  misc_feature: MA Experiment 20000180 PARAMETER Experiment Name: At_Germinating_Seeds_P Parameter: Age (hr) Value: 24 vs. 0
  misc_feature: MA Experiment 20000180 PARAMETER Experiment Name: At_Germinating_Seeds_P Parameter: Tissue Value: Germinating Seeds
  misc_feature: MA Experiment ID: 20000184 Result: Up-regulated in Transcription
  misc_feature: MA Experiment 20000184 PARAMETER Experiment Name: At_Shoots__P Parameter: Age (day) Value: 7
  misc_feature: MA Experiment 20000184 PARAMETER Experiment Name: At_Shoots__P Parameter: Tissue Value: Shoots vs. Whole Plant
  misc_feature: MA Experiment ID: 20000185 Result: Down-regulated in Transcription
  misc_feature: MA Experiment 20000185 PARAMETER Experiment Name: At_Roots__P Parameter: Age (day) Value: 7 vs. 21
  misc_feature: MA Experiment 20000185 PARAMETER Experiment Name: At_Roots__P Parameter: Organism Value: A. thaliana
  misc_feature: MA Experiment 20000185 PARAMETER Experiment Name: At_Roots__P Parameter: Tissue Value: Roots vs. Whole Plant
  misc_feature: MA Experiment ID: 20000213 Result: Up-regulated in Transcription
  misc_feature: MA Experiment 20000213 PARAMETER Experiment Name: At_4deg_Cold_P Parameter: Timepoint (hr) Value: 2
  misc_feature: MA Experiment ID: 20000268 Result: Up-regulated in Transcription
  misc_feature: MA Experiment 20000268 PARAMETER Experiment Name: At_100mM_NaCl__P Parameter: Age (day) Value: 14
  misc_feature: MA Experiment 20000268 PARAMETER Experiment Name: At_100mM_NaCl__P Parameter: Organism Value: A. thaliana
  misc_feature: MA Experiment 20000268 PARAMETER Experiment Name: At_100mM_NaCl__P Parameter: Plant Line Value: WS
  misc_feature: MA Experiment 20000268 PARAMETER Experiment Name: At_100mM_NaCl__P Parameter: Timepoint (hr) Value: 6
  misc_feature: MA Experiment 20000268 PARAMETER Experiment Name: At_100mM_NaCl__P Parameter: Tissue Value: Whole Plant
  misc_feature: MA Experiment 20000268 PARAMETER Experiment Name: At_100mM_NaCl__P Parameter: Treatment Value: 100mM NaCl vs. No Treatment
  misc_feature: MA Experiment ID: 20000436 Result: Down-regulated in Transcription
  misc_feature: MA Experiment 20000436 PARAMETER Experiment Name: At_Drought_P Parameter: Age (day) Value: 7
  misc_feature: MA Experiment 20000436 PARAMETER Experiment Name: At_Drought_P Parameter: Organism Value: A. thaliana
  misc_feature: MA Experiment 20000436 PARAMETER Experiment Name: At_Drought_P Parameter: Plant Line Value: WS
  misc_feature: MA Experiment 20000436 PARAMETER Experiment Name: At_Drought_P Parameter: Timepoint (hr) Value: 12
  misc_feature: MA Experiment 20000436 PARAMETER Experiment Name: At_Drought_P Parameter: Tissue Value: Whole Plant
  misc_feature: MA Experiment 20000436 PARAMETER Experiment Name: At_Drought_P Parameter: Treatment Value: Drought vs. No Drought
  misc_feature: MA Experiment ID: 20000437 Result: Down-regulated in Transcription
  misc_feature: MA Experiment 20000437 PARAMETER Experiment Name: At_Drought_P Parameter: Age (day) Value: 8
  misc_feature: MA Experiment 20000437 PARAMETER Experiment Name: At_Drought_P Parameter: Organism Value: A. thaliana
  misc_feature: MA Experiment 20000437 PARAMETER Experiment Name: At_Drought_P Parameter: Plant Line Value: WS
  misc_feature: MA Experiment 20000437 PARAMETER Experiment Name: At_Drought_P Parameter: Timepoint (hr) Value: 24
  misc_feature: MA Experiment 20000437 PARAMETER Experiment Name: At_Drought_P Parameter: Tissue Value: Whole Plant
  misc_feature: MA Experiment 20000437 PARAMETER Experiment Name: At_Drought_P Parameter: Treatment Value: Drought vs. No Drought
  misc_feature: MA Experiment ID: 20000439 Result: Down-regulated in Transcription
  misc_feature: MA Experiment 20000439 PARAMETER Experiment Name: At_Roots__P Parameter: Age (day) Value: 14 vs. 21
  misc_feature: MA Experiment 20000439 PARAMETER Experiment Name: At_Roots__P Parameter: Organism Value: A. thaliana
  misc_feature: MA Experiment 20000439 PARAMETER Experiment Name: At_Roots__P Parameter: Tissue Value: Roots vs. Whole Plant
  misc_feature: MA Experiment ID: 20000453 Result: Down-regulated in Transcription
  misc_feature: MA Experiment 20000453 PARAMETER Experiment Name: At_100uM_ABA_P Parameter: Age (day) Value: 15
  misc_feature: MA Experiment 20000453 PARAMETER Experiment Name: At_100uM_ABA_P Parameter: Organism Value: A. thaliana
  misc_feature: MA Experiment 20000453 PARAMETER Experiment Name: At_100uM_ABA_P Parameter: Plant Line Value: WS
  misc_feature: MA Experiment 20000453 PARAMETER Experiment Name: At_100uM_ABA_P Parameter: Timepoint (hr) Value: 24
  misc_feature: MA Experiment 20000453 PARAMETER Experiment Name: At_100uM_ABA_P Parameter: Tissue Value: Aerial
  misc_feature: MA Experiment 20000453 PARAMETER Experiment Name: At_100uM_ABA_P Parameter: Treatment Value: 100uM ABA vs. No Treatment
  misc_feature: MA Experiment ID: 20000456 Result: Up-regulated in Transcription
  misc_feature: MA Experiment 20000456 PARAMETER Experiment Name: At_100uM_BA_P Parameter: Age (day) Value: 14
  misc_feature: MA Experiment 20000456 PARAMETER Experiment Name: At_100uM_BA_P Parameter: Organism Value: A. thaliana
  misc_feature: MA Experiment 20000456 PARAMETER Experiment Name: At_100uM_BA_P Parameter: Plant Line Value: WS
  misc_feature: MA Experiment 20000456 PARAMETER Experiment Name: At_100uM_BA_P Parameter: Timepoint (hr) Value: 6
  misc_feature: MA Experiment 20000456 PARAMETER Experiment Name: At_100uM_BA_P Parameter: Tissue Value: Aerial
  misc_feature: MA Experiment 20000456 PARAMETER Experiment Name: At_100uM_BA_P Parameter: Treatment Value: 100uM BA vs. No Treatment
  misc_feature: MA Experiment ID: 20000496 Result: Up-regulated in Transcription
  misc_feature: MA Experiment 20000496 PARAMETER Experiment Name: At_Guard_Cells_P Parameter: Harvest Date Value: 7/19/2002
  misc_feature: MA Experiment 20000496 PARAMETER Experiment Name: At_Guard_Cells_P Parameter: Organism Value: Canola
  misc_feature: MA Experiment 20000496 PARAMETER Experiment Name: At_Guard_Cells_P Parameter: Tissue Value: Guard Cells vs. Leaves
  misc_feature: MA Experiment ID: 20000794 Result: Down-regulated in Transcription
  misc_feature: MA Experiment 20000794 PARAMETER Experiment Name: At_Petals_P Parameter: Age (day) Value: 23-25 days
  misc_feature: MA Experiment 20000794 PARAMETER Experiment Name: At_Petals_P Parameter: Plant Line Value: WS
  misc_feature: MA Experiment 20000794 PARAMETER Experiment Name: At_Petals_P Parameter: Tissue Value: Petals vs. Whole plant
  misc_feature: MA Experiment ID: 20001247 Result: Down-regulated in Transcription
  misc_feature: MA Experiment 20001247 PARAMETER Experiment Name: At_Far-red-induction_P Parameter: Age (day) Value: 7
  misc_feature: MA Experiment 20001247 PARAMETER Experiment Name: At_Far-red-induction_P Parameter: Light Value: Far-red vs. White
  misc_feature: MA Experiment 20001247 PARAMETER Experiment Name: At_Far-red-induction_P Parameter: Organism Value: A. thaliana
  misc_feature: MA Experiment 20001247 PARAMETER Experiment Name: At_Far-red-induction_P Parameter: Plant Line Value: Columbia
  misc_feature: MA Experiment 20001247 PARAMETER Experiment Name: At_Far-red-induction_P Parameter: Timepoint (hr) Value: 1
  misc_feature: MA Experiment 20001247 PARAMETER Experiment Name: At_Far-red-induction_P Parameter: Tissue Value: Whole Plant
  misc_feature: MA Experiment ID: 20001248 Result: Down-regulated in Transcription
  misc_feature: MA Experiment 20001248 PARAMETER Experiment Name: At_Far-red-induction_P Parameter: Age (day) Value: 7
  misc_feature: MA Experiment 20001248 PARAMETER Experiment Name: At_Far-red-induction_P Parameter: Light Value: Far-red vs. White
  misc_feature: MA Experiment 20001248 PARAMETER Experiment Name: At_Far-red-induction_P Parameter: Organism Value: A. thaliana
  misc_feature: MA Experiment 20001248 PARAMETER Experiment Name: At_Far-red-induction_P Parameter: Plant Line Value: Columbia
  misc_feature: MA Experiment 20001248 PARAMETER Experiment Name: At_Far-red-induction_P Parameter: Timepoint (hr) Value: 4
  misc_feature: MA Experiment 20001248 PARAMETER Experiment Name: At_Far-red-induction_P Parameter: Tissue Value: Whole Plant
  misc_feature: MA Experiment ID: 20001450 Result: Down-regulated in Transcription
  misc_feature: MA Experiment 20001450 PARAMETER Experiment Name: At_Far-red-induction_P Parameter: Age (day) Value: 7
  misc_feature: MA Experiment 20001450 PARAMETER Experiment Name: At_Far-red-induction_P Parameter: Light Value: Far-red vs. White
  misc_feature: MA Experiment 20001450 PARAMETER Experiment Name: At_Far-red-induction_P Parameter: Organism Value: A. thaliana
  misc_feature: MA Experiment 20001450 PARAMETER Experiment Name: At_Far-red-induction_P Parameter: Plant Line Value: Columbia
  misc_feature: MA Experiment 20001450 PARAMETER Experiment Name: At_Far-red-induction_P Parameter: Timepoint (hr) Value: 8
  misc_feature: MA Experiment 20001450 PARAMETER Experiment Name: At_Far-red-induction_P Parameter: Tissue Value: Whole Plant
  misc_feature: MA Experiment ID: 20001451 Result: Down-regulated in Transcription
  misc_feature: MA Experiment 20001451 PARAMETER Experiment Name: At_Far-red-induction_P Parameter: Age (day) Value: 7
  misc_feature: MA Experiment 20001451 PARAMETER Experiment Name: At_Far-red-induction_P Parameter: Light Value: Far-red vs. White
  misc_feature: MA Experiment 20001451 PARAMETER Experiment Name: At_Far-red-induction_P Parameter: Organism Value: A. thaliana
  misc_feature: MA Experiment 20001451 PARAMETER Experiment Name: At_Far-red-induction_P Parameter: Plant Line Value: Columbia
  misc_feature: MA Experiment 20001451 PARAMETER Experiment Name: At_Far-red-induction_P Parameter: Timepoint (hr) Value: 24
  misc_feature: MA Experiment 20001451 PARAMETER Experiment Name: At_Far-red-induction_P Parameter: Tissue Value: Whole Plant
  misc_feature: MA Experiment ID: 20001458 Result: Up-regulated in Transcription
  misc_feature: MA Experiment 20001458 PARAMETER Experiment Name: At_50mM_NH4NO3_L-to-H_P Parameter: Age (day) Value: Undefined
  misc_feature: MA Experiment 20001458 PARAMETER Experiment Name: At_50mM_NH4NO3_L-to-H_P Parameter: Organism Value: Undefined
  misc_feature: MA Experiment 20001458 PARAMETER Experiment Name: At_50mM_NH4NO3_L-to-H_P Parameter: Plant Line Value: Undefined
  misc_feature: MA Experiment 20001458 PARAMETER Experiment Name: At_50mM_NH4NO3_L-to-H_P Parameter: Timepoint (hr) Value: 2
  misc_feature: MA Experiment 20001458 PARAMETER Experiment Name: At_50mM_NH4NO3_L-to-H_P Parameter: Tissue Value: Siliques
  misc_feature: MA Experiment 20001458 PARAMETER Experiment Name: At_50mM_NH4NO3_L-to-H_P Parameter: Treatment Value: 50mM NH4NO3 vs. 100mM Manitol
  misc_feature: MA Experiment ID: 20001554 Result: Down-regulated in Transcription
  misc_feature: MA Experiment 20001554 PARAMETER Experiment Name: At_Drought_Soil_Dry_P Parameter: Age (day) Value: 21
  misc_feature: MA Experiment 20001554 PARAMETER Experiment Name: At_Drought_Soil_Dry_P Parameter: Organism Value: A. thaliana
  misc_feature: MA Experiment 20001554 PARAMETER Experiment Name: At_Drought_Soil_Dry_P Parameter: Plant Line Value: WS
  misc_feature: MA Experiment 20001554 PARAMETER Experiment Name: At_Drought_Soil_Dry_P Parameter: Post Timepoint (hr) Value: None
  misc_feature: MA Experiment 20001554 PARAMETER Experiment Name: At_Drought_Soil_Dry_P Parameter: Post-Treatment Value: None
  misc_feature: MA Experiment 20001554 PARAMETER Experiment Name: At_Drought_Soil_Dry_P Parameter: Timepoint (day) Value: 7
  misc_feature: MA Experiment 20001554 PARAMETER Experiment Name: At_Drought_Soil_Dry_P Parameter: Treatment Value: Drought vs. No Drought
  misc_feature: MA Experiment ID: 20001555 Result: Down-regulated in Transcription
  misc_feature: MA Experiment 20001555 PARAMETER Experiment Name: At_Drought_Soil_Dry_P Parameter: Age (day) Value: 24
  misc_feature: MA Experiment 20001555 PARAMETER Experiment Name: At_Drought_Soil_Dry_P Parameter: Organism Value: A. thaliana
  misc_feature: MA Experiment 20001555 PARAMETER Experiment Name: At_Drought_Soil_Dry_P Parameter: Plant Line Value: WS
  misc_feature: MA Experiment 20001555 PARAMETER Experiment Name: At_Drought_Soil_Dry_P Parameter: Post Timepoint (hr) Value: None
  misc_feature: MA Experiment 20001555 PARAMETER Experiment Name: At_Drought_Soil_Dry_P Parameter: Post-Treatment Value: None
  misc_feature: MA Experiment 20001555 PARAMETER Experiment Name: At_Drought_Soil_Dry_P Parameter: Timepoint (day) Value: 10
  misc_feature: MA Experiment 20001555 PARAMETER Experiment Name: At_Drought_Soil_Dry_P Parameter: Treatment Value: Drought vs. No Drought
  misc_feature: MA Experiment ID: 20001556 Result: Down-regulated in Transcription
  misc_feature: MA Experiment 20001556 PARAMETER Experiment Name: At_Drought_Soil_Dry_P Parameter: Age (day) Value: 26
  misc_feature: MA Experiment 20001556 PARAMETER Experiment Name: At_Drought_Soil_Dry_P Parameter: Organism Value: A. thaliana
  misc_feature: MA Experiment 20001556 PARAMETER Experiment Name: At_Drought_Soil_Dry_P Parameter: Plant Line Value: WS
  misc_feature: MA Experiment 20001556 PARAMETER Experiment Name: At_Drought_Soil_Dry_P Parameter: Post Timepoint (hr) Value: None
  misc_feature: MA Experiment 20001556 PARAMETER Experiment Name: At_Drought_Soil_Dry_P Parameter: Post-Treatment Value: None
  misc_feature: MA Experiment 20001556 PARAMETER Experiment Name: At_Drought_Soil_Dry_P Parameter: Timepoint (day) Value: 12
  misc_feature: MA Experiment 20001556 PARAMETER Experiment Name: At_Drought_Soil_Dry_P Parameter: Treatment Value: Drought vs. No Drought
  misc_feature: MA Experiment ID: 20001557 Result: Up-regulated in Transcription
  misc_feature: MA Experiment 20001557 PARAMETER Experiment Name: At_Drought_Soil_Dry_P Parameter: Age (day) Value: 27
  misc_feature: MA Experiment 20001557 PARAMETER Experiment Name: At_Drought_Soil_Dry_P Parameter: Organism Value: A. thaliana
  misc_feature: MA Experiment 20001557 PARAMETER Experiment Name: At_Drought_Soil_Dry_P Parameter: Plant Line Value: WS
  misc_feature: MA Experiment 20001557 PARAMETER Experiment Name: At_Drought_Soil_Dry_P Parameter: Post Timepoint (hr) Value: 3
  misc_feature: MA Experiment 20001557 PARAMETER Experiment Name: At_Drought_Soil_Dry_P Parameter: Post-Treatment Value: Re-Water vs. No Drought
  misc_feature: MA Experiment 20001557 PARAMETER Experiment Name: At_Drought_Soil_Dry_P Parameter: Timepoint (day) Value: 13
  misc_feature: MA Experiment 20001557 PARAMETER Experiment Name: At_Drought_Soil_Dry_P Parameter: Treatment Value: Drought vs. No Drought
  misc_feature: MA Experiment ID: 20001558 Result: Up-regulated in Transcription
  misc_feature: MA Experiment 20001558 PARAMETER Experiment Name: At_Drought_Soil_Dry_P Parameter: Age (day) Value: 27
  misc_feature: MA Experiment 20001558 PARAMETER Experiment Name: At_Drought_Soil_Dry_P Parameter: Organism Value: A. thaliana
  misc_feature: MA Experiment 20001558 PARAMETER Experiment Name: At_Drought_Soil_Dry_P Parameter: Plant Line Value: WS
  misc_feature: MA Experiment 20001558 PARAMETER Experiment Name: At_Drought_Soil_Dry_P Parameter: Post Timepoint (hr) Value: 6
  misc_feature: MA Experiment 20001558 PARAMETER Experiment Name: At_Drought_Soil_Dry_P Parameter: Post-Treatment Value: Re-Water vs. No Drought
  misc_feature: MA Experiment 20001558 PARAMETER Experiment Name: At_Drought_Soil_Dry_P Parameter: Timepoint (day) Value: 13
  misc_feature: MA Experiment 20001558 PARAMETER Experiment Name: At_Drought_Soil_Dry_P Parameter: Treatment Value: Drought vs. No Drought
  misc_feature: MA Experiment ID: 20001559 Result: Down-regulated in Transcription
  misc_feature: MA Experiment 20001559 PARAMETER Experiment Name: At_Drought_Soil_Dry_P Parameter: Age (day) Value: 28
  misc_feature: MA Experiment 20001559 PARAMETER Experiment Name: At_Drought_Soil_Dry_P Parameter: Organism Value: A. thaliana
  misc_feature: MA Experiment 20001559 PARAMETER Experiment Name: At_Drought_Soil_Dry_P Parameter: Plant Line Value: WS
  misc_feature: MA Experiment 20001559 PARAMETER Experiment Name: At_Drought_Soil_Dry_P Parameter: Post Timepoint (hr) Value: 29
  misc_feature: MA Experiment 20001559 PARAMETER Experiment Name: At_Drought_Soil_Dry_P Parameter: Post-Treatment Value: Re-Water vs. No Drought
  misc_feature: MA Experiment 20001559 PARAMETER Experiment Name: At_Drought_Soil_Dry_P Parameter: Timepoint (day) Value: 14
  misc_feature: MA Experiment 20001559 PARAMETER Experiment Name: At_Drought_Soil_Dry_P Parameter: Treatment Value: Drought vs. No Drought
  misc_feature: MA Experiment ID: 20001560 Result: Up-regulated in Transcription
  misc_feature: MA Experiment 20001560 PARAMETER Experiment Name: At_Drought_Soil_Dry_P Parameter: Age (day) Value: 28
  misc_feature: MA Experiment 20001560 PARAMETER Experiment Name: At_Drought_Soil_Dry_P Parameter: Organism Value: A. thaliana
  misc_feature: MA Experiment 20001560 PARAMETER Experiment Name: At_Drought_Soil_Dry_P Parameter: Plant Line Value: WS
  misc_feature: MA Experiment 20001560 PARAMETER Experiment Name: At_Drought_Soil_Dry_P Parameter: Post Timepoint (hr) Value: None
  misc_feature: MA Experiment 20001560 PARAMETER Experiment Name: At_Drought_Soil_Dry_P Parameter: Post-Treatment Value: None
  misc_feature: MA Experiment 20001560 PARAMETER Experiment Name: At_Drought_Soil_Dry_P Parameter: Timepoint (day) Value: 14
  misc_feature: MA Experiment 20001560 PARAMETER Experiment Name: At_Drought_Soil_Dry_P Parameter: Treatment Value: Drought vs. No Drought
  misc_feature: MA Experiment ID: 20001757 Result: Up-regulated in Transcription
  misc_feature: MA Experiment 20001757 PARAMETER Experiment Name: At_50mM_NH4NO3_L-to-H_P Parameter: Timepoint (hr) Value: 6
  misc_feature: MA Experiment 20001757 PARAMETER Experiment Name: At_50mM_NH4NO3_L-to-H_P Parameter: Tissue Value: Leaf
  misc_feature: MA Experiment 20001757 PARAMETER Experiment Name: At_50mM_NH4NO3_L-to-H_P Parameter: Treatment Value: 50mM NH4NO3 vs 100mM Mannitol
  misc_feature: MA Experiment ID: 20001906 Result: Down-regulated in Transcription
  misc_feature: MA Experiment 20001906 PARAMETER Experiment Name: At_Drought_Reproduction_P Parameter: Age (day) Value: 35
  misc_feature: MA Experiment 20001906 PARAMETER Experiment Name: At_Drought_Reproduction_P Parameter: Organism Value: A. thaliana
  misc_feature: MA Experiment 20001906 PARAMETER Experiment Name: At_Drought_Reproduction_P Parameter: Plant Line Value: WS
  misc_feature: MA Experiment 20001906 PARAMETER Experiment Name: At_Drought_Reproduction_P Parameter: Timepoint (day) Value: 5
  misc_feature: MA Experiment 20001906 PARAMETER Experiment Name: At_Drought_Reproduction_P Parameter: Tissue Value: Siliques
  misc_feature: MA Experiment 20001906 PARAMETER Experiment Name: At_Drought_Reproduction_P Parameter: Treatment Value: Drought vs. No Drought
  misc_feature: MA Experiment ID: 20001908 Result: Down-regulated in Transcription
  misc_feature: MA Experiment 20001908 PARAMETER Experiment Name: At_Drought_Reproduction_P Parameter: Age (day) Value: 40
  misc_feature: MA Experiment 20001908 PARAMETER Experiment Name: At_Drought_Reproduction_P Parameter: Organism Value: A. thaliana
  misc_feature: MA Experiment 20001908 PARAMETER Experiment Name: At_Drought_Reproduction_P Parameter: Plant Line Value: WS
  misc_feature: MA Experiment 20001908 PARAMETER Experiment Name: At_Drought_Reproduction_P Parameter: Timepoint (day) Value: 10
  misc_feature: MA Experiment 20001908 PARAMETER Experiment Name: At_Drought_Reproduction_P Parameter: Tissue Value: Siliques
  misc_feature: MA Experiment 20001908 PARAMETER Experiment Name: At_Drought_Reproduction_P Parameter: Treatment Value: Drought vs. No Drought
  misc_feature: MA Experiment ID: 20001911 Result: Down-regulated in Transcription
  misc_feature: MA Experiment 20001911 PARAMETER Experiment Name: At_Drought_Reproduction_P Parameter: Age (day) Value: 40
  misc_feature: MA Experiment 20001911 PARAMETER Experiment Name: At_Drought_Reproduction_P Parameter: Organism Value: A. thaliana
  misc_feature: MA Experiment 20001911 PARAMETER Experiment Name: At_Drought_Reproduction_P Parameter: Plant Line Value: WS
  misc_feature: MA Experiment 20001911 PARAMETER Experiment Name: At_Drought_Reproduction_P Parameter: Timepoint (day) Value: 10
  misc_feature: MA Experiment 20001911 PARAMETER Experiment Name: At_Drought_Reproduction_P Parameter: Tissue Value: Flowers
  misc_feature: MA Experiment 20001911 PARAMETER Experiment Name: At_Drought_Reproduction_P Parameter: Treatment Value: Drought vs. No Drought
aaacccaacaacataatttcacatatctctctttctttctcttgaaggaaagacgaagatctccaagtcccaagttgttaacacaagacgtaaacatgggtcatcttgggttcttagttatgattatggtaggagtcatggcttcttctgtgagcggctacggtggcggttggatcaacgctcacgccactttttacggtggtggtgatgcttccggcacaatgggtggtgcttgtggatatggtaatctatatagccaaggctacgggacgagcacggcggctctaagcacagctctcttcaacaatggacttagctgtggttcttgctttgagataagatgtgaaaacgatggtaaatggtgtttacctggctcaatcgttgtaaccgctacaaacttctgcccgccaaataacgcgttagcgaacaataatggcggttggtgtaatcctcctcttgaacactttgaccttgctcagcctgtttttcaacgcattgctcagtacagagctggaatcgtccctgtttcctacagaagggttccttgcaggagaagaggaggaataagattcacgataaacggccactcatacttcaaccttgtgctgatcacaaacgtcggtggtgccggagacgttcactcggcggcgatcaagggttcaagaacagtgtggcaagctatgtcaaggaactgggggcaaaattggcaaagcaactcttacctcaacggtcaagcactttcctttaaggtcaccaccagcgacggccgcacagttgtctccttcaacgccgctcctgccggctggtcttatggccagacttttgccggtggacagttccgttaaaaagggcaagttggttaatctctcttccatttatctaaagtaaactcatttgtgtggttatattggtctcttgaaaaaactcggttattgagagagtgatgcgtcgagggctcggttttgcagaaggccttgatgacgtctaatctttttttggacctctttatttttctttcttgaaactagtttttgttaagaaagaaaaaacaagttatagtagttaatgtattactgatgcagaggtggagttttaactaccacccgctagtagtagttatgagttttttattttaaggtgtgagagagagatggattatcaagatttgtcaattttattatgtttgtttgtaataatacaattctttactccagttaatgaaaattgggggattgatcactttt

SEQ ID NO: 29456 - protein, 280 aa, Arabidopsis thaliana
  peptide (1)..(280): Ceres Seq. ID no. 12385292
  misc_feature (188)..(265): Pfam Name: Pollen allergen Pfam Description: Pollen allergen
  misc_feature (40)..(280): Homolog of NCBI NO: 29421118 NR Description: expansin [Vitis labrusca x Vitis vinifera]
  misc_feature (36)..(280): Homolog of NCBI NO: 29467507 NR Description: expansin [Pyrus communis]
  misc_feature (47)..(280): Homolog of NCBI NO: 11281293 NR Description: expansin EXP1 [imported] - Arabidopsis thaliana
  misc_feature (40)..(280): Homolog of NCBI NO: 38046730 NR Description: alpha-expansin 3 [Populus tremula x Populus
  misc_feature (32)..(280): Homolog of NCBI NO: 21615407 NR Description: alpha-expansin 3 [Cicer arietinum]
  misc_feature (32)..(280): Homolog of NCBI NO: 30697882 NR Description: expansin, putative (EXP1) [Arabidopsis thaliana]
  misc_feature (36)..(280): Homolog of NCBI NO: 29467505 NR Description: expansin [Pyrus communis]
  misc_feature (32)..(280): Homolog of NCBI NO: 15222356 NR Description: expansin (At-EXP1)
  misc_feature (32)..(280): Homolog of NCBI NO: 21553381 NR Description: alpha-expansin 10 precursor (At-EXP10) (AtEx10)
  misc_feature (32)..(280): Homolog of NCBI NO: 15223347 NR Description: expansin, putative
TQQHNFTYLSFFLLKERRRSPSPKLLTQDVNMGHLGFLVMIMVGVMASSVSGYGGGWINAHATFYGGGDASGTMGGACGYGNLYSQGYGTSTAALSTALFNNGLSCGSCFEIRCENDGKWCLPGSIVVTATNFCPPNNALANNNGGWCNPPLEHFDLAQPVFQRIAQYRAGIVPVSYRRVPCRRRGGIRFTINGHSYFNLVLITNVGGAGDVHSAAIKGSRTVWQAMSRNWGQNWQSNSYLNGQALSFKVTTSDGRTVVSFNAAPAGWSYGQTFAGGQFR

SEQ ID NO: 29457 - protein, 249 aa, Arabidopsis thaliana; identical to SEQ ID NO: 24224
  peptide (1)..(249): Ceres Seq. ID no. 12385293
  misc_feature (157)..(234): Pfam Name: Pollen allergen Pfam Description: Pollen allergen
  misc_feature (9)..(249): Homolog of NCBI NO: 29421118 NR Description: expansin [Vitis labrusca x Vitis vinifera]
  misc_feature (5)..(249): Homolog of NCBI NO: 29467507 NR Description: expansin [Pyrus communis]
  misc_feature (16)..(249): Homolog of NCBI NO: 11281293 NR Description: expansin EXP1 [imported] - Arabidopsis thaliana
  misc_feature (9)..(249): Homolog of NCBI NO: 38046730 NR Description: alpha-expansin 3 [Populus tremula x Populus
  misc_feature (1)..(249): Homolog of NCBI NO: 21615407 NR Description: alpha-expansin 3 [Cicer arietinum]
  misc_feature (1)..(249): Homolog of NCBI NO: 30697882 NR Description: expansin, putative (EXP1) [Arabidopsis thaliana]
  misc_feature (5)..(249): Homolog of NCBI NO: 29467505 NR Description: expansin [Pyrus communis]
  misc_feature (1)..(249): Homolog of NCBI NO: 15222356 NR Description: expansin (At-EXP1)
  misc_feature (1)..(249): Homolog of NCBI NO: 21553381 NR Description: alpha-expansin 10 precursor (At-EXP10) (AtEx10)
  misc_feature (1)..(249): Homolog of NCBI NO: 15223347 NR Description: expansin, putative

SEQ ID NO: 29458 - protein, 241 aa, Arabidopsis thaliana; identical to SEQ ID NO: 24225
  peptide (1)..(241): Ceres Seq. ID no. 12385294
  misc_feature (149)..(226): Pfam Name: Pollen allergen Pfam Description: Pollen allergen
  misc_feature (1)..(241): Homolog of NCBI NO: 29421118 NR Description: expansin [Vitis labrusca x Vitis vinifera]
  misc_feature (1)..(241): Homolog of NCBI NO: 29467507 NR Description: expansin [Pyrus communis]
  misc_feature (8)..(241): Homolog of NCBI NO: 11281293 NR Description: expansin EXP1 [imported] - Arabidopsis thaliana
  misc_feature (1)..(241): Homolog of NCBI NO: 38046730 NR Description: alpha-expansin 3 [Populus tremula x Populus
  misc_feature (1)..(241): Homolog of NCBI NO: 21615407 NR Description: alpha-expansin 3 [Cicer arietinum]
  misc_feature (1)..(241): Homolog of NCBI NO: 30697882 NR Description: expansin, putative (EXP1) [Arabidopsis thaliana]
  misc_feature (1)..(241): Homolog of NCBI NO: 29467505 NR Description: expansin [Pyrus communis]
  misc_feature (1)..(241): Homolog of NCBI NO: 15222356 NR Description: expansin (At-EXP1)
  misc_feature (1)..(241): Homolog of NCBI NO: 21553381 NR Description: alpha-expansin 10 precursor (At-EXP10) (AtEx10)
  misc_feature (1)..(241): Homolog of NCBI NO: 15223347 NR Description: expansin, putative

SEQ ID NO: 29459 - DNA, 1151 bp, Arabidopsis thaliana
  misc_feature (1)..(1151): Ceres Seq. ID no. 12327382
  misc_feature: MA Experiment ID: 108462 Result: Down-regulated in Transcription
  misc_feature: MA Experiment 108462 PARAMETER Experiment Name: At_Germinating_Seeds_cDNA_P Parameter: Age (day) Value: 2 vs. 0
  misc_feature: MA Experiment 108462 PARAMETER Experiment Name: At_Germinating_Seeds_cDNA_P Parameter: Tissue Value: Germinating Seeds
  misc_feature: MA Experiment ID: 108572 Result: Up-regulated in Transcription
  misc_feature: MA Experiment 108572 PARAMETER Experiment Name: At_Drought_cDNA_P Parameter: Timepoint (hr) Value: 1
  misc_feature: MA Experiment 108572 PARAMETER Experiment Name: At_Drought_cDNA_P Parameter: Tissue Value: Aerial
  misc_feature: MA Experiment 108572 PARAMETER Experiment Name: At_Drought_cDNA_P Parameter: Treatment Value: Drought vs. No Drought
  misc_feature: MA Experiment ID: 108579 Result: Up-regulated in Transcription
  misc_feature: MA Experiment 108579 PARAMETER Experiment Name: At_4deg_Cold_cDNA_P Parameter: Temperature (deg C) Value: 4 vs. 22
  misc_feature: MA Experiment 108579 PARAMETER Experiment Name: At_4deg_Cold_cDNA_P Parameter: Timepoint (hr) Value: 6
  misc_feature: MA Experiment 108579 PARAMETER Experiment Name: At_4deg_Cold_cDNA_P Parameter: Tissue Value: Aerial
  misc_feature: MA Experiment ID: 108594 Result: Down-regulated in Transcription
  misc_feature: MA Experiment 108594 PARAMETER Experiment Name: At_Ler-rhl_Root_cDNA_P Parameter: Plant Line Value: null
  misc_feature: MA Experiment ID: 108595 Result: Up-regulated in Transcription
  misc_feature: MA Experiment 108595 PARAMETER Experiment Name: At_Ler-pi_Ovule_cDNA_P Parameter: Plant Line Value: null
  misc_feature: MA Experiment ID: 108605 Result: Up-regulated in Transcription
  misc_feature: MA Experiment 108605 PARAMETER Experiment Name: At_100uM_ABA_cDNA_P Parameter: Timepoint (hr) Value: 6
  misc_feature: MA Experiment 108605 PARAMETER Experiment Name: At_100uM_ABA_cDNA_P Parameter: Tissue Value: Aerial
  misc_feature: MA Experiment 108605 PARAMETER Experiment Name: At_100uM_ABA_cDNA_P Parameter: Treatment Value: 100uM ABA vs. No Treatment
  misc_feature: MA Experiment ID: 108607 Result: Up-regulated in Transcription
  misc_feature: MA Experiment 108607 PARAMETER Experiment Name: At_100uM_ABA_cDNA_P Parameter: Timepoint (hr) Value: 4
  misc_feature: MA Experiment 108607 PARAMETER Experiment Name: At_100uM_ABA_cDNA_P Parameter: Tissue Value: Aerial
  misc_feature: MA Experiment 108607 PARAMETER Experiment Name: At_100uM_ABA_cDNA_P Parameter: Treatment Value: 100uM ABA vs. No Treatment
  misc_feature: MA Experiment ID: 108608 Result: Up-regulated in Transcription
  misc_feature: MA Experiment 108608 PARAMETER Experiment Name: At_100uM_ABA_cDNA_P Parameter: Timepoint (hr) Value: 1
  misc_feature: MA Experiment 108608 PARAMETER Experiment Name: At_100uM_ABA_cDNA_P Parameter: Tissue Value: Aerial
  misc_feature: MA Experiment 108608 PARAMETER Experiment Name: At_100uM_ABA_cDNA_P Parameter: Treatment Value: 100uM ABA vs. No Treatment
  misc_feature: MA Experiment ID: 20000069 Result: Up-regulated in Transcription
  misc_feature: MA Experiment 20000069 PARAMETER Experiment Name: At_100uM_ABA_Mutants_cDNA_P Parameter: Plant Line Value: CS23
  misc_feature: MA Experiment 20000069 PARAMETER Experiment Name: At_100uM_ABA_Mutants_cDNA_P Parameter: Timepoint (hr) Value: 6
  misc_feature: MA Experiment 20000069 PARAMETER Experiment Name: At_100uM_ABA_Mutants_cDNA_P Parameter: Tissue Value: Aerial
  misc_feature: MA Experiment 20000069 PARAMETER Experiment Name: At_100uM_ABA_Mutants_cDNA_P Parameter: Treatment Value: 100uM ABA vs. No Treatment
  misc_feature: MA Experiment ID: 20000070 Result: Up-regulated in Transcription
  misc_feature: MA Experiment 20000070 PARAMETER Experiment Name: At_100uM_ABA_Mutants_cDNA_P Parameter: Plant Line Value: CS24
  misc_feature: MA Experiment 20000070 PARAMETER Experiment Name: At_100uM_ABA_Mutants_cDNA_P Parameter: Timepoint (hr) Value: 6
  misc_feature: MA Experiment 20000070 PARAMETER Experiment Name: At_100uM_ABA_Mutants_cDNA_P Parameter: Tissue Value: Aerial
  misc_feature: MA Experiment 20000070 PARAMETER Experiment Name: At_100uM_ABA_Mutants_cDNA_P Parameter: Treatment Value: 100uM ABA vs. No Treatment
  misc_feature: MA Experiment ID: 20000071 Result: Up-regulated in Transcription
  misc_feature: MA Experiment 20000071 PARAMETER Experiment Name: At_100uM_ABA_Mutants_cDNA_P Parameter: Plant Line Value: CS8104
  misc_feature: MA Experiment 20000071 PARAMETER Experiment Name: At_100uM_ABA_Mutants_cDNA_P Parameter: Timepoint (hr) Value: 6
  misc_feature: MA Experiment 20000071 PARAMETER Experiment Name: At_100uM_ABA_Mutants_cDNA_P Parameter: Tissue Value: Aerial
  misc_feature: MA Experiment 20000071 PARAMETER Experiment Name: At_100uM_ABA_Mutants_cDNA_P Parameter: Treatment Value: 100uM ABA vs. No Treatment
  misc_feature: MA Experiment ID: 20000072 Result: Up-regulated in Transcription
  misc_feature: MA Experiment 20000072 PARAMETER Experiment Name: At_100uM_ABA_Mutants_cDNA_P Parameter: Plant Line Value: CS8105
  misc_feature: MA Experiment 20000072 PARAMETER Experiment Name: At_100uM_ABA_Mutants_cDNA_P Parameter: Timepoint (hr) Value: 6
  misc_feature: MA Experiment 20000072 PARAMETER Experiment Name: At_100uM_ABA_Mutants_cDNA_P Parameter: Tissue Value: Aerial
  misc_feature: MA Experiment 20000072 PARAMETER Experiment Name: At_100uM_ABA_Mutants_cDNA_P Parameter: Treatment Value: 100uM ABA vs. No Treatment
  misc_feature: MA Experiment ID: 20000086 Result: Up-regulated in Transcription
  misc_feature: MA Experiment 20000086 PARAMETER Experiment Name: At_100uM_ABA_Mutants_cDNA_P Parameter: Plant Line Value: CS22
  misc_feature: MA Experiment 20000086 PARAMETER Experiment Name: At_100uM_ABA_Mutants_cDNA_P Parameter: Timepoint (hr) Value: 6
  misc_feature: MA Experiment 20000086 PARAMETER Experiment Name: At_100uM_ABA_Mutants_cDNA_P Parameter: Tissue Value: Aerial
  misc_feature: MA Experiment 20000086 PARAMETER Experiment Name: At_100uM_ABA_Mutants_cDNA_P Parameter: Treatment Value: 100uM ABA vs. No Treatment
  misc_feature: MA Experiment ID: 20000087 Result: Up-regulated in Transcription
  misc_feature: MA Experiment 20000087 PARAMETER Experiment Name: At_100uM_ABA_Mutants_cDNA_P Parameter: Plant Line Value: WS
  misc_feature: MA Experiment 20000087 PARAMETER Experiment Name: At_100uM_ABA_Mutants_cDNA_P Parameter: Timepoint (hr) Value: 6
  misc_feature: MA Experiment 20000087 PARAMETER Experiment Name: At_100uM_ABA_Mutants_cDNA_P Parameter: Tissue Value: Aerial
  misc_feature: MA Experiment 20000087 PARAMETER Experiment Name: At_100uM_ABA_Mutants_cDNA_P Parameter: Treatment Value: 100uM ABA vs. No Treatment
  misc_feature: MA Experiment ID: 20000088 Result: Up-regulated in Transcription
  misc_feature: MA Experiment 20000088 PARAMETER Experiment Name: At_100uM_ABA_Mutants_cDNA_P Parameter: Plant Line Value: Landsberg
  misc_feature: MA Experiment 20000088 PARAMETER Experiment Name: At_100uM_ABA_Mutants_cDNA_P Parameter: Timepoint (hr) Value: 6
  misc_feature: MA Experiment 20000088 PARAMETER Experiment Name: At_100uM_ABA_Mutants_cDNA_P Parameter: Tissue Value: Aerial
  misc_feature: MA Experiment 20000088 PARAMETER Experiment Name: At_100uM_ABA_Mutants_cDNA_P Parameter: Treatment Value: 100uM ABA vs. No Treatment
  misc_feature: MA Experiment ID: 20000090 Result: Up-regulated in Transcription
  misc_feature: MA Experiment ID: 20000111 Result: Down-regulated in Transcription
  misc_feature: MA Experiment 20000111 PARAMETER Experiment Name: At_42deg_Heat_cDNA_P Parameter: Temperature (deg C) Value: 42 vs. 22
  misc_feature: MA Experiment 20000111 PARAMETER Experiment Name: At_42deg_Heat_cDNA_P Parameter: Timepoint (hr) Value: 6
  misc_feature: MA Experiment 20000111 PARAMETER Experiment Name: At_42deg_Heat_cDNA_P Parameter: Tissue Value: Aerial
  misc_feature: MA Experiment ID: 20000113 Result: Down-regulated in Transcription
  misc_feature: MA Experiment 20000113 PARAMETER Experiment Name: At_42deg_Heat_cDNA_P Parameter: Temperature (deg C) Value: 42 vs. 22
  misc_feature: MA Experiment 20000113 PARAMETER Experiment Name: At_42deg_Heat_cDNA_P Parameter: Timepoint (hr) Value: 8
  misc_feature: MA Experiment 20000113 PARAMETER Experiment Name: At_42deg_Heat_cDNA_P Parameter: Tissue Value: Aerial
  misc_feature: MA Experiment ID: 20000117 Result: Up-regulated in Transcription
  misc_feature: MA Experiment 20000117 PARAMETER Experiment Name: At_100uM_ABA_Mutants_cDNA_P Parameter: Plant Line Value: Columbia
  misc_feature: MA Experiment 20000117 PARAMETER Experiment Name: At_100uM_ABA_Mutants_cDNA_P Parameter: Timepoint (hr) Value: 6
  misc_feature: MA Experiment 20000117 PARAMETER Experiment Name: At_100uM_ABA_Mutants_cDNA_P Parameter: Tissue Value: Aerial
  misc_feature: MA Experiment 20000117 PARAMETER Experiment Name: At_100uM_ABA_Mutants_cDNA_P Parameter: Treatment Value: 100uM ABA vs. No Treatment
  misc_feature: MA Experiment ID: 20000173 Result: Down-regulated in Transcription
  misc_feature: MA Experiment 20000173 PARAMETER Experiment Name: At_42deg_Heat_P Parameter: Age (day) Value: 14
  misc_feature: MA Experiment 20000173 PARAMETER Experiment Name: At_42deg_Heat_P Parameter: Organism Value: A. thaliana
  misc_feature: MA Experiment 20000173 PARAMETER Experiment Name: At_42deg_Heat_P Parameter: Plant Line Value: WS
  misc_feature: MA Experiment 20000173 PARAMETER Experiment Name: At_42deg_Heat_P Parameter: Temperature (deg C) Value: 42 vs. 22
  misc_feature: MA Experiment 20000173 PARAMETER Experiment Name: At_42deg_Heat_P Parameter: Timepoint (hr) Value: 6
  misc_feature: MA Experiment 20000173 PARAMETER Experiment Name: At_42deg_Heat_P Parameter: Tissue Value: Aerial
  misc_feature: MA Experiment ID: 20000224 Result: Up-regulated in Transcription
  misc_feature: MA Experiment ID: 20000234 Result: Up-regulated in Transcription
  misc_feature: MA Experiment 20000234 PARAMETER Experiment Name: At_Siliques_P Parameter: Age (day) Value: 21
  misc_feature: MA Experiment 20000234 PARAMETER Experiment Name: At_Siliques_P Parameter: Organism Value: A. thaliana
  misc_feature: MA Experiment 20000234 PARAMETER Experiment Name: At_Siliques_P Parameter: Plant Line Value: WS
  misc_feature: MA Experiment 20000234 PARAMETER Experiment Name: At_Siliques_P Parameter: Tissue Value: Less Than 5mm Siliques vs. Whole Plant
  misc_feature: MA Experiment ID: 20000235 Result: Up-regulated in Transcription
  misc_feature: MA Experiment 20000235 PARAMETER Experiment Name: At_Siliques_P Parameter: Age (day) Value: 21
  misc_feature: MA Experiment 20000235 PARAMETER Experiment Name: At_Siliques_P Parameter: Organism Value: A. thaliana
  misc_feature: MA Experiment 20000235 PARAMETER Experiment Name: At_Siliques_P Parameter: Plant Line Value: WS
  misc_feature: MA Experiment 20000235 PARAMETER Experiment Name: At_Siliques_P Parameter: Tissue Value: 5-10mm Siliques vs. Whole Plant
  misc_feature: MA Experiment ID: 20000267 Result: Up-regulated in Transcription
  misc_feature: MA Experiment 20000267 PARAMETER Experiment Name: At_Drought_P Parameter: Age (day) Value: 7
  misc_feature: MA Experiment 20000267 PARAMETER Experiment Name: At_Drought_P Parameter: Organism Value: A. thaliana
  misc_feature: MA Experiment 20000267 PARAMETER Experiment Name: At_Drought_P Parameter: Plant Line Value: WS
  misc_feature: MA Experiment 20000267 PARAMETER Experiment Name: At_Drought_P Parameter: Timepoint (hr) Value: 6
  misc_feature: MA Experiment 20000267 PARAMETER Experiment Name: At_Drought_P Parameter: Tissue Value: Whole Plant
  misc_feature: MA Experiment 20000267 PARAMETER Experiment Name: At_Drought_P Parameter: Treatment Value: Drought vs. No Drought
  misc_feature: MA Experiment ID: 20000437 Result: Up-regulated in Transcription
  misc_feature: MA Experiment 20000437 PARAMETER Experiment Name: At_Drought_P Parameter: Age (day) Value: 8
  misc_feature: MA Experiment 20000437 PARAMETER Experiment Name: At_Drought_P Parameter: Organism Value: A. thaliana
  misc_feature: MA Experiment 20000437 PARAMETER Experiment Name: At_Drought_P Parameter: Plant Line Value: WS
  misc_feature: MA Experiment 20000437 PARAMETER Experiment Name: At_Drought_P Parameter: Timepoint (hr) Value: 24
  misc_feature: MA Experiment 20000437 PARAMETER Experiment Name: At_Drought_P Parameter: Tissue Value: Whole Plant
  misc_feature: MA Experiment 20000437 PARAMETER Experiment Name: At_Drought_P Parameter: Treatment Value: Drought vs. No Drought
  misc_feature: MA Experiment ID: 20000438 Result: Down-regulated in Transcription
  misc_feature: MA Experiment 20000438 PARAMETER Experiment Name: At_Shoots__P Parameter: Age (day) Value: 14
  misc_feature: MA Experiment 20000438 PARAMETER Experiment Name: At_Shoots__P Parameter: Tissue Value: Shoots vs. Whole Plant
  misc_feature: MA Experiment ID: 20000441 Result: Down-regulated in Transcription
  misc_feature: MA Experiment 20000441 PARAMETER Experiment Name: At_1uM_BR-BRZ__P Parameter: Tissue Value: Shoot Apices
  misc_feature: MA Experiment 20000441 PARAMETER Experiment Name: At_1uM_BR-BRZ__P Parameter: Treatment Value: 1uM BR vs. No Treatment
  misc_feature: MA Experiment ID: 20000443 Result: Down-regulated in Transcription
  misc_feature: MA Experiment 20000443 PARAMETER Experiment Name: At_1uM_BR-BRZ__P Parameter: Tissue Value: Shoot Apices
  misc_feature: MA Experiment 20000443 PARAMETER Experiment Name: At_1uM_BR-BRZ__P Parameter: Treatment Value: 1uM BRZ vs. No Treatment
  misc_feature: MA Experiment ID: 20001247 Result: Down-regulated in Transcription
  misc_feature: MA Experiment 20001247 PARAMETER Experiment Name: At_Far-red-induction_P Parameter: Age (day) Value: 7
  misc_feature: MA Experiment 20001247 PARAMETER Experiment Name: At_Far-red-induction_P Parameter: Light Value: Far-red vs. White
  misc_feature: MA Experiment 20001247 PARAMETER Experiment Name: At_Far-red-induction_P Parameter: Organism Value: A. thaliana
  misc_feature: MA Experiment 20001247 PARAMETER Experiment Name: At_Far-red-induction_P Parameter: Plant Line Value: Columbia
  misc_feature: MA Experiment 20001247 PARAMETER Experiment Name: At_Far-red-induction_P Parameter: Timepoint (hr) Value: 1
  misc_feature: MA Experiment 20001247 PARAMETER Experiment Name: At_Far-red-induction_P Parameter: Tissue Value: Whole Plant
  misc_feature: MA Experiment ID: 20001450 Result: Down-regulated in Transcription
  misc_feature: MA Experiment 20001450 PARAMETER Experiment Name: At_Far-red-induction_P Parameter: Age (day) Value: 7
  misc_feature: MA Experiment 20001450 PARAMETER Experiment Name: At_Far-red-induction_P Parameter: Light Value: Far-red vs. White
  misc_feature: MA Experiment 20001450 PARAMETER Experiment Name: At_Far-red-induction_P Parameter: Organism Value: A. thaliana
  misc_feature: MA Experiment 20001450 PARAMETER Experiment Name: At_Far-red-induction_P Parameter: Plant Line Value: Columbia
  misc_feature: MA Experiment 20001450 PARAMETER Experiment Name: At_Far-red-induction_P Parameter: Timepoint (hr) Value: 8
  misc_feature: MA Experiment 20001450 PARAMETER Experiment Name: At_Far-red-induction_P Parameter: Tissue Value: Whole Plant
  misc_feature: MA Experiment ID: 20001451 Result: Down-regulated in Transcription
  misc_feature: MA Experiment 20001451 PARAMETER Experiment Name: At_Far-red-induction_P Parameter: Age (day) Value: 7
  misc_feature: MA Experiment 20001451 PARAMETER Experiment Name: At_Far-red-induction_P Parameter: Light Value: Far-red vs. White
  misc_feature: MA Experiment 20001451 PARAMETER Experiment Name: At_Far-red-induction_P Parameter: Organism Value: A. thaliana
  misc_feature: MA Experiment 20001451 PARAMETER Experiment Name: At_Far-red-induction_P Parameter: Plant Line Value: Columbia
  misc_feature: MA Experiment 20001451 PARAMETER Experiment Name: At_Far-red-induction_P Parameter: Timepoint (hr) Value: 24
  misc_feature: MA Experiment 20001451 PARAMETER Experiment Name: At_Far-red-induction_P Parameter: Tissue Value: Whole Plant
  misc_feature: MA Experiment ID: 20001555 Result: Up-regulated in Transcription
  misc_feature: MA Experiment 20001555 PARAMETER Experiment Name: At_Drought_Soil_Dry_P Parameter: Age (day) Value: 24
  misc_feature: MA Experiment 20001555 PARAMETER Experiment Name: At_Drought_Soil_Dry_P Parameter: Organism Value: A. thaliana
  misc_feature: MA Experiment 20001555 PARAMETER Experiment Name: At_Drought_Soil_Dry_P Parameter: Plant Line Value: WS
  misc_feature: MA Experiment 20001555 PARAMETER Experiment Name: At_Drought_Soil_Dry_P Parameter: Post Timepoint (hr) Value: None
  misc_feature: MA Experiment 20001555 PARAMETER Experiment Name: At_Drought_Soil_Dry_P Parameter: Post-Treatment Value: None
  misc_feature: MA Experiment 20001555 PARAMETER Experiment Name: At_Drought_Soil_Dry_P Parameter: Timepoint (day) Value: 10
  misc_feature: MA Experiment 20001555 PARAMETER Experiment Name: At_Drought_Soil_Dry_P Parameter: Treatment Value: Drought vs. No Drought
  misc_feature: MA Experiment ID: 20001556 Result: Up-regulated in Transcription
  misc_feature: MA Experiment 20001556 PARAMETER Experiment Name: At_Drought_Soil_Dry_P Parameter: Age (day) Value: 26
  misc_feature: MA Experiment 20001556 PARAMETER Experiment Name: At_Drought_Soil_Dry_P Parameter: Organism Value: A. thaliana
  misc_feature: MA Experiment 20001556 PARAMETER Experiment Name: At_Drought_Soil_Dry_P Parameter: Plant Line Value: WS
  misc_feature: MA Experiment 20001556 PARAMETER Experiment Name: At_Drought_Soil_Dry_P Parameter: Post Timepoint (hr) Value: None
  misc_feature: MA Experiment 20001556 PARAMETER Experiment Name: At_Drought_Soil_Dry_P Parameter: Post-Treatment Value: None
  misc_feature: MA Experiment 20001556 PARAMETER Experiment Name: At_Drought_Soil_Dry_P Parameter: Timepoint (day) Value: 12
  misc_feature: MA Experiment 20001556 PARAMETER Experiment Name: At_Drought_Soil_Dry_P Parameter: Treatment Value: Drought vs. No Drought
  misc_feature: MA Experiment ID: 20001557 Result: Up-regulated in Transcription
  misc_feature: MA Experiment 20001557 PARAMETER Experiment Name: At_Drought_Soil_Dry_P Parameter: Age (day) Value: 27
  misc_feature: MA Experiment 20001557 PARAMETER Experiment Name: At_Drought_Soil_Dry_P Parameter: Organism Value: A. thaliana
  misc_feature: MA Experiment 20001557 PARAMETER Experiment Name: At_Drought_Soil_Dry_P Parameter: Plant Line Value: WS
  misc_feature: MA Experiment 20001557 PARAMETER Experiment Name: At_Drought_Soil_Dry_P Parameter: Post Timepoint (hr) Value: 3
  misc_feature: MA Experiment 20001557 PARAMETER Experiment Name: At_Drought_Soil_Dry_P Parameter: Post-Treatment Value: Re-Water vs. No Drought
  misc_feature: MA Experiment 20001557 PARAMETER Experiment Name: At_Drought_Soil_Dry_P Parameter: Timepoint (day) Value: 13
  misc_feature: MA Experiment 20001557 PARAMETER Experiment Name: At_Drought_Soil_Dry_P Parameter: Treatment Value: Drought vs. No Drought
  misc_feature: MA Experiment ID: 20001558 Result: Up-regulated in Transcription
  misc_feature: MA Experiment 20001558 PARAMETER Experiment Name: At_Drought_Soil_Dry_P Parameter: Age (day) Value: 27
  misc_feature: MA Experiment 20001558 PARAMETER Experiment Name: At_Drought_Soil_Dry_P Parameter: Organism Value: A. thaliana
  misc_feature: MA Experiment 20001558 PARAMETER Experiment Name: At_Drought_Soil_Dry_P Parameter: Plant Line Value: WS
  misc_feature: MA Experiment 20001558 PARAMETER Experiment Name: At_Drought_Soil_Dry_P Parameter: Post Timepoint (hr) Value: 6
  misc_feature: MA Experiment 20001558 PARAMETER Experiment Name: At_Drought_Soil_Dry_P Parameter: Post-Treatment Value: Re-Water vs. No Drought
  misc_feature: MA Experiment 20001558 PARAMETER Experiment Name: At_Drought_Soil_Dry_P Parameter: Timepoint (day) Value: 13
  misc_feature: MA Experiment 20001558 PARAMETER Experiment Name: At_Drought_Soil_Dry_P Parameter: Treatment Value: Drought vs. No Drought
  misc_feature: MA Experiment ID: 20001560 Result: Up-regulated in Transcription
  misc_feature: MA Experiment 20001560 PARAMETER Experiment Name: At_Drought_Soil_Dry_P Parameter: Age (day) Value: 28
  misc_feature: MA Experiment 20001560 PARAMETER Experiment Name: At_Drought_Soil_Dry_P Parameter: Organism Value: A. thaliana
  misc_feature: MA Experiment 20001560 PARAMETER Experiment Name: At_Drought_Soil_Dry_P Parameter: Plant Line Value: WS
  misc_feature: MA Experiment 20001560 PARAMETER Experiment Name: At_Drought_Soil_Dry_P Parameter: Post Timepoint (hr) Value: None
  misc_feature: MA Experiment 20001560 PARAMETER Experiment Name: At_Drought_Soil_Dry_P Parameter: Post-Treatment Value: None
  misc_feature: MA Experiment 20001560 PARAMETER Experiment Name: At_Drought_Soil_Dry_P Parameter: Timepoint (day) Value: 14
  misc_feature: MA Experiment 20001560 PARAMETER Experiment Name: At_Drought_Soil_Dry_P Parameter: Treatment Value: Drought vs. No Drought
  misc_feature: MA Experiment ID: 20001757 Result: Down-regulated in Transcription
  misc_feature: MA Experiment 20001757 PARAMETER Experiment Name: At_50mM_NH4NO3_L-to-H_P Parameter: Timepoint (hr) Value: 6
  misc_feature: MA Experiment 20001757 PARAMETER Experiment Name: At_50mM_NH4NO3_L-to-H_P Parameter: Tissue Value: Leaf
  misc_feature: MA Experiment 20001757 PARAMETER Experiment Name: At_50mM_NH4NO3_L-to-H_P Parameter: Treatment Value: 50mM NH4NO3 vs 100mM Mannitol
  misc_feature: MA Experiment ID: 20001904 Result: Up-regulated in Transcription
  misc_feature: MA Experiment 20001904 PARAMETER Experiment Name: At_Drought_Reproduction_P Parameter: Age (day) Value: 37
  misc_feature: MA Experiment 20001904 PARAMETER Experiment Name: At_Drought_Reproduction_P Parameter: Organism Value: A. thaliana
  misc_feature: MA Experiment 20001904 PARAMETER Experiment Name: At_Drought_Reproduction_P Parameter: Plant Line Value: WS
  misc_feature: MA Experiment 20001904 PARAMETER Experiment Name: At_Drought_Reproduction_P Parameter: Timepoint (day) Value: 7
  misc_feature: MA Experiment 20001904 PARAMETER Experiment Name: At_Drought_Reproduction_P Parameter: Tissue Value: Rosettes
  misc_feature: MA Experiment 20001904 PARAMETER Experiment Name: At_Drought_Reproduction_P Parameter: Treatment Value: Drought vs. No Drought
  misc_feature: MA Experiment ID: 20001905 Result: Up-regulated in Transcription
  misc_feature: MA Experiment 20001905 PARAMETER Experiment Name: At_Drought_Reproduction_P Parameter: Age (day) Value: 40
  misc_feature: MA Experiment 20001905 PARAMETER Experiment Name: At_Drought_Reproduction_P Parameter: Organism Value: A. thaliana
  misc_feature: MA Experiment 20001905 PARAMETER Experiment Name: At_Drought_Reproduction_P Parameter: Plant Line Value: WS
  misc_feature: MA Experiment 20001905 PARAMETER Experiment Name: At_Drought_Reproduction_P Parameter: Timepoint (day) Value: 10
  misc_feature: MA Experiment 20001905 PARAMETER Experiment Name: At_Drought_Reproduction_P Parameter: Tissue Value: Rosettes
  misc_feature: MA Experiment 20001905 PARAMETER Experiment Name: At_Drought_Reproduction_P Parameter: Treatment Value: Drought vs. No Drought
aaagacccaactaaatatcttcttttctctccatacactttttccagatatttctaatcaacaaaactgatgaatcaagaaaagaccatttcttgttgttgtgttcttgatgcttccacttatgttggtttctggattctcaagagattgctcactagaggttactctgttcacgcagctatccgtaaaaacggggagagtgtgcttgaagagaaaatcagagacatggaagctaacgaagagagattagaggtttatgatgtggatgtgttagattaccaaagtatcctcatttctctcaacaattgtaatgctgtcttctgttgtttggataatcctgaagggtacgatgaggagaaggaagtggatttggaggtgagaggagctattaatgtggtggaagcatgtgcaagaacagagagtatagagaagattgtgttctcatcttcgttaactgctgcaatttggagagataacattggaactcagaaagatgttgatgagaagtgttggagtgatcttgacttctgtctcaaaaaaaagttgtggcatgctcttgcgaagacacagtccgagaaggcagcttgggcattagccatggatcgtatggtcaacatggtttcggttaacccgggcctcatcgttggaccatcagtggctcaacacaacccaagaccgaccatgtcttacctcaaaggagctgcacaaatgtatgagaacggtgtgttagcgtacgtagatgttgaatttgtagcggatgttcacattcgagcattcgaggatacttcggcttgtggtagatacttttgcttcaaccaaattgtgaatacggaagaagaagctctcaagcttgtacaaactctatctcctttaatacatatgccaccaaggcatgagaaagagatgcaaggaagtgaagtttatggagagagattgagaaacaagaaactaaacaagttggtggaagctggatttgcttgttaattacatgaagagagatgttataaattaaagggcaagaaaataacaaagaaattttatagtaagagttgtttgtttacttatttttttaattattgtactctcaattcagtattttatatatctatattttattttattttgaaatgaaaggaaaatatgtgttactc

SEQ ID NO: 29460 - protein, 304 aa, Arabidopsis thaliana
  peptide (1)..(304): Ceres Seq. ID no. 12327383
  misc_feature (11)..(297): Homolog of NCBI NO: 17978649 NR Description: cinnamoyl-CoA reductase [Pinus taeda]
  misc_feature (11)..(297): Homolog of NCBI NO: 3341511 NR Description: cinnamoyl-CoA reductase [Saccharum officinarum]
  misc_feature (11)..(297): Homolog of NCBI NO: 25140432 NR Description: cinnamoyl CoA reductase [Hordeum vulgare]
  misc_feature (11)..(297): Homolog of NCBI NO: 9964087 NR Description: cinnamoyl CoA reductase [Lolium perenne]
  misc_feature (2)..(298): Homolog of NCBI NO: 37537132 NR Description: putative cinnamoyl-CoA reductase
  misc_feature (1)..(304): Homolog of NCBI NO: 21553548 NR Description: cinnamoyl-CoA reductase-like protein [Arabidopsis
  misc_feature (1)..(304): Homolog of NCBI NO: 15234751 NR Description: cinnamoyl-CoA reductase - like protein
  misc_feature (1)..(304): Homolog of NCBI NO: 25412171 NR Description: probable cinnamoyl CoA reductase [imported] -
  misc_feature (1)..(304): Homolog of NCBI NO: 18400407 NR Description: putative cinnamoyl CoA reductase
  misc_feature (1)..(304): Homolog of NCBI NO: 21553382 NR Description: putative cinnamoyl CoA reductase [Arabidopsis
MNQEKTISCCCVLDASTYVGFWILKRLLTRGYSVHAAIRKNGESVLEEKIRDMEANEERLEVYDVDVLDYQSILISLNNCNAVFCCLDNPEGYDEEKEVDLEVRGAINVVEACARTESIEKIVFSSSLTAAIWRDNIGTQKDVDEKCWSDLDFCLKKKLWHALAKTQSEKAAWALAMDRMVNMVSVNPGLIVGPSVAQHNPRPTMSYLKGAAQMYENGVLAYVDVEFVADVHIRAFEDTSACGRYFCFNQIVNTEEEALKLVQTLSPLIHMPPRHEKEMQGSEVYGERLRNKKLNKLVEAGFAC

SEQ ID NO: 29461 - protein, 252 aa, Arabidopsis thaliana
  peptide (1)..(252): Ceres Seq. ID no. 12327384
  misc_feature (1)..(245): Homolog of NCBI NO: 17978649 NR Description: cinnamoyl-CoA reductase [Pinus taeda]
  misc_feature (1)..(245): Homolog of NCBI NO: 3341511 NR Description: cinnamoyl-CoA reductase [Saccharum officinarum]
  misc_feature (1)..(245): Homolog of NCBI NO: 25140432 NR Description: cinnamoyl CoA reductase [Hordeum vulgare]
  misc_feature (1)..(245): Homolog of NCBI NO: 9964087 NR Description: cinnamoyl CoA reductase [Lolium perenne]
  misc_feature (1)..(246): Homolog of NCBI NO: 37537132 NR Description: putative cinnamoyl-CoA reductase
  misc_feature (1)..(252): Homolog of NCBI NO: 21553548 NR Description: cinnamoyl-CoA reductase-like protein [Arabidopsis
  misc_feature (1)..(252): Homolog of NCBI NO: 15234751 NR Description: cinnamoyl-CoA reductase - like protein
  misc_feature (1)..(252): Homolog of NCBI NO: 25412171 NR Description: probable cinnamoyl CoA reductase [imported] -
  misc_feature (1)..(252): Homolog of NCBI NO: 18400407 NR Description: putative cinnamoyl CoA reductase
  misc_feature (1)..(252): Homolog of NCBI NO: 21553382 NR Description: putative cinnamoyl CoA reductase [Arabidopsis
MEANEERLEVYDVDVLDYQSILISLNNCNAVFCCLDNPEGYDEEKEVDLEVRGAINVVEACARTESIEKIVFSSSLTAAIWRDNIGTQKDVDEKCWSDLDFCLKKKLWHALAKTQSEKAAWALAMDRMVNMVSVNPGLIVGPSVAQHNPRPTMSYLKGAAQMYENGVLAYVDVEFVADVHIRAFEDTSACGRYFCFNQIVNTEEEALKLVQTLSPLIHMPPRHEKEMQGSEVYGERLRNKKLNKLVEAGFAC

SEQ ID NO: 29462 - DNA, 1062 bp, Arabidopsis thaliana
  misc_feature (1)..(1062): Ceres Seq. ID no. 12421958
  misc_feature: MA Experiment ID: 108434 Result: Down-regulated in Transcription
  misc_feature: MA Experiment 108434 PARAMETER Experiment Name: At_Root_Tips_cDNA_P Parameter: Tissue Value: Root Tips
  misc_feature: MA Experiment ID: 108462 Result: Up-regulated in Transcription
  misc_feature: MA Experiment 108462 PARAMETER Experiment Name: At_Germinating_Seeds_cDNA_P Parameter: Age (day) Value: 2 vs. 0
  misc_feature: MA Experiment 108462 PARAMETER Experiment Name: At_Germinating_Seeds_cDNA_P Parameter: Tissue Value: Germinating Seeds
  misc_feature: MA Experiment ID: 108561 Result: Up-regulated in Transcription
  misc_feature: MA Experiment 108561 PARAMETER Experiment Name: At_100uM_ABA_cDNA_P Parameter: Timepoint (hr) Value: 6
  misc_feature: MA Experiment 108561 PARAMETER Experiment Name: At_100uM_ABA_cDNA_P Parameter: Tissue Value: Aerial
  misc_feature: MA Experiment 108561 PARAMETER Experiment Name: At_100uM_ABA_cDNA_P Parameter: Treatment Value: 100uM ABA vs. No Treatment
  misc_feature: MA Experiment ID: 108576 Result: Down-regulated in Transcription
  misc_feature: MA Experiment 108576 PARAMETER Experiment Name: At_42deg_Heat_cDNA_P Parameter: Temperature (deg C) Value: 42 vs. 22
  misc_feature: MA Experiment 108576 PARAMETER Experiment Name: At_42deg_Heat_cDNA_P Parameter: Timepoint (hr) Value: 1
  misc_feature: MA Experiment 108576 PARAMETER Experiment Name: At_42deg_Heat_cDNA_P Parameter: Tissue Value: Aerial
  misc_feature: MA Experiment ID: 108577 Result: Down-regulated in Transcription
  misc_feature: MA Experiment 108577 PARAMETER Experiment Name: At_42deg_Heat_cDNA_P Parameter: Temperature (deg C) Value: 42 vs. 22
  misc_feature: MA Experiment 108577 PARAMETER Experiment Name: At_42deg_Heat_cDNA_P Parameter: Timepoint (hr) Value: 6
  misc_feature: MA Experiment 108577 PARAMETER Experiment Name: At_42deg_Heat_cDNA_P Parameter: Tissue Value: Aerial
  misc_feature: MA Experiment ID: 108579 Result: Up-regulated in Transcription
  misc_feature: MA Experiment 108579 PARAMETER Experiment Name: At_4deg_Cold_cDNA_P Parameter: Temperature (deg C) Value: 4 vs. 22
  misc_feature: MA Experiment 108579 PARAMETER Experiment Name: At_4deg_Cold_cDNA_P Parameter: Timepoint (hr) Value: 6
  misc_feature: MA Experiment 108579 PARAMETER Experiment Name: At_4deg_Cold_cDNA_P Parameter: Tissue Value: Aerial
  misc_feature: MA Experiment ID: 108594 Result: Up-regulated in Transcription
  misc_feature: MA Experiment 108594 PARAMETER Experiment Name: At_Ler-rhl_Root_cDNA_P Parameter: Plant Line Value: null
  misc_feature: MA Experiment ID: 108595 Result: Up-regulated in Transcription
  misc_feature: MA Experiment 108595 PARAMETER Experiment Name: At_Ler-pi_Ovule_cDNA_P Parameter: Plant Line Value: null
  misc_feature: MA Experiment ID: 108607 Result: Up-regulated in Transcription
  misc_feature: MA Experiment 108607 PARAMETER Experiment Name: At_100uM_ABA_cDNA_P Parameter: Timepoint (hr) Value: 4
  misc_feature: MA Experiment 108607 PARAMETER Experiment Name: At_100uM_ABA_cDNA_P Parameter: Tissue Value: Aerial
  misc_feature: MA Experiment 108607 PARAMETER Experiment Name: At_100uM_ABA_cDNA_P Parameter: Treatment Value: 100uM ABA vs. No Treatment
  misc_feature: MA Experiment ID: 108668 Result: Down-regulated in Transcription
  misc_feature: MA Experiment 108668 PARAMETER Experiment Name: At_2mM_SA_cDNA_P Parameter: Plant Line Value: WS
  misc_feature: MA Experiment 108668 PARAMETER Experiment Name: At_2mM_SA_cDNA_P Parameter: Timepoint (hr) Value: 6
  misc_feature: MA Experiment 108668 PARAMETER Experiment Name: At_2mM_SA_cDNA_P Parameter: Treatment Value: 2mM SA vs. No Treatment
  misc_feature: MA Experiment ID: 20000089 Result: Down-regulated in Transcription
  misc_feature: MA Experiment ID: 20000090 Result: Down-regulated in Transcription
  misc_feature: MA Experiment ID: 20000166 Result: Up-regulated in Transcription
  misc_feature: MA Experiment 20000166 PARAMETER Experiment Name: At_100uM_ABA_P Parameter: Age (day) Value: 14
  misc_feature: MA Experiment 20000166 PARAMETER Experiment Name: At_100uM_ABA_P Parameter: Organism Value: A. thaliana
  misc_feature: MA Experiment 20000166 PARAMETER Experiment Name: At_100uM_ABA_P Parameter: Plant Line Value: WS
  misc_feature: MA Experiment 20000166 PARAMETER Experiment Name: At_100uM_ABA_P Parameter: Timepoint (hr) Value: 1
  misc_feature: MA Experiment 20000166 PARAMETER Experiment Name: At_100uM_ABA_P Parameter: Tissue Value: Aerial
  misc_feature: MA Experiment 20000166 PARAMETER Experiment Name: At_100uM_ABA_P Parameter: Treatment Value: 100uM ABA vs. No Treatment
  misc_feature: MA Experiment ID: 20000169 Result: Up-regulated in Transcription
  misc_feature: MA Experiment 20000169 PARAMETER Experiment Name: At_100uM_ABA_P Parameter: Age (day) Value: 14
  misc_feature: MA Experiment 20000169 PARAMETER Experiment Name: At_100uM_ABA_P Parameter: Organism Value: A. thaliana
  misc_feature: MA Experiment 20000169 PARAMETER Experiment Name: At_100uM_ABA_P Parameter: Plant Line Value: WS
  misc_feature: MA Experiment 20000169 PARAMETER Experiment Name: At_100uM_ABA_P Parameter: Timepoint (hr) Value: 6
  misc_feature: MA Experiment 20000169 PARAMETER Experiment Name: At_100uM_ABA_P Parameter: Tissue Value: Aerial
  misc_feature: MA Experiment 20000169 PARAMETER Experiment Name: At_100uM_ABA_P Parameter: Treatment Value: 100uM ABA vs. No Treatment
  misc_feature: MA Experiment ID: 20000180 Result: Up-regulated in Transcription
  misc_feature: MA Experiment 20000180 PARAMETER Experiment Name: At_Germinating_Seeds_P Parameter: Age (hr) Value: 24 vs. 0
  misc_feature: MA Experiment 20000180 PARAMETER Experiment Name: At_Germinating_Seeds_P Parameter: Tissue Value: Germinating Seeds
  misc_feature: MA Experiment ID: 20000182 Result: Down-regulated in Transcription
  misc_feature: MA Experiment 20000182 PARAMETER Experiment Name: At_2mM_SA_P Parameter: Age (day) Value: 14
  misc_feature: MA Experiment 20000182 PARAMETER Experiment Name: At_2mM_SA_P Parameter: Organism Value: A. thaliana
  misc_feature: MA Experiment 20000182 PARAMETER Experiment Name: At_2mM_SA_P Parameter: Plant Line Value: WS
  misc_feature: MA Experiment 20000182 PARAMETER Experiment Name: At_2mM_SA_P Parameter: Timepoint (hr) Value: 6
  misc_feature: MA Experiment 20000182 PARAMETER Experiment Name: At_2mM_SA_P Parameter: Tissue Value: Aerial
  misc_feature: MA Experiment 20000182 PARAMETER Experiment Name: At_2mM_SA_P Parameter: Treatment Value: 2mM SA vs. No Treatment
  misc_feature: MA Experiment ID: 20000213 Result: Up-regulated in Transcription
  misc_feature: MA Experiment 20000213 PARAMETER Experiment Name: At_4deg_Cold_P Parameter: Timepoint (hr) Value: 2
  misc_feature: MA Experiment ID: 20000224 Result: Up-regulated in Transcription
  misc_feature: MA Experiment ID: 20000227 Result: Down-regulated in Transcription
  misc_feature: MA Experiment 20000227 PARAMETER Experiment Name: At_Root-Tips-vs-Tops_P Parameter: Tissue Value: Root Tips vs. Root Tops
  misc_feature: MA Experiment ID: 20000573 Result: Down-regulated in Transcription
  misc_feature: MA Experiment 20000573 PARAMETER Experiment Name: At_100uM_ABA_Mutants__P Parameter: Organism Value: A. thaliana
  misc_feature: MA Experiment 20000573 PARAMETER Experiment Name: At_100uM_ABA_Mutants__P Parameter: Plant Line Value: CS22 vs. Ler wt
  misc_feature: MA Experiment 20000573 PARAMETER Experiment Name: At_100uM_ABA_Mutants__P Parameter: Timepoint (hr) Value: N/A
  misc_feature: MA Experiment 20000573 PARAMETER Experiment Name: At_100uM_ABA_Mutants__P Parameter: Tissue Value: Whole Plant
  misc_feature: MA Experiment 20000573 PARAMETER Experiment Name: At_100uM_ABA_Mutants__P Parameter: Treatment Value: None
  misc_feature: MA Experiment ID: 20000794 Result: Up-regulated in Transcription
  misc_feature: MA Experiment 20000794 PARAMETER Experiment Name: At_Petals_P Parameter: Age (day) Value: 23-25 days
  misc_feature: MA Experiment 20000794 PARAMETER Experiment Name: At_Petals_P Parameter: Plant Line Value: WS
  misc_feature: MA Experiment 20000794 PARAMETER Experiment Name: At_Petals_P Parameter: Tissue Value: Petals vs. Whole plant
  misc_feature: MA Experiment ID: 20001248 Result: Down-regulated in Transcription
  misc_feature: MA Experiment 20001248 PARAMETER Experiment Name: At_Far-red-induction_P Parameter: Age (day) Value: 7
  misc_feature: MA Experiment 20001248 PARAMETER Experiment Name: At_Far-red-induction_P Parameter: Light Value: Far-red vs. White
  misc_feature: MA Experiment 20001248 PARAMETER Experiment Name: At_Far-red-induction_P Parameter: Organism Value: A. thaliana
  misc_feature: MA Experiment 20001248 PARAMETER Experiment Name: At_Far-red-induction_P Parameter: Plant Line Value: Columbia
  misc_feature: MA Experiment 20001248 PARAMETER Experiment Name: At_Far-red-induction_P Parameter: Timepoint (hr) Value: 4
  misc_feature: MA Experiment 20001248 PARAMETER Experiment Name: At_Far-red-induction_P Parameter: Tissue Value: Whole Plant
  misc_feature: MA Experiment ID: 20001450 Result: Down-regulated in Transcription
  misc_feature: MA Experiment 20001450 PARAMETER Experiment Name: At_Far-red-induction_P Parameter: Age (day) Value: 7
  misc_feature: MA Experiment 20001450 PARAMETER Experiment Name: At_Far-red-induction_P Parameter: Light Value: Far-red vs. White
  misc_feature: MA Experiment 20001450 PARAMETER Experiment Name: At_Far-red-induction_P Parameter: Organism Value: A. thaliana
  misc_feature: MA Experiment 20001450 PARAMETER Experiment Name: At_Far-red-induction_P Parameter: Plant Line Value: Columbia
  misc_feature: MA Experiment 20001450 PARAMETER Experiment Name: At_Far-red-induction_P Parameter: Timepoint (hr) Value: 8
  misc_feature: MA Experiment 20001450 PARAMETER Experiment Name: At_Far-red-induction_P Parameter: Tissue Value: Whole Plant
  misc_feature: MA Experiment ID: 20001451 Result: Up-regulated in Transcription
  misc_feature: MA Experiment 20001451 PARAMETER Experiment Name: At_Far-red-induction_P Parameter: Age (day) Value: 7
  misc_feature: MA Experiment 20001451 PARAMETER Experiment Name: At_Far-red-induction_P Parameter: Light Value: Far-red vs. White
  misc_feature: MA Experiment 20001451 PARAMETER Experiment Name: At_Far-red-induction_P Parameter: Organism Value: A. thaliana
  misc_feature: MA Experiment 20001451 PARAMETER Experiment Name: At_Far-red-induction_P Parameter: Plant Line Value: Columbia
  misc_feature: MA Experiment 20001451 PARAMETER Experiment Name: At_Far-red-induction_P Parameter: Timepoint (hr) Value: 24
  misc_feature: MA Experiment 20001451 PARAMETER Experiment Name: At_Far-red-induction_P Parameter: Tissue Value: Whole Plant
  misc_feature: MA Experiment ID: 20001554 Result: Up-regulated in Transcription
  misc_feature: MA Experiment 20001554 PARAMETER Experiment Name: At_Drought_Soil_Dry_P Parameter: Age (day) Value: 21
  misc_feature: MA Experiment 20001554 PARAMETER Experiment Name: At_Drought_Soil_Dry_P Parameter: Organism Value: A. thaliana
  misc_feature: MA Experiment 20001554 PARAMETER Experiment Name: At_Drought_Soil_Dry_P Parameter: Plant Line Value: WS
  misc_feature: MA Experiment 20001554 PARAMETER Experiment Name: At_Drought_Soil_Dry_P Parameter: Post Timepoint (hr) Value: None
  misc_feature: MA Experiment 20001554 PARAMETER Experiment Name: At_Drought_Soil_Dry_P Parameter: Post-Treatment Value: None
  misc_feature: MA Experiment 20001554 PARAMETER Experiment Name: At_Drought_Soil_Dry_P Parameter: Timepoint (day) Value: 7
  misc_feature: MA Experiment 20001554 PARAMETER Experiment Name: At_Drought_Soil_Dry_P Parameter: Treatment Value: Drought vs. No Drought
  misc_feature: MA Experiment ID: 20001557 Result: Down-regulated in Transcription
  misc_feature: MA Experiment 20001557 PARAMETER Experiment Name: At_Drought_Soil_Dry_P Parameter: Age (day) Value: 27
  misc_feature: MA Experiment 20001557 PARAMETER Experiment Name: At_Drought_Soil_Dry_P Parameter: Organism Value: A. thaliana
  misc_feature: MA Experiment 20001557 PARAMETER Experiment Name: At_Drought_Soil_Dry_P Parameter: Plant Line Value: WS
  misc_feature: MA Experiment 20001557 PARAMETER Experiment Name: At_Drought_Soil_Dry_P Parameter: Post Timepoint (hr) Value: 3
  misc_feature: MA Experiment 20001557 PARAMETER Experiment Name: At_Drought_Soil_Dry_P Parameter: Post-Treatment Value: Re-Water vs. No Drought
  misc_feature: MA Experiment 20001557 PARAMETER Experiment Name: At_Drought_Soil_Dry_P Parameter: Timepoint (day) Value: 13
  misc_feature: MA Experiment 20001557 PARAMETER Experiment Name: At_Drought_Soil_Dry_P Parameter: Treatment Value: Drought vs. No Drought
  misc_feature: MA Experiment ID: 20001560 Result: Down-regulated in Transcription
  misc_feature: MA Experiment 20001560 PARAMETER Experiment Name: At_Drought_Soil_Dry_P Parameter: Age (day) Value: 28
  misc_feature: MA Experiment 20001560 PARAMETER Experiment Name: At_Drought_Soil_Dry_P Parameter: Organism Value: A. thaliana
  misc_feature: MA Experiment 20001560 PARAMETER Experiment Name: At_Drought_Soil_Dry_P Parameter: Plant Line Value: WS
  misc_feature: MA Experiment 20001560 PARAMETER Experiment Name: At_Drought_Soil_Dry_P Parameter: Post Timepoint (hr) Value: None
  misc_feature: MA Experiment 20001560 PARAMETER Experiment Name: At_Drought_Soil_Dry_P Parameter: Post-Treatment Value: None
  misc_feature: MA Experiment 20001560 PARAMETER Experiment Name: At_Drought_Soil_Dry_P Parameter: Timepoint (day) Value: 14
  misc_feature: MA Experiment 20001560 PARAMETER Experiment Name: At_Drought_Soil_Dry_P Parameter: Treatment Value: Drought vs. No Drought
  misc_feature: MA Experiment ID: 20001911 Result: Up-regulated in Transcription
  misc_feature: MA Experiment 20001911 PARAMETER Experiment Name: At_Drought_Reproduction_P Parameter: Age (day) Value: 40
  misc_feature: MA Experiment 20001911 PARAMETER Experiment Name: At_Drought_Reproduction_P Parameter: Organism Value: A. thaliana
  misc_feature: MA Experiment 20001911 PARAMETER Experiment Name: At_Drought_Reproduction_P Parameter: Plant Line Value: WS
  misc_feature: MA Experiment 20001911 PARAMETER Experiment Name: At_Drought_Reproduction_P Parameter: Timepoint (day) Value: 10
  misc_feature: MA Experiment 20001911 PARAMETER Experiment Name: At_Drought_Reproduction_P Parameter: Tissue Value: Flowers
  misc_feature: MA Experiment 20001911 PARAMETER Experiment Name: At_Drought_Reproduction_P Parameter: Treatment Value: Drought vs. No Drought
agaattaaaaccctaaaaaagaaacacaaatatttaagattttcttccctgatcaaatcaattgtttcagaaaaaatggagttcgagaaccggtacggacttgcaacgtcgcagaagtacgactgtctcttgttcgatttggacgatactctttatcctcttagctccggaatcgcaagagaatgtgggaacaacatcaaagattacatgaccgagaaactcggtataccgaaggacaaaatcgtcgaattgtctgatcttctatacaagaactatggaacaacaatggctggtcttagggcgatcggatatgaatttgactacgatgagtaccacagcttcgtccacggtcgtttaccctatgacaacataaaacccgaccttgttcttcgcagcctcttgcttagcctccctctccgcaaagtcatctttaccaacgcggacagagttcacgcggccaaggcgttgaagaagttgggattagaggattgtttcgaaggaatcatatgtttcgaaacgctaaacctcatgcacacaaacgctgcgtctaacaattccgagatttttgatatcgttggacattttaaccggtctgaaccggtcggttcacttcccaaaacgcctgttgtgtgtaaaccatctgaatctgctatcgagaaagctcttgaaatcgccaatattgatcctaaccgaacgctgttctttgaggacagtgtccgaaacgtacaagctggaaaacgcgttggtctttacacggttctggttggtaaatcgaccaaagtcaaaggagcggattacgcgttggaaaacattcacaacatgaaagaggcgataccggagttatgggaatccgacaggaaatcgtcggatgttggatattccggcaaggtcgccgttgagacttctgttagagcttaggaggagtactgtttcgccgttgtacctaattttccaccactgtcattttcattttcttttttcaaatgacgtaatgtcatttttgtttttttttcgacttgtgtttataaaagattaataaaaaatgagaaaataatttccatc

SEQ ID NO: 29463 - protein, 305 aa, Arabidopsis thaliana
  peptide (1)..(305): Ceres Seq. ID no. 12421959
  misc_feature (40)..(258): Pfam Name: haloacid dehalogenase-like hydrolase Pfam Description: haloacid dehalogenase-like hydrolase
  misc_feature (34)..(305): Homolog of NCBI NO: 40714684 NR Description: expressed protein [Oryza sativa (japonica
  misc_feature (26)..(301): Homolog of NCBI NO: 21618155 NR Description: putative ripening-related protein-like
  misc_feature (26)..(301): Homolog of NCBI NO: 30697236 NR Description: haloacid dehalogenase-like hydrolase family
  misc_feature (26)..(301): Homolog of NCBI NO: 30697234 NR Description: haloacid dehalogenase-like hydrolase family
  misc_feature (26)..(305): Homolog of NCBI NO: 15238429 NR Description: putative ripening-related protein - like; protein
  misc_feature (22)..(305): Homolog of NCBI NO: 8885554 NR Description: ripening-related protein-like; hydrolase-like
  misc_feature (173)..(305): Homolog of NCBI NO: 7406669 NR Description: putative ripening-related protein [Vitis vinifera]
  misc_feature (26)..(187): Homolog of NCBI NO: 7406669 NR Description: putative ripening-related protein [Vitis vinifera]
  misc_feature (26)..(305): Homolog of NCBI NO: 21593165 NR Description: unknown [Arabidopsis thaliana]
  misc_feature (26)..(305): Homolog of NCBI NO: 15241720 NR Description: putative protein
RIKTLKKKHKYLRFSSLIKSIVSEKMEFENRYGLATSQKYDCLLFDLDDTLYPLSSGIARECGNNIKDYMTEKLGIPKDKIVELSDLLYKNYGTTMAGLRAIGYEFDYDEYHSFVHGRLPYDNIKPDLVLRSLLLSLPLRKVIFTNADRVHAAKALKKLGLEDCFEGIICFETLNLMHTNAASNNSEIFDIVGHFNRSEPVGSLPKTPVVCKPSESAIEKALEIANIDPNRTLFFEDSVRNVQAGKRVGLYTVLVGKSTKVKGADYALENIHNMKEAIPELWESDRKSSDVGYSGKVAVETSVRA

SEQ ID NO: 29464 - protein, 280 aa, Arabidopsis thaliana
  peptide (1)..(280): Ceres Seq. ID no. 12421960
  misc_feature (15)..(233): Pfam Name: haloacid dehalogenase-like hydrolase Pfam Description: haloacid dehalogenase-like hydrolase
  misc_feature (9)..(280): Homolog of NCBI NO: 40714684 NR Description: expressed protein [Oryza sativa (japonica
  misc_feature (1)..(276): Homolog of NCBI NO: 21618155 NR Description: putative ripening-related protein-like
  misc_feature (1)..(276): Homolog of NCBI NO: 30697236 NR Description: haloacid dehalogenase-like hydrolase family
  misc_feature (1)..(276): Homolog of NCBI NO: 30697234 NR Description: haloacid dehalogenase-like hydrolase family
  misc_feature (1)..(280): Homolog of NCBI NO: 15238429 NR Description: putative ripening-related protein - like; protein
  misc_feature (1)..(280): Homolog of NCBI NO: 8885554 NR Description: ripening-related protein-like; hydrolase-like
  misc_feature (148)..(280): Homolog of NCBI NO: 7406669 NR Description: putative ripening-related protein [Vitis vinifera]
  misc_feature (1)..(162): Homolog of NCBI NO: 7406669 NR Description: putative ripening-related protein [Vitis vinifera]
  misc_feature (1)..(280): Homolog of NCBI NO: 21593165 NR Description: unknown [Arabidopsis thaliana]
  misc_feature (1)..(280): Homolog of NCBI NO: 15241720 NR Description: putative protein
MEFENRYGLATSQKYDCLLFDLDDTLYPLSSGIARECGNNIKDYMTEKLGIPKDKIVELSDLLYKNYGTTMAGLRAIGYEFDYDEYHSFVHGRLPYDNIKPDLVLRSLLLSLPLRKVIFTNADRVHAAKALKKLGLEDCFEGIICFETLNLMHTNAASNNSEIFDIVGHFNRSEPVGSLPKTPVVCKPSESAIEKALEIANIDPNRTLFFEDSVRNVQAGKRVGLYTVLVGKSTKVKGADYALENIHNMKEAIPELWESDRKSSDVGYSGKVAVETSVRA

SEQ ID NO: 29465 - protein, 236 aa, Arabidopsis thaliana; identical to SEQ ID NO: 23607
  peptide (1)..(236): Ceres Seq. ID no. 12421961
  misc_feature (1)..(189): Pfam Name: haloacid dehalogenase-like hydrolase Pfam Description: haloacid dehalogenase-like hydrolase
  misc_feature (1)..(236): Homolog of NCBI NO: 40714684 NR Description: expressed protein [Oryza sativa (japonica
  misc_feature (1)..(232): Homolog of NCBI NO: 21618155 NR Description: putative ripening-related protein-like
  misc_feature (1)..(232): Homolog of NCBI NO: 30697236 NR Description: haloacid dehalogenase-like hydrolase family
  misc_feature (1)..(232): Homolog of NCBI NO: 30697234 NR Description: haloacid dehalogenase-like hydrolase family
  misc_feature (1)..(236): Homolog of NCBI NO: 15238429 NR Description: putative ripening-related protein - like; protein
  misc_feature (1)..(236): Homolog of NCBI NO: 8885554 NR Description: ripening-related protein-like; hydrolase-like
  misc_feature (104)..(236): Homolog of NCBI NO: 7406669 NR Description: putative ripening-related protein [Vitis vinifera]
  misc_feature (1)..(118): Homolog of NCBI NO: 7406669 NR Description: putative ripening-related protein [Vitis vinifera]
  misc_feature (1)..(236): Homolog of NCBI NO: 21593165 NR Description: unknown [Arabidopsis thaliana]
  misc_feature (1)..(236): Homolog of NCBI NO: 15241720 NR Description: putative protein

SEQ ID NO: 29466 - DNA, 1252 bp, Arabidopsis thaliana
  misc_feature (1)..(1252): Ceres Seq. ID no. 13500119
  misc_feature: MA Experiment ID: 20001756 Result: Down-regulated in Transcription
  misc_feature: MA Experiment 20001756 PARAMETER Experiment Name: At_50mM_NH4NO3_L-to-H_P Parameter: Timepoint (hr) Value: 4
  misc_feature: MA Experiment 20001756 PARAMETER Experiment Name: At_50mM_NH4NO3_L-to-H_P Parameter: Tissue Value: Leaf
  misc_feature: MA Experiment 20001756 PARAMETER Experiment Name: At_50mM_NH4NO3_L-to-H_P Parameter: Treatment Value: 50mM NH4NO3 vs 100mM Mannitol
  misc_feature: MA Experiment ID: 20001757 Result: Down-regulated in Transcription
  misc_feature: MA Experiment 20001757 PARAMETER Experiment Name: At_50mM_NH4NO3_L-to-H_P Parameter: Timepoint (hr) Value: 6
  misc_feature: MA Experiment 20001757 PARAMETER Experiment Name: At_50mM_NH4NO3_L-to-H_P Parameter: Tissue Value: Leaf
  misc_feature: MA Experiment 20001757 PARAMETER Experiment Name: At_50mM_NH4NO3_L-to-H_P Parameter: Treatment Value: 50mM NH4NO3 vs 100mM Mannitol
  misc_feature: MA Experiment ID: 20001761 Result: Down-regulated in Transcription
  misc_feature: MA Experiment 20001761 PARAMETER Experiment Name: At_50mM_NH4NO3_L-to-H_P Parameter: Timepoint (hr) Value: 4
  misc_feature: MA Experiment 20001761 PARAMETER Experiment Name: At_50mM_NH4NO3_L-to-H_P Parameter: Tissue Value: Siliques
  misc_feature: MA Experiment 20001761 PARAMETER Experiment Name: At_50mM_NH4NO3_L-to-H_P Parameter: Treatment Value: 50mM NH4NO3 vs 100mM Mannitol
  misc_feature: MA Experiment ID: 20001904 Result: Up-regulated in Transcription
  misc_feature: MA Experiment 20001904 PARAMETER Experiment Name: At_Drought_Reproduction_P Parameter: Age (day) Value: 37
  misc_feature: MA Experiment 20001904 PARAMETER Experiment Name: At_Drought_Reproduction_P Parameter: Organism Value: A. thaliana
  misc_feature: MA Experiment 20001904 PARAMETER Experiment Name: At_Drought_Reproduction_P Parameter: Plant Line Value: WS
  misc_feature: MA Experiment 20001904 PARAMETER Experiment Name: At_Drought_Reproduction_P Parameter: Timepoint (day) Value: 7
  misc_feature: MA Experiment 20001904 PARAMETER Experiment Name: At_Drought_Reproduction_P Parameter: Tissue Value: Rosettes
  misc_feature: MA Experiment 20001904 PARAMETER Experiment Name: At_Drought_Reproduction_P Parameter: Treatment Value: Drought vs. No Drought
  misc_feature: MA Experiment ID: 20001905 Result: Up-regulated in Transcription
  misc_feature: MA Experiment 20001905 PARAMETER Experiment Name: At_Drought_Reproduction_P Parameter: Age (day) Value: 40
  misc_feature: MA Experiment 20001905 PARAMETER Experiment Name: At_Drought_Reproduction_P Parameter: Organism Value: A. thaliana
  misc_feature: MA Experiment 20001905 PARAMETER Experiment Name: At_Drought_Reproduction_P Parameter: Plant Line Value: WS
  misc_feature: MA Experiment 20001905 PARAMETER Experiment Name: At_Drought_Reproduction_P Parameter: Timepoint (day) Value: 10
  misc_feature: MA Experiment 20001905 PARAMETER Experiment Name: At_Drought_Reproduction_P Parameter: Tissue Value: Rosettes
  misc_feature: MA Experiment 20001905 PARAMETER Experiment Name: At_Drought_Reproduction_P Parameter: Treatment Value: Drought vs. No Drought
  misc_feature: MA Experiment ID: 20001906 Result: Up-regulated in Transcription
  misc_feature: MA Experiment 20001906 PARAMETER Experiment Name: At_Drought_Reproduction_P Parameter: Age (day) Value: 35
  misc_feature: MA Experiment 20001906 PARAMETER Experiment Name: At_Drought_Reproduction_P Parameter: Organism Value: A. thaliana
  misc_feature: MA Experiment 20001906 PARAMETER Experiment Name: At_Drought_Reproduction_P Parameter: Plant Line Value: WS
  misc_feature: MA Experiment 20001906 PARAMETER Experiment Name: At_Drought_Reproduction_P Parameter: Timepoint (day) Value: 5
  misc_feature: MA Experiment 20001906 PARAMETER Experiment Name: At_Drought_Reproduction_P Parameter: Tissue Value: Siliques
  misc_feature: MA Experiment 20001906 PARAMETER Experiment Name: At_Drought_Reproduction_P Parameter: Treatment Value: Drought vs. No Drought
  misc_feature: MA Experiment ID: 20001908 Result: Up-regulated in Transcription
  misc_feature: MA Experiment 20001908 PARAMETER Experiment Name: At_Drought_Reproduction_P Parameter: Age (day) Value: 40
  misc_feature: MA Experiment 20001908 PARAMETER Experiment Name: At_Drought_Reproduction_P Parameter: Organism Value: A. thaliana
  misc_feature: MA Experiment 20001908 PARAMETER Experiment Name: At_Drought_Reproduction_P Parameter: Plant Line Value: WS
  misc_feature: MA Experiment 20001908 PARAMETER Experiment Name: At_Drought_Reproduction_P Parameter: Timepoint (day) Value: 10
  misc_feature: MA Experiment 20001908 PARAMETER Experiment Name: At_Drought_Reproduction_P Parameter: Tissue Value: Siliques
  misc_feature: MA Experiment 20001908 PARAMETER Experiment Name: At_Drought_Reproduction_P Parameter: Treatment Value: Drought vs. No Drought
  misc_feature: MA Experiment ID: 20001911 Result: Down-regulated in Transcription
  misc_feature: MA Experiment 20001911 PARAMETER Experiment Name: At_Drought_Reproduction_P Parameter: Age (day) Value: 40
  misc_feature: MA Experiment 20001911 PARAMETER Experiment Name: At_Drought_Reproduction_P Parameter: Organism Value: A. thaliana
  misc_feature: MA Experiment 20001911 PARAMETER Experiment Name: At_Drought_Reproduction_P Parameter: Plant Line Value: WS
  misc_feature: MA Experiment 20001911 PARAMETER Experiment Name: At_Drought_Reproduction_P Parameter: Timepoint (day) Value: 10
  misc_feature: MA Experiment 20001911 PARAMETER Experiment Name: At_Drought_Reproduction_P Parameter: Tissue Value: Flowers
  misc_feature: MA Experiment 20001911 PARAMETER Experiment Name: At_Drought_Reproduction_P Parameter: Treatment Value: Drought vs. No Drought
cacgcaggcaaatgtctcgtaatttaatctatagaagaaacagagctctctgttttgttttaatcttgttctgcttcccttaccggtttggcgctagaatcacgccggaggcggaacaatccacagcaaaagcaactcaaataatacacgtcagcaattccacgtggcatgatttctctcgtcttgtagatgtccaaataggtagccacgtcagcggcgtatcagagctcaaaagatacctccaccgattcggttacgtcaatgatggctccgaaatattttccgacgtgttcgatggtcctctggaatcggcaatctctctgtatcaagaaaatctcggtttaccaataaccggaagactcgacacgagtacagttactctcatgtcgttaccgcgatgtggcgttagcgatacgcacatgaccatcaacaacgatttcctccacacaacggcgcattatacgtatttcaacggtaaaccgaaatggaaccgtgatacgctaacctacgctatctccaaaactcacaaactcgattacttgacgtcagaagacgtcaaaaccgttttccggcgagctttttcacagtggtcaagcgtgattccggtgagtttcgaggaagtcgacgatttcacgacggctgatttaaagatcggattctacgctggtgatcacggtgacgggcttccgtttgacggtgtacttggaactttagcacacgcttttgcgccggagaacgggaggcttcacctcgacgcggcggagacgtggatcgtcgacgatgacttgaaaggatcttcagaggtggccgttgacttggagtctgtggcgactcacgagatcggtcacttgttgggattaggacatagctcgcaggagtcggcggttatgtatccgagtctccgaccgaggaccaagaaagttgaccttacggttgatgacgtggcaggtgtacttaagctatatggtccgaatcctaaactacggttggattcactaacgcagtcggaagattctattaaaaacggcaccgtatcacatagattcttgtcggggaattttatcggttatgttctgttggttgttggtttgattcttttcctataggtttataggcataaaaaatactgtttttattcatttatttttaattaaatgtacatatatttttcaactatgtaaatgtaaatatatagttgaacaaaaaaagatgtacatatatagttaggcttataattaggtttatggtcttg

SEQ ID NO: 29467 - protein, 367 aa, Arabidopsis thaliana
  peptide (1)..(367): Ceres Seq. ID no. 13500120
  misc_feature (155)..(261): Pfam Name: Matrixin Pfam Description: Matrixin
  misc_feature (49)..(367): Homolog of NCBI NO: 30688744 NR Description: metallo proteinase -related [Arabidopsis thaliana]
  misc_feature (49)..(367): Homolog of NCBI NO: 7488435 NR Description: zinc metalloproteinase homolog F3I6.6 -
  misc_feature (14)..(367): Homolog of NCBI NO: 15218963 NR Description: metallo proteinase -related [Arabidopsis
  misc_feature (40)..(325): Homolog of NCBI NO: 15223067 NR Description: matrix metallo proteinase -related [Arabidopsis
  misc_feature (73)..(367): Homolog of NCBI NO: 25455788 NR Description: metalloproteinase (EC 3.4.24.-) [imported] -
  misc_feature (73)..(367): Homolog of NCBI NO: 15225398 NR Description: metallo proteinase -related [Arabidopsis
  misc_feature (47)..(352): Homolog of NCBI NO: 37536782 NR Description: putative metalloproteinase
  misc_feature (4)..(367): Homolog of NCBI NO: 21553383 NR Description: proteinase like protein [Arabidopsis thaliana]
  misc_feature (4)..(367): Homolog of NCBI NO: 15235820 NR Description: proteinase like protein [Arabidopsis thaliana]
  misc_feature (4)..(367): Homolog of NCBI NO: 28393482 NR Description: putative proteinase [Arabidopsis thaliana]
RRQMSRNLIYRRNRALCFVLILFCFPYRFGARITPEAEQSTAKATQIIHVSNSTWHDFSRLVDVQIGSHVSGVSELKRYLHRFGYVNDGSEIFSDVFDGPLESAISLYQENLGLPITGRLDTSTVTLMSLPRCGVSDTHMTINNDFLHTTAHYTYFNGKPKWNRDTLTYAISKTHKLDYLTSEDVKTVFRRAFSQWSSVIPVSFEEVDDFTTADLKIGFYAGDHGDGLPFDGVLGTLAHAFAPENGRLHLDAAETWIVDDDLKGSSEVAVDLESVATHEIGHLLGLGHSSQESAVMYPSLRPRTKKVDLTVDDVAGVLKLYGPNPKLRLDSLTQSEDSIKNGTVSHRFLSGNFIGYVLLVVGLILFL

SEQ ID NO: 29468 - protein, 364 aa, Arabidopsis thaliana
  peptide (1)..(364): Ceres Seq. ID no. 13500121
  misc_feature (152)..(258): Pfam Name: Matrixin Pfam Description: Matrixin
  misc_feature (46)..(364): Homolog of NCBI NO: 30688744 NR Description: metallo proteinase -related [Arabidopsis thaliana]
  misc_feature (46)..(364): Homolog of NCBI NO: 7488435 NR Description: zinc metalloproteinase homolog F3I6.6 -
  misc_feature (11)..(364): Homolog of NCBI NO: 15218963 NR Description: metallo proteinase -related [Arabidopsis
  misc_feature (37)..(322): Homolog of NCBI NO: 15223067 NR Description: matrix metallo proteinase -related [Arabidopsis
  misc_feature (70)..(364): Homolog of NCBI NO: 25455788 NR Description: metalloproteinase (EC 3.4.24.-) [imported] -
  misc_feature (70)..(364): Homolog of NCBI NO: 15225398 NR Description: metallo proteinase -related [Arabidopsis
  misc_feature (44)..(349): Homolog of NCBI NO: 37536782 NR Description: putative metalloproteinase
  misc_feature (1)..(364): Homolog of NCBI NO: 21553383 NR Description: proteinase like protein [Arabidopsis thaliana]
  misc_feature (1)..(364): Homolog of NCBI NO: 15235820 NR Description: proteinase like protein [Arabidopsis thaliana]
  misc_feature (1)..(364): Homolog of NCBI NO: 28393482 NR Description: putative proteinase [Arabidopsis thaliana]
MSRNLIYRRNRALCFVLILFCFPYRFGARITPEAEQSTAKATQIIHVSNSTWHDFSRLVDVQIGSHVSGVSELKRYLHRFGYVNDGSEIFSDVFDGPLESAISLYQENLGLPITGRLDTSTVTLMSLPRCGVSDTHMTINNDFLHTTAHYTYFNGKPKWNRDTLTYAISKTHKLDYLTSEDVKTVFRRAFSQWSSVIPVSFEEVDDFTTADLKIGFYAGDHGDGLPFDGVLGTLAHAFAPENGRLHLDAAETWIVDDDLKGSSEVAVDLESVATHEIGHLLGLGHSSQESAVMYPSLRPRTKKVDLTVDDVAGVLKLYGPNPKLRLDSLTQSEDSIKNGTVSHRFLSGNFIGYVLLVVGLILFL

SEQ ID NO: 29469 - protein, 240 aa, Arabidopsis thaliana
  peptide (1)..(240): Ceres Seq. ID no. 13500122
  misc_feature (28)..(134): Pfam Name: Matrixin Pfam Description: Matrixin
  misc_feature (1)..(240): Homolog of NCBI NO: 30688744 NR Description: metallo proteinase -related [Arabidopsis thaliana]
  misc_feature (1)..(240): Homolog of NCBI NO: 7488435 NR Description: zinc metalloproteinase homolog F3I6.6 -
  misc_feature (1)..(240): Homolog of NCBI NO: 15218963 NR Description: metallo proteinase -related [Arabidopsis
  misc_feature (1)..(198): Homolog of NCBI NO: 15223067 NR Description: matrix metallo proteinase -related [Arabidopsis
  misc_feature (1)..(240): Homolog of NCBI NO: 25455788 NR Description: metalloproteinase (EC 3.4.24.-) [imported] -
  misc_feature (1)..(240): Homolog of NCBI NO: 15225398 NR Description: metallo proteinase -related [Arabidopsis
  misc_feature (1)..(225): Homolog of NCBI NO: 37536782 NR Description: putative metalloproteinase
  misc_feature (1)..(240): Homolog of NCBI NO: 21553383 NR Description: proteinase like protein [Arabidopsis thaliana]
  misc_feature (1)..(240): Homolog of NCBI NO: 15235820 NR Description: proteinase like protein [Arabidopsis thaliana]
  misc_feature (1)..(240): Homolog of NCBI NO: 28393482 NR Description: putative proteinase [Arabidopsis thaliana]
MSLPRCGVSDTHMTINNDFLHTTAHYTYFNGKPKWNRDTLTYAISKTHKLDYLTSEDVKTVFRRAFSQWSSVIPVSFEEVDDFTTADLKIGFYAGDHGDGLPFDGVLGTLAHAFAPENGRLHLDAAETWIVDDDLKGSSEVAVDLESVATHEIGHLLGLGHSSQESAVMYPSLRPRTKKVDLTVDDVAGVLKLYGPNPKLRLDSLTQSEDSIKNGTVSHRFLSGNFIGYVLLVVGLILFL

SEQ ID NO: 29470 - DNA, 990 bp, Arabidopsis thaliana
  misc_feature (1)..(990): Ceres Seq. ID no. 12420633
  misc_feature: MA Experiment ID: 20000111 Result: Down-regulated in Transcription
  misc_feature: MA Experiment 20000111 PARAMETER Experiment Name: At_42deg_Heat_cDNA_P Parameter: Temperature (deg C) Value: 42 vs. 22
  misc_feature: MA Experiment 20000111 PARAMETER Experiment Name: At_42deg_Heat_cDNA_P Parameter: Timepoint (hr) Value: 6
  misc_feature: MA Experiment 20000111 PARAMETER Experiment Name: At_42deg_Heat_cDNA_P Parameter: Tissue Value: Aerial
  misc_feature: MA Experiment ID: 20000112 Result: Down-regulated in Transcription
  misc_feature: MA Experiment 20000112 PARAMETER Experiment Name: At_42deg_Heat_cDNA_P Parameter: Temperature (deg C) Value: 42 vs. 22
  misc_feature: MA Experiment 20000112 PARAMETER Experiment Name: At_42deg_Heat_cDNA_P Parameter: Timepoint (hr) Value: 2
  misc_feature: MA Experiment 20000112 PARAMETER Experiment Name: At_42deg_Heat_cDNA_P Parameter: Tissue Value: Aerial
  misc_feature: MA Experiment ID: 20000113 Result: Down-regulated in Transcription
  misc_feature: MA Experiment 20000113 PARAMETER Experiment Name: At_42deg_Heat_cDNA_P Parameter: Temperature (deg C) Value: 42 vs. 22
  misc_feature: MA Experiment 20000113 PARAMETER Experiment Name: At_42deg_Heat_cDNA_P Parameter: Timepoint (hr) Value: 8
  misc_feature: MA Experiment 20000113 PARAMETER Experiment Name: At_42deg_Heat_cDNA_P Parameter: Tissue Value: Aerial
  misc_feature: MA Experiment ID: 20000173 Result: Down-regulated in Transcription
  misc_feature: MA Experiment 20000173 PARAMETER Experiment Name: At_42deg_Heat_P Parameter: Age (day) Value: 14
  misc_feature: MA Experiment 20000173 PARAMETER Experiment Name: At_42deg_Heat_P Parameter: Organism Value: A. thaliana
  misc_feature: MA Experiment 20000173 PARAMETER Experiment Name: At_42deg_Heat_P Parameter: Plant Line Value: WS
  misc_feature: MA Experiment 20000173 PARAMETER Experiment Name: At_42deg_Heat_P Parameter: Temperature (deg C) Value: 42 vs. 22
  misc_feature: MA Experiment 20000173 PARAMETER Experiment Name: At_42deg_Heat_P Parameter: Timepoint (hr) Value: 6
  misc_feature: MA Experiment 20000173 PARAMETER Experiment Name: At_42deg_Heat_P Parameter: Tissue Value: Aerial
  misc_feature: MA Experiment ID: 20000224 Result: Down-regulated in Transcription
aactaattaaagttgttggtttggtaagagtaccgaaacggtaacgaataataaatgggagacatcattatctctttctctaaatctttccaatggcgtctcttcgtatcctttcgatttggttcttcttcttcttcgtcttcttgatcaatccctccatttctattcgaacttccttcatcaagcttcccggaagcgacggatctcgctactgcgacagctggagacttgccgccgagaccaataacgtcgggacttgggatctgattccgttaatctgcgtggattccgtcgccgagtatcttaacggagaccagtttttatccgattacagtgtcatcgtcgattatgctctcgcgtttgcgaaatcggttgaaatttccggcgacggcaaggacgtgtggatcttcgatatcgacgagacgcttctcacgaatattgactactacaaggctcatggttacgggtctgaaccgtatgacgataataaatttagtgagtgggtggaacaaggaacagctccagcttttgatgcgagcttgagactgtacaatgctctcaagaaacttggtttcactatcattttgctaaccggtcgggacgagcatcaaaggacttccaccgagacaaatctccgggatgccggttattccggttgggaacgtctcctcttgagaggtccaaatgatcaagggaagtcagctacaaattacaaatccgagcagcgatcgaaactgattgaggaaggtttcaaaatccgtggcaatagcggtgatcaatggagtgacttgcaaggttttgccgtggctgatcgttctttcaaagtcccaaatcccatgtactacattccttgatcactattcatttctgatttatgtattgagtaacaaccacttatgtgttttagacgttaatattacattgatctttagtataaacattaactaatactttcatataaagtataattataattgctttgtatcttcc

SEQ ID NO: 29471 - protein, 253 aa, Arabidopsis thaliana
  peptide (1)..(253): Ceres Seq. ID no. 12420634
  misc_feature (25)..(253): Pfam Name: HAD superfamily, subfamily IIIB (Acid phosphatase) Pfam Description: HAD superfamily, subfamily IIIB (Acid
  misc_feature (15)..(253): Homolog of NCBI NO: 15224907 NR Description: putative acid phosphatase; protein id:
  misc_feature (41)..(252): Homolog of NCBI NO: 445113 NR Description: acid phosphatase 1
  misc_feature (41)..(252): Homolog of NCBI NO: 130718 NR Description: Acid phosphatase precursor 1
  misc_feature (4)..(253): Homolog of NCBI NO: 15241412 NR Description: acid phosphatase; protein id: At5g51260.1
  misc_feature (40)..(253): Homolog of NCBI NO: 15234949 NR Description: acid phosphatase - like protein
  misc_feature (1)..(252): Homolog of NCBI NO: 15233526 NR Description: acid phosphatase-like protein
  misc_feature (1)..(253): Homolog of NCBI NO: 15233504 NR Description: acid phosphatase-like protein
MASLRILSIWFFFFFVFLINPSISIRTSFIKLPGSDGSRYCDSWRLAAETNNVGTWDLIPLICVDSVAEYLNGDQFLSDYSVIVDYALAFAKSVEISGDGKDVWIFDIDETLLTNIDYYKAHGYGSEPYDDNKFSEWVEQGTAPAFDASLRLYNALKKLGFTIILLTGRDEHQRTSTETNLRDAGYSGWERLLLRGPNDQGKSATNYKSEQRSKLIEEGFKIRGNSGDQWSDLQGFAVADRSFKVPNPMYYIP

SEQ ID NO: 29472 - DNA, 694 bp, Arabidopsis thaliana
  misc_feature (1)..(694): Ceres Seq. ID no. 13592873
  misc_feature: MA Experiment ID: 108462 Result: Down-regulated in Transcription
  misc_feature: MA Experiment 108462 PARAMETER Experiment Name: At_Germinating_Seeds_cDNA_P Parameter: Age (day) Value: 2 vs. 0
  misc_feature: MA Experiment 108462 PARAMETER Experiment Name: At_Germinating_Seeds_cDNA_P Parameter: Tissue Value: Germinating Seeds
  misc_feature: MA Experiment ID: 108463 Result: Down-regulated in Transcription
  misc_feature: MA Experiment 108463 PARAMETER Experiment Name: At_Germinating_Seeds_cDNA_P Parameter: Age (day) Value: 3 vs. 0
  misc_feature: MA Experiment 108463 PARAMETER Experiment Name: At_Germinating_Seeds_cDNA_P Parameter: Tissue Value: Germinating Seeds
  misc_feature: MA Experiment ID: 108464 Result: Down-regulated in Transcription
  misc_feature: MA Experiment 108464 PARAMETER Experiment Name: At_Germinating_Seeds_cDNA_P Parameter: Age (day) Value: 4 vs. 0
  misc_feature: MA Experiment 108464 PARAMETER Experiment Name: At_Germinating_Seeds_cDNA_P Parameter: Tissue Value: Germinating Seeds
  misc_feature: MA Experiment ID: 108605 Result: Down-regulated in Transcription
  misc_feature: MA Experiment 108605 PARAMETER Experiment Name: At_100uM_ABA_cDNA_P Parameter: Timepoint (hr) Value: 6
  misc_feature: MA Experiment 108605 PARAMETER Experiment Name: At_100uM_ABA_cDNA_P Parameter: Tissue Value: Aerial
  misc_feature: MA Experiment 108605 PARAMETER Experiment Name: At_100uM_ABA_cDNA_P Parameter: Treatment Value: 100uM ABA vs. No Treatment
  misc_feature: MA Experiment ID: 108607 Result: Down-regulated in Transcription
  misc_feature: MA Experiment 108607 PARAMETER Experiment Name: At_100uM_ABA_cDNA_P Parameter: Timepoint (hr) Value: 4
  misc_feature: MA Experiment 108607 PARAMETER Experiment Name: At_100uM_ABA_cDNA_P Parameter: Tissue Value: Aerial
  misc_feature: MA Experiment 108607 PARAMETER Experiment Name: At_100uM_ABA_cDNA_P Parameter: Treatment Value: 100uM ABA vs. No Treatment
  misc_feature: MA Experiment ID: 108609 Result: Down-regulated in Transcription
  misc_feature: MA Experiment 108609 PARAMETER Experiment Name: At_100uM_ABA_cDNA_P Parameter: Timepoint (hr) Value: 24
  misc_feature: MA Experiment 108609 PARAMETER Experiment Name: At_100uM_ABA_cDNA_P Parameter: Tissue Value: Aerial
  misc_feature: MA Experiment 108609 PARAMETER Experiment Name: At_100uM_ABA_cDNA_P Parameter: Treatment Value: 100uM ABA vs. No Treatment
  misc_feature: MA Experiment ID: 20000069 Result: Up-regulated in Transcription
  misc_feature: MA Experiment 20000069 PARAMETER Experiment Name: At_100uM_ABA_Mutants_cDNA_P Parameter: Plant Line Value: CS23
  misc_feature: MA Experiment 20000069 PARAMETER Experiment Name: At_100uM_ABA_Mutants_cDNA_P Parameter: Timepoint (hr) Value: 6
  misc_feature: MA Experiment 20000069 PARAMETER Experiment Name: At_100uM_ABA_Mutants_cDNA_P Parameter: Tissue Value: Aerial
  misc_feature: MA Experiment 20000069 PARAMETER Experiment Name: At_100uM_ABA_Mutants_cDNA_P Parameter: Treatment Value: 100uM ABA vs. No Treatment
  misc_feature: MA Experiment ID: 20000070 Result: Up-regulated in Transcription
  misc_feature: MA Experiment 20000070 PARAMETER Experiment Name: At_100uM_ABA_Mutants_cDNA_P Parameter: Plant Line Value: CS24
  misc_feature: MA Experiment 20000070 PARAMETER Experiment Name: At_100uM_ABA_Mutants_cDNA_P Parameter: Timepoint (hr) Value: 6
  misc_feature: MA Experiment 20000070 PARAMETER Experiment Name: At_100uM_ABA_Mutants_cDNA_P Parameter: Tissue Value: Aerial
  misc_feature: MA Experiment 20000070 PARAMETER Experiment Name: At_100uM_ABA_Mutants_cDNA_P Parameter: Treatment Value: 100uM ABA vs. No Treatment
  misc_feature: MA Experiment ID: 20000072 Result: Up-regulated in Transcription
  misc_feature: MA Experiment 20000072 PARAMETER Experiment Name: At_100uM_ABA_Mutants_cDNA_P Parameter: Plant Line Value: CS8105
  misc_feature: MA Experiment 20000072 PARAMETER Experiment Name: At_100uM_ABA_Mutants_cDNA_P Parameter: Timepoint (hr) Value: 6
  misc_feature: MA Experiment 20000072 PARAMETER Experiment Name: At_100uM_ABA_Mutants_cDNA_P Parameter: Tissue Value: Aerial
  misc_feature: MA Experiment 20000072 PARAMETER Experiment Name: At_100uM_ABA_Mutants_cDNA_P Parameter: Treatment Value: 100uM ABA vs. No Treatment
  misc_feature: MA Experiment ID: 20000086 Result: Up-regulated in Transcription
  misc_feature: MA Experiment 20000086 PARAMETER Experiment Name: At_100uM_ABA_Mutants_cDNA_P Parameter: Plant Line Value: CS22
  misc_feature: MA Experiment 20000086 PARAMETER Experiment Name: At_100uM_ABA_Mutants_cDNA_P Parameter: Timepoint (hr) Value: 6
  misc_feature: MA Experiment 20000086 PARAMETER Experiment Name: At_100uM_ABA_Mutants_cDNA_P Parameter: Tissue Value: Aerial
  misc_feature: MA Experiment 20000086 PARAMETER Experiment Name: At_100uM_ABA_Mutants_cDNA_P Parameter: Treatment Value: 100uM ABA vs. No Treatment
  misc_feature: MA Experiment ID: 20000087 Result: Up-regulated in Transcription
  misc_feature: MA Experiment 20000087 PARAMETER Experiment Name: At_100uM_ABA_Mutants_cDNA_P Parameter: Plant Line Value: WS
  misc_feature: MA Experiment 20000087 PARAMETER Experiment Name: At_100uM_ABA_Mutants_cDNA_P Parameter: Timepoint (hr) Value: 6
  misc_feature: MA Experiment 20000087 PARAMETER Experiment Name: At_100uM_ABA_Mutants_cDNA_P Parameter: Tissue Value: Aerial
  misc_feature: MA Experiment 20000087 PARAMETER Experiment Name: At_100uM_ABA_Mutants_cDNA_P Parameter: Treatment Value: 100uM ABA vs. No Treatment
  misc_feature: MA Experiment ID: 20000088 Result: Up-regulated in Transcription
  misc_feature: MA Experiment 20000088 PARAMETER Experiment Name: At_100uM_ABA_Mutants_cDNA_P Parameter: Plant Line Value: Landsberg
  misc_feature: MA Experiment 20000088 PARAMETER Experiment Name: At_100uM_ABA_Mutants_cDNA_P Parameter: Timepoint (hr) Value: 6
  misc_feature: MA Experiment 20000088 PARAMETER Experiment Name: At_100uM_ABA_Mutants_cDNA_P Parameter: Tissue Value: Aerial
  misc_feature: MA Experiment 20000088 PARAMETER Experiment Name: At_100uM_ABA_Mutants_cDNA_P Parameter: Treatment Value: 100uM ABA vs. No Treatment
  misc_feature: MA Experiment ID: 20000089 Result: Up-regulated in Transcription
  misc_feature: MA Experiment ID: 20000090 Result: Up-regulated in Transcription
  misc_feature: MA Experiment ID: 20000111 Result: Down-regulated in Transcription
  misc_feature: MA Experiment 20000111 PARAMETER Experiment Name: At_42deg_Heat_cDNA_P Parameter: Temperature (deg C) Value: 42 vs. 22
  misc_feature: MA Experiment 20000111 PARAMETER Experiment Name: At_42deg_Heat_cDNA_P Parameter: Timepoint (hr) Value: 6
  misc_feature: MA Experiment 20000111 PARAMETER Experiment Name: At_42deg_Heat_cDNA_P Parameter: Tissue Value: Aerial
  misc_feature: MA Experiment ID: 20000112 Result: Down-regulated in Transcription
  misc_feature: MA Experiment 20000112 PARAMETER Experiment Name: At_42deg_Heat_cDNA_P Parameter: Temperature (deg C) Value: 42 vs. 22
  misc_feature: MA Experiment 20000112 PARAMETER Experiment Name: At_42deg_Heat_cDNA_P Parameter: Timepoint (hr) Value: 2
  misc_feature: MA Experiment 20000112 PARAMETER Experiment Name: At_42deg_Heat_cDNA_P Parameter: Tissue Value: Aerial
  misc_feature: MA Experiment ID: 20000117 Result: Up-regulated in Transcription
  misc_feature: MA Experiment 20000117 PARAMETER Experiment Name: At_100uM_ABA_Mutants_cDNA_P Parameter: Plant Line Value: Columbia
  misc_feature: MA Experiment 20000117 PARAMETER Experiment Name: At_100uM_ABA_Mutants_cDNA_P Parameter: Timepoint (hr) Value: 6
  misc_feature: MA Experiment 20000117 PARAMETER Experiment Name: At_100uM_ABA_Mutants_cDNA_P Parameter: Tissue Value: Aerial
  misc_feature: MA Experiment 20000117 PARAMETER Experiment Name: At_100uM_ABA_Mutants_cDNA_P Parameter: Treatment Value: 100uM ABA vs. No Treatment
  misc_feature: MA Experiment ID: 20000314 Result: Down-regulated in Transcription
  misc_feature: MA Experiment 20000314 PARAMETER Experiment Name: At_14day_Shoots-Roots_Sub_P Parameter: Age (day) Value: 14
  misc_feature: MA Experiment 20000314 PARAMETER Experiment Name: At_14day_Shoots-Roots_Sub_P Parameter: Organism Value: A. thaliana
  misc_feature: MA Experiment 20000314 PARAMETER Experiment Name: At_14day_Shoots-Roots_Sub_P Parameter: Plant Line Value: WS
  misc_feature: MA Experiment 20000314 PARAMETER Experiment Name: At_14day_Shoots-Roots_Sub_P Parameter: Tissue Value: Roots vs. Whole Plant
  misc_feature: MA Experiment ID: 20000315 Result: Down-regulated in Transcription
  misc_feature: MA Experiment 20000315 PARAMETER Experiment Name: At_14day_Shoots-Roots_Sub_P Parameter: Age (day) Value: 14
  misc_feature: MA Experiment 20000315 PARAMETER Experiment Name: At_14day_Shoots-Roots_Sub_P Parameter: Organism Value: A. thaliana
  misc_feature: MA Experiment 20000315 PARAMETER Experiment Name: At_14day_Shoots-Roots_Sub_P Parameter: Plant Line Value: WS
  misc_feature: MA Experiment 20000315 PARAMETER Experiment Name: At_14day_Shoots-Roots_Sub_P Parameter: Tissue Value: Shoots vs. Whole Plant
  misc_feature: MA Experiment ID: 20000328 Result: Down-regulated in Transcription
  misc_feature: MA Experiment 20000328 PARAMETER Experiment Name: At_42deg_Heat_Sub_P Parameter: Age (day) Value: 14
  misc_feature: MA Experiment 20000328 PARAMETER Experiment Name: At_42deg_Heat_Sub_P Parameter: Organism Value: A. thaliana
  misc_feature: MA Experiment 20000328 PARAMETER Experiment Name: At_42deg_Heat_Sub_P Parameter: Plant Line Value: WS
  misc_feature: MA Experiment 20000328 PARAMETER Experiment Name: At_42deg_Heat_Sub_P Parameter: Temperature (deg C) Value: 42 vs. 22
  misc_feature: MA Experiment 20000328 PARAMETER Experiment Name: At_42deg_Heat_Sub_P Parameter: Timepoint (hr) Value: 6
  misc_feature: MA Experiment 20000328 PARAMETER Experiment Name: At_42deg_Heat_Sub_P Parameter: Tissue Value: Aerial
cataagtctctctcttacattttgaaaccctaatttctcaaaaaaatgtctgaagttgagtaccggtgctttgtcggcggccttgcctgggccaccaatgatgaagatcttcaaaggacgttctcacagttcggcgacgttatcgattctaagatcattaacgaccgcgagagtggaagatcaaggggattcggattcgtcaccttcaaggacgagaaagccatgagggatgcgattgaagagatgaacggtaaagagctcgatggacgtgtcatcaccgtgaacgaggctcagtcgagaggtagcggcggtggcggaggaggccgtggtggaagcggtggtggttaccgcagcggaggcggtggtggatactcaggaggcggtggcggcggatactcaggaggaggcggtggtggttacgagagacgtagcggaggttacggatctggtggaggcggtggtggccgaggatacggtggtggtggacgccgtgagggaggtggctacggaggcggtgatggtggaagttacggcggcggtggtggcggctggtaatcaaagatagagttgtttgcgtgctgctgctctgtttttggtttagatttggatttgtgtcaccacttctggtttggttatcgttcgtttggtttacttttttgatgaaacagttttatcgataccgtcgacctcgagg

SEQ ID NO: 29473 - protein, 169 aa, Arabidopsis thaliana; identical to SEQ ID NO: 22059
  peptide (1)..(169): Ceres Seq. ID no. 13592874
  misc_feature (8)..(79): Pfam Name: RNA recognition motif. (a.k.a. RRM, RBD, or RNP domain) Pfam Description: RNA recognition motif. (a.k.a. RRM, RBD, or RNP
  misc_feature (3)..(169): Homolog of NCBI NO: 30681492 NR Description: glycine-rich RNA-binding protein (AtGRP7)
  misc_feature (2)..(168): Homolog of NCBI NO: 34851124 NR Description: putative glycine-rich RNA-binding protein [Prunus
  misc_feature (1)..(161): Homolog of NCBI NO: 544426 NR Description: Glycine-rich RNA-binding protein
  misc_feature (1)..(124): Homolog of NCBI NO: 30692254 NR Description: glycine-rich RNA-binding protein 8 (GRP8) (CCR1)
  misc_feature (3)..(169): Homolog of NCBI NO: 1346180 NR Description: Glycine-rich RNA-binding protein GRP1A
  misc_feature (3)..(169): Homolog of NCBI NO: 21553354 NR Description: glycine-rich RNA binding protein 7 [Arabidopsis
  misc_feature (3)..(169): Homolog of NCBI NO: 1346181 NR Description: Glycine-rich RNA-binding protein GRP2A
  misc_feature (1)..(169): Homolog of NCBI NO: 544416 NR Description: Glycine-rich RNA-binding protein 10
  misc_feature (3)..(169): Homolog of NCBI NO: 15226605 NR Description: glycine-rich RNA-binding protein (AtGRP7)
  misc_feature (1)..(169): Homolog of NCBI NO: 15235002 NR Description: glycine-rich RNA-binding protein 8 (GRP8) (CCR1)

SEQ ID NO: 29474 - protein, 110 aa, Arabidopsis thaliana; identical to SEQ ID NO: 22060
  peptide (1)..(110): Ceres Seq. ID no. 13592875
  misc_feature (30)..(109): Pfam Name: Herpesvirus large structural phosphoprotein UL32 Pfam Description: Herpesvirus large structural phosphoprotein UL32
  misc_feature (1)..(110): Homolog of NCBI NO: 30681492 NR Description: glycine-rich RNA-binding protein (AtGRP7)
  misc_feature (1)..(109): Homolog of NCBI NO: 34851124 NR Description: putative glycine-rich RNA-binding protein [Prunus
  misc_feature (1)..(102): Homolog of NCBI NO: 544426 NR Description: Glycine-rich RNA-binding protein
  misc_feature (1)..(65): Homolog of NCBI NO: 30692254 NR Description: glycine-rich RNA-binding protein 8 (GRP8) (CCR1)
  misc_feature (1)..(110): Homolog of NCBI NO: 1346180 NR Description: Glycine-rich RNA-binding protein GRP1A
  misc_feature (1)..(110): Homolog of NCBI NO: 21553354 NR Description: glycine-rich RNA binding protein 7 [Arabidopsis
  misc_feature (1)..(110): Homolog of NCBI NO: 1346181 NR Description: Glycine-rich RNA-binding protein GRP2A
  misc_feature (1)..(110): Homolog of NCBI NO: 544416 NR Description: Glycine-rich RNA-binding protein 10
  misc_feature (1)..(110): Homolog of NCBI NO: 15226605 NR Description: glycine-rich RNA-binding protein (AtGRP7)
  misc_feature (1)..(110): Homolog of NCBI NO: 15235002 NR Description: glycine-rich RNA-binding protein 8 (GRP8) (CCR1)

SEQ ID NO: 29475 - protein, 103 aa, Arabidopsis thaliana; identical to SEQ ID NO: 22061
  peptide (1)..(103): Ceres Seq. ID no. 13592876
  misc_feature (23)..(102): Pfam Name: Herpesvirus large structural phosphoprotein UL32 Pfam Description: Herpesvirus large structural phosphoprotein UL32
  misc_feature (1)..(103): Homolog of NCBI NO: 30681492 NR Description: glycine-rich RNA-binding protein (AtGRP7)
  misc_feature (1)..(102): Homolog of NCBI NO: 34851124 NR Description: putative glycine-rich RNA-binding protein [Prunus
  misc_feature (1)..(95): Homolog of NCBI NO: 544426 NR Description: Glycine-rich RNA-binding protein
  misc_feature (1)..(58): Homolog of NCBI NO: 30692254 NR Description: glycine-rich RNA-binding protein 8 (GRP8) (CCR1)
  misc_feature (1)..(103): Homolog of NCBI NO: 1346180 NR Description: Glycine-rich RNA-binding protein GRP1A
  misc_feature (1)..(103): Homolog of NCBI NO: 21553354 NR Description: glycine-rich RNA binding protein 7 [Arabidopsis
  misc_feature (1)..(103): Homolog of NCBI NO: 1346181 NR Description: Glycine-rich RNA-binding protein GRP2A
  misc_feature (1)..(103): Homolog of NCBI NO: 544416 NR Description: Glycine-rich RNA-binding protein 10
  misc_feature (1)..(103): Homolog of NCBI NO: 15226605 NR Description: glycine-rich RNA-binding protein (AtGRP7)
  misc_feature (1)..(103): Homolog of NCBI NO: 15235002 NR Description: glycine-rich RNA-binding protein 8 (GRP8) (CCR1)

SEQ ID NO: 29476 - DNA, 935 bp, Arabidopsis thaliana
  misc_feature (1)..(935): Ceres Seq. ID no. 13495661
  misc_feature: MA Experiment ID: 108434 Result: Down-regulated in Transcription
  misc_feature: MA Experiment 108434 PARAMETER Experiment Name: At_Root_Tips_cDNA_P Parameter: Tissue Value: Root Tips
  misc_feature: MA Experiment ID: 108464 Result: Up-regulated in Transcription
  misc_feature: MA Experiment 108464 PARAMETER Experiment Name: At_Germinating_Seeds_cDNA_P Parameter: Age (day) Value: 4 vs. 0
  misc_feature: MA Experiment 108464 PARAMETER Experiment Name: At_Germinating_Seeds_cDNA_P Parameter: Tissue Value: Germinating Seeds
  misc_feature: MA Experiment ID: 108488 Result: Down-regulated in Transcription
  misc_feature: MA Experiment ID: 108573 Result: Up-regulated in Transcription
  misc_feature: MA Experiment 108573 PARAMETER Experiment Name: At_Drought_cDNA_P Parameter: Timepoint (hr) Value: 6
  misc_feature: MA Experiment 108573 PARAMETER Experiment Name: At_Drought_cDNA_P Parameter: Tissue Value: Aerial
  misc_feature: MA Experiment 108573 PARAMETER Experiment Name: At_Drought_cDNA_P Parameter: Treatment Value: Drought vs. No Drought
  misc_feature: MA Experiment ID: 108576 Result: Up-regulated in Transcription
  misc_feature: MA Experiment 108576 PARAMETER Experiment Name: At_42deg_Heat_cDNA_P Parameter: Temperature (deg C) Value: 42 vs. 22
  misc_feature: MA Experiment 108576 PARAMETER Experiment Name: At_42deg_Heat_cDNA_P Parameter: Timepoint (hr) Value: 1
  misc_feature: MA Experiment 108576 PARAMETER Experiment Name: At_42deg_Heat_cDNA_P Parameter: Tissue Value: Aerial
  misc_feature: MA Experiment ID: 20000093 Result: Up-regulated in Transcription
  misc_feature: MA Experiment 20000093 PARAMETER Experiment Name: At_42deg_Heat_cDNA_P Parameter: Temperature (deg C) Value: 42 vs. 22
  misc_feature: MA Experiment 20000093 PARAMETER Experiment Name: At_42deg_Heat_cDNA_P Parameter: Timepoint (hr) Value: 0.5
  misc_feature: MA Experiment 20000093 PARAMETER Experiment Name: At_42deg_Heat_cDNA_P Parameter: Tissue Value: Aerial
  misc_feature: MA Experiment ID: 20000111 Result: Up-regulated in Transcription
  misc_feature: MA Experiment 20000111 PARAMETER Experiment Name: At_42deg_Heat_cDNA_P Parameter: Temperature (deg C) Value: 42 vs. 22
  misc_feature: MA Experiment 20000111 PARAMETER Experiment Name: At_42deg_Heat_cDNA_P Parameter: Timepoint (hr) Value: 6
  misc_feature: MA Experiment 20000111 PARAMETER Experiment Name: At_42deg_Heat_cDNA_P Parameter: Tissue Value: Aerial
  misc_feature: MA Experiment ID: 20000112 Result: Up-regulated in Transcription
  misc_feature: MA Experiment 20000112 PARAMETER Experiment Name: At_42deg_Heat_cDNA_P Parameter: Temperature (deg C) Value: 42 vs. 22
  misc_feature: MA Experiment 20000112 PARAMETER Experiment Name: At_42deg_Heat_cDNA_P Parameter: Timepoint (hr) Value: 2
  misc_feature: MA Experiment 20000112 PARAMETER Experiment Name: At_42deg_Heat_cDNA_P Parameter: Tissue Value: Aerial
  misc_feature: MA Experiment ID: 20000113 Result: Up-regulated in Transcription
  misc_feature: MA Experiment 20000113 PARAMETER Experiment Name: At_42deg_Heat_cDNA_P Parameter: Temperature (deg C) Value: 42 vs. 22
  misc_feature: MA Experiment 20000113 PARAMETER Experiment Name: At_42deg_Heat_cDNA_P Parameter: Timepoint (hr) Value: 8
  misc_feature: MA Experiment 20000113 PARAMETER Experiment Name: At_42deg_Heat_cDNA_P Parameter: Tissue Value: Aerial
  misc_feature: MA Experiment ID: 20000144 Result: Up-regulated in Transcription
  misc_feature: MA Experiment 20000144 PARAMETER Experiment Name: At_42deg_Heat_cDNA_P Parameter: Temperature (deg C) Value: 42 vs. 22
  misc_feature: MA Experiment 20000144 PARAMETER Experiment Name: At_42deg_Heat_cDNA_P Parameter: Timepoint (hr) Value: 1
  misc_feature: MA Experiment 20000144 PARAMETER Experiment Name: At_42deg_Heat_cDNA_P Parameter: Tissue Value: Aerial
  misc_feature: MA Experiment ID: 20000171 Result: Up-regulated in Transcription
  misc_feature: MA Experiment 20000171 PARAMETER Experiment Name: At_42deg_Heat_P Parameter: Age (day) Value: 14
  misc_feature: MA Experiment 20000171 PARAMETER Experiment Name: At_42deg_Heat_P Parameter: Organism Value: A. thaliana
  misc_feature: MA Experiment 20000171 PARAMETER Experiment Name: At_42deg_Heat_P Parameter: Plant Line Value: WS
  misc_feature: MA Experiment 20000171 PARAMETER Experiment Name: At_42deg_Heat_P Parameter: Temperature (deg C) Value: 42 vs. 22
  misc_feature: MA Experiment 20000171 PARAMETER Experiment Name: At_42deg_Heat_P Parameter: Timepoint (hr) Value: 1
  misc_feature: MA Experiment 20000171 PARAMETER Experiment Name: At_42deg_Heat_P Parameter: Tissue Value: Aerial
  misc_feature: MA Experiment ID: 20000182 Result: Up-regulated in Transcription
  misc_feature: MA Experiment 20000182 PARAMETER Experiment Name: At_2mM_SA_P Parameter: Age (day) Value: 14
  misc_feature: MA Experiment 20000182 PARAMETER Experiment Name: At_2mM_SA_P Parameter: Organism Value: A. thaliana
  misc_feature: MA Experiment 20000182 PARAMETER Experiment Name: At_2mM_SA_P Parameter: Plant Line Value: WS
  misc_feature: MA Experiment 20000182 PARAMETER Experiment Name: At_2mM_SA_P Parameter: Timepoint (hr) Value: 6
  misc_feature: MA Experiment 20000182 PARAMETER Experiment Name: At_2mM_SA_P Parameter: Tissue Value: Aerial
  misc_feature: MA Experiment 20000182 PARAMETER Experiment Name: At_2mM_SA_P Parameter: Treatment Value: 2mM SA vs. No Treatment
  misc_feature: MA Experiment ID: 20001557 Result: Up-regulated in Transcription
  misc_feature: MA Experiment 20001557 PARAMETER Experiment Name: At_Drought_Soil_Dry_P Parameter: Age (day) Value: 27
  misc_feature: MA Experiment 20001557 PARAMETER Experiment Name: At_Drought_Soil_Dry_P Parameter: Organism Value: A. thaliana
  misc_feature: MA Experiment 20001557 PARAMETER Experiment Name: At_Drought_Soil_Dry_P Parameter: Plant Line Value: WS
  misc_feature: MA Experiment 20001557 PARAMETER Experiment Name: At_Drought_Soil_Dry_P Parameter: Post Timepoint (hr) Value: 3
  misc_feature: MA Experiment 20001557 PARAMETER Experiment Name: At_Drought_Soil_Dry_P Parameter: Post-Treatment Value: Re-Water vs. No Drought
  misc_feature: MA Experiment 20001557 PARAMETER Experiment Name: At_Drought_Soil_Dry_P Parameter: Timepoint (day) Value: 13
  misc_feature: MA Experiment 20001557 PARAMETER Experiment Name: At_Drought_Soil_Dry_P Parameter: Treatment Value: Drought vs. No Drought
  misc_feature: MA Experiment ID: 20001560 Result: Up-regulated in Transcription
  misc_feature: MA Experiment 20001560 PARAMETER Experiment Name: At_Drought_Soil_Dry_P Parameter: Age (day) Value: 28
  misc_feature: MA Experiment 20001560 PARAMETER Experiment Name: At_Drought_Soil_Dry_P Parameter: Organism Value: A. thaliana
  misc_feature: MA Experiment 20001560 PARAMETER Experiment Name: At_Drought_Soil_Dry_P Parameter: Plant Line Value: WS
  misc_feature: MA Experiment 20001560 PARAMETER Experiment Name: At_Drought_Soil_Dry_P Parameter: Post Timepoint (hr) Value: None
  misc_feature: MA Experiment 20001560 PARAMETER Experiment Name: At_Drought_Soil_Dry_P Parameter: Post-Treatment Value: None
  misc_feature: MA Experiment 20001560 PARAMETER Experiment Name: At_Drought_Soil_Dry_P Parameter: Timepoint (day) Value: 14
  misc_feature: MA Experiment 20001560 PARAMETER Experiment Name: At_Drought_Soil_Dry_P Parameter: Treatment Value: Drought vs. No Drought
  misc_feature: MA Experiment ID: 20001904 Result: Up-regulated in Transcription
  misc_feature: MA Experiment 20001904 PARAMETER Experiment Name: At_Drought_Reproduction_P Parameter: Age (day) Value: 37
  misc_feature: MA Experiment 20001904 PARAMETER Experiment Name: At_Drought_Reproduction_P Parameter: Organism Value: A. thaliana
  misc_feature: MA Experiment 20001904 PARAMETER Experiment Name: At_Drought_Reproduction_P Parameter: Plant Line Value: WS
  misc_feature: MA Experiment 20001904 PARAMETER Experiment Name: At_Drought_Reproduction_P Parameter: Timepoint (day) Value: 7
  misc_feature: MA Experiment 20001904 PARAMETER Experiment Name: At_Drought_Reproduction_P Parameter: Tissue Value: Rosettes
  misc_feature: MA Experiment 20001904 PARAMETER Experiment Name: At_Drought_Reproduction_P Parameter: Treatment Value: Drought vs. No Drought
gtcgtcgttagttttcccatttcctcataattcttcatctctttcctttctcatctctcgattcctttctttctttccatattccattgatttctctcttcttataaaaatacagattctctcttcttagaaccatcaccgattcgaacagatctaataaatcgtttttttcaccagatttttttcgccggagtttgttttgatccattctgttatggcggaagaacacagacttcaagaaccacgattatgtgctaacaattgtggcttcttcggaagcacagctacacaaaatctctgttccaaatgttttcgagatcttcaacatcaagaacaaaactcttccaccgccaaacatgctcttacccaatccttagccgccgttggcgctgctgcgtcttcctccgtgtcgccaccgcctccgcctccagctgattcgaaagaaatcgttgaagcgaaatcagagaaacgagcggcggctgaaccggaggaggcggatggtccgccgcaagatccgaagcggtgtttgacttgtcggcggcgcgtgggaatcacggggtttcggtgtaggtgtggtttcgttttctgcgggacgcataggtacgcggagcaacatgaatgttcgtttgatttcaagcggatggggaaggataagatcgctaaagcgaatccgattgtgaaagctgataagcttgagaagatttgactttgttgtttgttgtttgttgttgttgctttggttttgtgcgtttgaatgaaacacacatgaagaagaaagagcaagaaacaaacatgtcaatgtaaatttaagctttatttgatgatttcttcagtttggttattaaatttgcttattattgatttgattgttccgtttgatgatcttgtagaaggcttaagtcgtattatcaatgtgtagaatttggatttggttg

SEQ ID NO: 29477 - protein, 163 aa, Arabidopsis thaliana
  peptide (1)..(163): Ceres Seq. ID no. 13495662
  misc_feature (104)..(144): Pfam Name: AN1-like Zinc finger Pfam Description: AN1-like Zinc finger
  misc_feature (10)..(163): Homolog of NCBI NO: 18403408 NR Description: expressed protein [Arabidopsis thaliana]
  misc_feature (5)..(163): Homolog of NCBI NO: 30908921 NR Description: putative zinc finger transcription factor ZFP33
  misc_feature (4)..(162): Homolog of NCBI NO: 15235819 NR Description: zinc finger -related protein [Arabidopsis
  misc_feature (9)..(163): Homolog of NCBI NO: 15221329 NR Description: expressed protein [Arabidopsis thaliana]
  misc_feature (9)..(163): Homolog of NCBI NO: 8778645 NR Description: F5O11.17 [Arabidopsis thaliana]
  misc_feature (9)..(163): Homolog of NCBI NO: 15234402 NR Description: expressed protein [Arabidopsis thaliana]
  misc_feature (1)..(163): Homolog of NCBI NO: 18404102 NR Description: expressed protein [Arabidopsis thaliana]
  misc_feature (1)..(163): Homolog of NCBI NO: 14596167 NR Description: zinc finger-like protein [Arabidopsis thaliana]
  misc_feature (1)..(163): Homolog of NCBI NO: 15231686 NR Description: zinc finger - like protein [Arabidopsis thaliana]
  misc_feature (1)..(163): Homolog of NCBI NO: 15225894 NR Description: zinc finger protein -related [Arabidopsis
MAEEHRLQEPRLCANNCGFFGSTATQNLCSKCFRDLQHQEQNSSTAKHALTQSLAAVGAAASSSVSPPPPPPADSKEIVEAKSEKRAAAEPEEADGPPQDPKRCLTCRRRVGITGFRCRCGFVFCGTHRYAEQHECSFDFKRMGKDKIAKANPIVKADKLEKI

SEQ ID NO: 29478 - DNA, 1236 bp, Arabidopsis thaliana
  misc_feature (1)..(1236): Ceres Seq. ID no. 12321712
  misc_feature: MA Experiment ID: 108434 Result: Down-regulated in Transcription
  misc_feature: MA Experiment 108434 PARAMETER Experiment Name: At_Root_Tips_cDNA_P Parameter: Tissue Value: Root Tips
  misc_feature: MA Experiment ID: 108435 Result: Up-regulated in Transcription
  misc_feature: MA Experiment 108435 PARAMETER Experiment Name: At_stm_Mutants_cDNA_P Parameter: Plant Line Value: wt Landsburg vs stm
  misc_feature: MA Experiment 108435 PARAMETER Experiment Name: At_stm_Mutants_cDNA_P Parameter: Tissue Value: Shoot Apical Meristem Region
  misc_feature: MA Experiment ID: 108463 Result: Up-regulated in Transcription
  misc_feature: MA Experiment 108463 PARAMETER Experiment Name: At_Germinating_Seeds_cDNA_P Parameter: Age (day) Value: 3 vs. 0
  misc_feature: MA Experiment 108463 PARAMETER Experiment Name: At_Germinating_Seeds_cDNA_P Parameter: Tissue Value: Germinating Seeds
  misc_feature: MA Experiment ID: 108469 Result: Down-regulated in Transcription
  misc_feature: MA Experiment ID: 108573 Result: Down-regulated in Transcription
  misc_feature: MA Experiment 108573 PARAMETER Experiment Name: At_Drought_cDNA_P Parameter: Timepoint (hr) Value: 6
  misc_feature: MA Experiment 108573 PARAMETER Experiment Name: At_Drought_cDNA_P Parameter: Tissue Value: Aerial
  misc_feature: MA Experiment 108573 PARAMETER Experiment Name: At_Drought_cDNA_P Parameter: Treatment Value: Drought vs. No Drought
  misc_feature: MA Experiment ID: 108574 Result: Up-regulated in Transcription
  misc_feature: MA Experiment 108574 PARAMETER Experiment Name: At_Wounding__cDNA_P Parameter: Timepoint (hr) Value: 1
  misc_feature: MA Experiment 108574 PARAMETER Experiment Name: At_Wounding__cDNA_P Parameter: Tissue Value: Aerial
  misc_feature: MA Experiment 108574 PARAMETER Experiment Name: At_Wounding__cDNA_P Parameter: Treatment Value: Wounding vs. No Wounding
  misc_feature: MA Experiment ID: 108576 Result: Down-regulated in Transcription
  misc_feature: MA Experiment 108576 PARAMETER Experiment Name: At_42deg_Heat_cDNA_P Parameter: Temperature (deg C) Value: 42 vs. 22
  misc_feature: MA Experiment 108576 PARAMETER Experiment Name: At_42deg_Heat_cDNA_P Parameter: Timepoint (hr) Value: 1
  misc_feature: MA Experiment 108576 PARAMETER Experiment Name: At_42deg_Heat_cDNA_P Parameter: Tissue Value: Aerial
  misc_feature: MA Experiment ID: 108579 Result: Up-regulated in Transcription
  misc_feature: MA Experiment 108579 PARAMETER Experiment Name: At_4deg_Cold_cDNA_P Parameter: Temperature (deg C) Value: 4 vs. 22
  misc_feature: MA Experiment 108579 PARAMETER Experiment Name: At_4deg_Cold_cDNA_P Parameter: Timepoint (hr) Value: 6
  misc_feature: MA Experiment 108579 PARAMETER Experiment Name: At_4deg_Cold_cDNA_P Parameter: Tissue Value: Aerial
  misc_feature: MA Experiment ID: 108585 Result: Down-regulated in Transcription
  misc_feature: MA Experiment 108585 PARAMETER Experiment Name: At_5mM_NaNP_cDNA_P Parameter: Timepoint (hr) Value: 6
  misc_feature: MA Experiment 108585 PARAMETER Experiment Name: At_5mM_NaNP_cDNA_P Parameter: Tissue Value: Aerial
  misc_feature: MA Experiment 108585 PARAMETER Experiment Name: At_5mM_NaNP_cDNA_P Parameter: Treatment Value: null
  misc_feature: MA Experiment ID: 108595 Result: Down-regulated in Transcription
  misc_feature: MA Experiment 108595 PARAMETER Experiment Name: At_Ler-pi_Ovule_cDNA_P Parameter: Plant Line Value: null
  misc_feature: MA Experiment ID: 108668 Result: Down-regulated in Transcription
  misc_feature: MA Experiment 108668 PARAMETER Experiment Name: At_2mM_SA_cDNA_P Parameter: Plant Line Value: WS
  misc_feature: MA Experiment 108668 PARAMETER Experiment Name: At_2mM_SA_cDNA_P Parameter: Timepoint (hr) Value: 6
  misc_feature: MA Experiment 108668 PARAMETER Experiment Name: At_2mM_SA_cDNA_P Parameter: Treatment Value: 2mM SA vs. No Treatment
  misc_feature: MA Experiment ID: 20000090 Result: Down-regulated in Transcription
  misc_feature: MA Experiment ID: 20000111 Result: Down-regulated in Transcription
  misc_feature: MA Experiment 20000111 PARAMETER Experiment Name: At_42deg_Heat_cDNA_P Parameter: Temperature (deg C) Value: 42 vs. 22
  misc_feature: MA Experiment 20000111 PARAMETER Experiment Name: At_42deg_Heat_cDNA_P Parameter: Timepoint (hr) Value: 6
  misc_feature: MA Experiment 20000111 PARAMETER Experiment Name: At_42deg_Heat_cDNA_P Parameter: Tissue Value: Aerial
  misc_feature: MA Experiment ID: 20000112 Result: Down-regulated in Transcription
  misc_feature: MA Experiment 20000112 PARAMETER Experiment Name: At_42deg_Heat_cDNA_P Parameter: Temperature (deg C) Value: 42 vs. 22
  misc_feature: MA Experiment 20000112 PARAMETER Experiment Name: At_42deg_Heat_cDNA_P Parameter: Timepoint (hr) Value: 2
  misc_feature: MA Experiment 20000112 PARAMETER Experiment Name: At_42deg_Heat_cDNA_P Parameter: Tissue Value: Aerial
  misc_feature: MA Experiment ID: 20000113 Result: Down-regulated in Transcription
  misc_feature: MA Experiment 20000113 PARAMETER Experiment Name: At_42deg_Heat_cDNA_P Parameter: Temperature (deg C) Value: 42 vs. 22
  misc_feature: MA Experiment 20000113 PARAMETER Experiment Name: At_42deg_Heat_cDNA_P Parameter: Timepoint (hr) Value: 8
  misc_feature: MA Experiment 20000113 PARAMETER Experiment Name: At_42deg_Heat_cDNA_P Parameter: Tissue Value: Aerial
  misc_feature: MA Experiment ID: 20000173 Result: Down-regulated in Transcription
  misc_feature: MA Experiment 20000173 PARAMETER Experiment Name: At_42deg_Heat_P Parameter: Age (day) Value: 14
  misc_feature: MA Experiment 20000173 PARAMETER Experiment Name: At_42deg_Heat_P Parameter: Organism Value: A. thaliana
  misc_feature: MA Experiment 20000173 PARAMETER Experiment Name: At_42deg_Heat_P Parameter: Plant Line Value: WS
  misc_feature: MA Experiment 20000173 PARAMETER Experiment Name: At_42deg_Heat_P Parameter: Temperature (deg C) Value: 42 vs. 22
  misc_feature: MA Experiment 20000173 PARAMETER Experiment Name: At_42deg_Heat_P Parameter: Timepoint (hr) Value: 6
  misc_feature: MA Experiment 20000173 PARAMETER Experiment Name: At_42deg_Heat_P Parameter: Tissue Value: Aerial
  misc_feature: MA Experiment ID: 20000180 Result: Up-regulated in Transcription
  misc_feature: MA Experiment 20000180 PARAMETER Experiment Name: At_Germinating_Seeds_P Parameter: Age (hr) Value: 24 vs. 0
  misc_feature: MA Experiment 20000180 PARAMETER Experiment Name: At_Germinating_Seeds_P Parameter: Tissue Value: Germinating Seeds
  misc_feature: MA Experiment ID: 20000182 Result: Down-regulated in Transcription
  misc_feature: MA Experiment 20000182 PARAMETER Experiment Name: At_2mM_SA_P Parameter: Age (day) Value: 14
  misc_feature: MA Experiment 20000182 PARAMETER Experiment Name: At_2mM_SA_P Parameter: Organism Value: A. thaliana
  misc_feature: MA Experiment 20000182 PARAMETER Experiment Name: At_2mM_SA_P Parameter: Plant Line Value: WS
  misc_feature: MA Experiment 20000182 PARAMETER Experiment Name: At_2mM_SA_P Parameter: Timepoint (hr) Value: 6
  misc_feature: MA Experiment 20000182 PARAMETER Experiment Name: At_2mM_SA_P Parameter: Tissue Value: Aerial
  misc_feature: MA Experiment 20000182 PARAMETER Experiment Name: At_2mM_SA_P Parameter: Treatment Value: 2mM SA vs. No Treatment
  misc_feature: MA Experiment ID: 20000184 Result: Down-regulated in Transcription
  misc_feature: MA Experiment 20000184 PARAMETER Experiment Name: At_Shoots__P Parameter: Age (day) Value: 7
  misc_feature: MA Experiment 20000184 PARAMETER Experiment Name: At_Shoots__P Parameter: Tissue Value: Shoots vs. Whole Plant
  misc_feature: MA Experiment ID: 20000227 Result: Down-regulated in Transcription
  misc_feature: MA Experiment 20000227 PARAMETER Experiment Name: At_Root-Tips-vs-Tops_P Parameter: Tissue Value: Root Tips vs. Root Tops
  misc_feature: MA Experiment ID: 20000234 Result: Down-regulated in Transcription
  misc_feature: MA Experiment 20000234 PARAMETER Experiment Name: At_Siliques_P Parameter: Age (day) Value: 21
  misc_feature: MA Experiment 20000234 PARAMETER Experiment Name: At_Siliques_P Parameter: Organism Value: A. thaliana
  misc_feature: MA Experiment 20000234 PARAMETER Experiment Name: At_Siliques_P Parameter: Plant Line Value: WS
  misc_feature: MA Experiment 20000234 PARAMETER Experiment Name: At_Siliques_P Parameter: Tissue Value: Less Than 5mm Siliques vs. Whole Plant
  misc_feature: MA Experiment ID: 20000235 Result: Down-regulated in Transcription
  misc_feature: MA Experiment 20000235 PARAMETER Experiment Name: At_Siliques_P Parameter: Age (day) Value: 21
  misc_feature: MA Experiment 20000235 PARAMETER Experiment Name: At_Siliques_P Parameter: Organism Value: A. thaliana
  misc_feature: MA Experiment 20000235 PARAMETER Experiment Name: At_Siliques_P Parameter: Plant Line Value: WS
  misc_feature: MA Experiment 20000235 PARAMETER Experiment Name: At_Siliques_P Parameter: Tissue Value: 5-10mm Siliques vs. Whole Plant
  misc_feature: MA Experiment ID: 20000265 Result: Down-regulated in Transcription
  misc_feature: MA Experiment 20000265 PARAMETER Experiment Name: At_Open_Flower_P Parameter: Age (day) Value: 21
  misc_feature: MA Experiment 20000265 PARAMETER Experiment Name: At_Open_Flower_P Parameter: Plant Line Value: WS
  misc_feature: MA Experiment 20000265 PARAMETER Experiment Name: At_Open_Flower_P Parameter: Tissue Value: Closed Flower vs. Whole Plant
  misc_feature: MA Experiment ID: 20000286 Result: Down-regulated in Transcription
  misc_feature: MA Experiment 20000286 PARAMETER Experiment Name: At_Open_Flower_P Parameter: Age (day) Value: 21
  misc_feature: MA Experiment 20000286 PARAMETER Experiment Name: At_Open_Flower_P Parameter: Plant Line Value: WS
  misc_feature: MA Experiment 20000286 PARAMETER Experiment Name: At_Open_Flower_P Parameter: Tissue Value: Half Open vs. Whole Plant
  misc_feature: MA Experiment ID: 20000437 Result: Down-regulated in Transcription
  misc_feature: MA Experiment 20000437 PARAMETER Experiment Name: At_Drought_P Parameter: Age (day) Value: 8
  misc_feature: MA Experiment 20000437 PARAMETER Experiment Name: At_Drought_P Parameter: Organism Value: A. thaliana
  misc_feature: MA Experiment 20000437 PARAMETER Experiment Name: At_Drought_P Parameter: Plant Line Value: WS
  misc_feature: MA Experiment 20000437 PARAMETER Experiment Name: At_Drought_P Parameter: Timepoint (hr) Value: 24
  misc_feature: MA Experiment 20000437 PARAMETER Experiment Name: At_Drought_P Parameter: Tissue Value: Whole Plant
  misc_feature: MA Experiment 20000437 PARAMETER Experiment Name: At_Drought_P Parameter: Treatment Value: Drought vs. No Drought
  misc_feature: MA Experiment ID: 20001247 Result: Down-regulated in Transcription
  misc_feature: MA Experiment 20001247 PARAMETER Experiment Name: At_Far-red-induction_P Parameter: Age (day) Value: 7
  misc_feature: MA Experiment 20001247 PARAMETER Experiment Name: At_Far-red-induction_P Parameter: Light Value: Far-red vs. White
  misc_feature: MA Experiment 20001247 PARAMETER Experiment Name: At_Far-red-induction_P Parameter: Organism Value: A. thaliana
  misc_feature: MA Experiment 20001247 PARAMETER Experiment Name: At_Far-red-induction_P Parameter: Plant Line Value: Columbia
  misc_feature: MA Experiment 20001247 PARAMETER Experiment Name: At_Far-red-induction_P Parameter: Timepoint (hr) Value: 1
  misc_feature: MA Experiment 20001247 PARAMETER Experiment Name: At_Far-red-induction_P Parameter: Tissue Value: Whole Plant
  misc_feature: MA Experiment ID: 20001248 Result: Down-regulated in Transcription
  misc_feature: MA Experiment 20001248 PARAMETER Experiment Name: At_Far-red-induction_P Parameter: Age (day) Value: 7
  misc_feature: MA Experiment 20001248 PARAMETER Experiment Name: At_Far-red-induction_P Parameter: Light Value: Far-red vs. White
  misc_feature: MA Experiment 20001248 PARAMETER Experiment Name: At_Far-red-induction_P Parameter: Organism Value: A. thaliana
  misc_feature: MA Experiment 20001248 PARAMETER Experiment Name: At_Far-red-induction_P Parameter: Plant Line Value: Columbia
  misc_feature: MA Experiment 20001248 PARAMETER Experiment Name: At_Far-red-induction_P Parameter: Timepoint (hr) Value: 4
  misc_feature: MA Experiment 20001248 PARAMETER Experiment Name: At_Far-red-induction_P Parameter: Tissue Value: Whole Plant
  misc_feature: MA Experiment ID: 20001450 Result: Down-regulated in Transcription
  misc_feature: MA Experiment 20001450 PARAMETER Experiment Name: At_Far-red-induction_P Parameter: Age (day) Value: 7
  misc_feature: MA Experiment 20001450 PARAMETER Experiment Name: At_Far-red-induction_P Parameter: Light Value: Far-red vs. White
  misc_feature: MA Experiment 20001450 PARAMETER Experiment Name: At_Far-red-induction_P Parameter: Organism Value: A. thaliana
  misc_feature: MA Experiment 20001450 PARAMETER Experiment Name: At_Far-red-induction_P Parameter: Plant Line Value: Columbia
  misc_feature: MA Experiment 20001450 PARAMETER Experiment Name: At_Far-red-induction_P Parameter: Timepoint (hr) Value: 8
  misc_feature: MA Experiment 20001450 PARAMETER Experiment Name: At_Far-red-induction_P Parameter: Tissue Value: Whole Plant
  misc_feature: MA Experiment ID: 20001451 Result: Down-regulated in Transcription
  misc_feature: MA Experiment 20001451 PARAMETER Experiment Name: At_Far-red-induction_P Parameter: Age (day) Value: 7
  misc_feature: MA Experiment 20001451 PARAMETER Experiment Name: At_Far-red-induction_P Parameter: Light Value: Far-red vs. White
  misc_feature: MA Experiment 20001451 PARAMETER Experiment Name: At_Far-red-induction_P Parameter: Organism Value: A. thaliana
  misc_feature: MA Experiment 20001451 PARAMETER Experiment Name: At_Far-red-induction_P Parameter: Plant Line Value: Columbia
  misc_feature: MA Experiment 20001451 PARAMETER Experiment Name: At_Far-red-induction_P Parameter: Timepoint (hr) Value: 24
  misc_feature: MA Experiment 20001451 PARAMETER Experiment Name: At_Far-red-induction_P Parameter: Tissue Value: Whole Plant
  misc_feature: MA Experiment ID: 20001558 Result: Down-regulated in Transcription
  misc_feature: MA Experiment 20001558 PARAMETER Experiment Name: At_Drought_Soil_Dry_P Parameter: Age (day) Value: 27
  misc_feature: MA Experiment 20001558 PARAMETER Experiment Name: At_Drought_Soil_Dry_P Parameter: Organism Value: A. thaliana
  misc_feature: MA Experiment 20001558 PARAMETER Experiment Name: At_Drought_Soil_Dry_P Parameter: Plant Line Value: WS
  misc_feature: MA Experiment 20001558 PARAMETER Experiment Name: At_Drought_Soil_Dry_P Parameter: Post Timepoint (hr) Value: 6
  misc_feature: MA Experiment 20001558 PARAMETER Experiment Name: At_Drought_Soil_Dry_P Parameter: Post-Treatment Value: Re-Water vs. No Drought
  misc_feature: MA Experiment 20001558 PARAMETER Experiment Name: At_Drought_Soil_Dry_P Parameter: Timepoint (day) Value: 13
  misc_feature: MA Experiment 20001558 PARAMETER Experiment Name: At_Drought_Soil_Dry_P Parameter: Treatment Value: Drought vs. No Drought
aaaaacattcagacacaaatttagtttcttcttcttttggttctgtctgaatccaattttcttatattttatttcctccaccaccgtgagatatgatcgccgccggagctaaatcgctattagggctttcgatggcttctccaaaagggattttcgatagcaattcaatgagtaattcaagatctgttgttgttgttcgtgcttgtgtttctatggatggatctcaaactctgagtcataacaaaaatggatctattcctgaggttaaatccattaacggtcacacgggacaaaagcaaggacctttgtctacggtcggaaactcgacaaatataaagtggcatgaatgttctgttgagaaagttgatagacagagattgcttgatcagaaaggatgtgtgatttgggtcaccggtcttagtggttcagggaagagtactttggcttgtgctttgaatcagatgttgtatcaaaaggggaagctttgttatattcttgatggtgataatgttaggcatggcttaaaccgtgatcttagctttaaagctgaggatcgtgcagagaatattcgtagagttggagaggttgctaagctttttgcggatgctggaataatctgcattgcgagtttgatatctccttatagaacagatagggacgcttgtcgaagtttgctccccgagggagattttgttgaggtgttcatggatgtaccgcttagtgtttgcgaggcgagggatccaaagggtctttacaagcttgctcgtgcaggaaagatcaaaggttttaccgggatcgatgacccttacgagccaccattgaactgcgagatttctctaggacgtgaaggaggaacttctcctatcgaaatggcggaaaaggtcgtcggatacttagataacaagggttatcttcaagcataacatacttctagatacacaaatttgttatctcacggtcttagttctattttacgagccaaagtataaaagtaagcaaatccatggctgttttatggaatcacaagttcgacaaaataaatataaatctcataatttttcttgtccctttttttttgtatcataaatcttgatgttatggttctgtatataatatgtgtgaaataaggttaagcctactaaccattttatatgatctataatacaatatactttgtatgcaaaaaaaaaaaaaaaaaactcgagactagttctctctctctctctcctcgtgccg

SEQ ID NO: 29479 - protein, 276 aa, Arabidopsis thaliana
  peptide (1)..(276): Ceres Seq. ID no. 12321713
  misc_feature (100)..(256): Pfam Name: Adenylylsulphate kinase Pfam Description: Adenylylsulphate kinase
  misc_feature (10)..(256): Homolog of NCBI NO: 21537248 NR Description: adenylylsulfate kinase-like protein [Arabidopsis
  misc_feature (54)..(274): Homolog of NCBI NO: 6563285 NR Description: adenosine-5'-phosphosulfate kinase [Zea mays]
  misc_feature (2)..(256): Homolog of NCBI NO: 18425199 NR Description: adenylylsulfate kinase-like protein
  misc_feature (73)..(274): Homolog of NCBI NO: 34393551 NR Description: putative adenosine-5'-phosphosulfate kinase
  misc_feature (10)..(276): Homolog of NCBI NO: 9757873 NR Description: adenylylsulfate kinase-like protein [Arabidopsis
  misc_feature (72)..(275): Homolog of NCBI NO: 15228666 NR Description: putative adenylylsulfate kinase; protein id:
  misc_feature (68)..(275): Homolog of NCBI NO: 15236087 NR Description: adenosine-5-phosphosulfate-kinase
  misc_feature (50)..(276): Homolog of NCBI NO: 7387809 NR Description: Adenylylsulfate kinase, chloroplast precursor kinase) (Adenosine-5'phosphosulfate kinase) (ATP
  misc_feature (1)..(276): Homolog of NCBI NO: 21553403 NR Description: putative adenosine phosphosulfate kinase
  misc_feature (1)..(276): Homolog of NCBI NO: 15225999 NR Description: putative adenosine phosphosulfate kinase
MIAAGAKSLLGLSMASPKGIFDSNSMSNSRSVVVVRACVSMDGSQTLSHNKNGSIPEVKSINGHTGQKQGPLSTVGNSTNIKWHECSVEKVDRQRLLDQKGCVIWVTGLSGSGKSTLACALNQMLYQKGKLCYILDGDNVRHGLNRDLSFKAEDRAENIRRVGEVAKLFADAGIICIASLISPYRTDRDACRSLLPEGDFVEVFMDVPLSVCEARDPKGLYKLARAGKIKGFTGIDDPYEPPLNCEISLGREGGTSPIEMAEKVVGYLDNKGYLQA

SEQ ID NO: 29480 - protein, 263 aa, Arabidopsis thaliana
  peptide (1)..(263): Ceres Seq. ID no. 12321714
  misc_feature (87)..(243): Pfam Name: Adenylylsulphate kinase Pfam Description: Adenylylsulphate kinase
  misc_feature (1)..(243): Homolog of NCBI NO: 21537248 NR Description: adenylylsulfate kinase-like protein [Arabidopsis
  misc_feature (41)..(261): Homolog of NCBI NO: 6563285 NR Description: adenosine-5'-phosphosulfate kinase [Zea mays]
  misc_feature (1)..(243): Homolog of NCBI NO: 18425199 NR Description: adenylylsulfate kinase-like protein
  misc_feature (60)..(261): Homolog of NCBI NO: 34393551 NR Description: putative adenosine-5'-phosphosulfate kinase
  misc_feature (1)..(263): Homolog of NCBI NO: 9757873 NR Description: adenylylsulfate kinase-like protein [Arabidopsis
  misc_feature (59)..(262): Homolog of NCBI NO: 15228666 NR Description: putative adenylylsulfate kinase; protein id:
  misc_feature (55)..(262): Homolog of NCBI NO: 15236087 NR Description: adenosine-5-phosphosulfate-kinase
  misc_feature (37)..(263): Homolog of NCBI NO: 7387809 NR Description: Adenylylsulfate kinase, chloroplast precursor kinase) (Adenosine-5'phosphosulfate kinase) (ATP
  misc_feature (1)..(263): Homolog of NCBI NO: 21553403 NR Description: putative adenosine phosphosulfate kinase
  misc_feature (1)..(263): Homolog of NCBI NO: 15225999 NR Description: putative adenosine phosphosulfate kinase
MASPKGIFDSNSMSNSRSVVVVRACVSMDGSQTLSHNKNGSIPEVKSINGHTGQKQGPLSTVGNSTNIKWHECSVEKVDRQRLLDQKGCVIWVTGLSGSGKSTLACALNQMLYQKGKLCYILDGDNVRHGLNRDLSFKAEDRAENIRRVGEVAKLFADAGIICIASLISPYRTDRDACRSLLPEGDFVEVFMDVPLSVCEARDPKGLYKLARAGKIKGFTGIDDPYEPPLNCEISLGREGGTSPIEMAEKVVGYLDNKGYLQA

SEQ ID NO: 29481 - protein, 251 aa, Arabidopsis thaliana
  peptide (1)..(251): Ceres Seq. ID no. 12321715
  misc_feature (75)..(231): Pfam Name: Adenylylsulphate kinase Pfam Description: Adenylylsulphate kinase
  misc_feature (1)..(231): Homolog of NCBI NO: 21537248 NR Description: adenylylsulfate kinase-like protein [Arabidopsis
  misc_feature (29)..(249): Homolog of NCBI NO: 6563285 NR Description: adenosine-5'-phosphosulfate kinase [Zea mays]
  misc_feature (1)..(231): Homolog of NCBI NO: 18425199 NR Description: adenylylsulfate kinase-like protein
  misc_feature (48)..(249): Homolog of NCBI NO: 34393551 NR Description: putative adenosine-5'-phosphosulfate kinase
  misc_feature (1)..(251): Homolog of NCBI NO: 9757873 NR Description: adenylylsulfate kinase-like protein [Arabidopsis
  misc_feature (47)..(250): Homolog of NCBI NO: 15228666 NR Description: putative adenylylsulfate kinase; protein id:
  misc_feature (43)..(250): Homolog of NCBI NO: 15236087 NR Description: adenosine-5-phosphosulfate-kinase
  misc_feature (25)..(251): Homolog of NCBI NO: 7387809 NR Description: Adenylylsulfate kinase, chloroplast precursor kinase) (Adenosine-5'phosphosulfate kinase) (ATP
  misc_feature (1)..(251): Homolog of NCBI NO: 21553403 NR Description: putative adenosine phosphosulfate kinase
  misc_feature (1)..(251): Homolog of NCBI NO: 15225999 NR Description: putative adenosine phosphosulfate kinase
MSNSRSVVVVRACVSMDGSQTLSHNKNGSIPEVKSINGHTGQKQGPLSTVGNSTNIKWHECSVEKVDRQRLLDQKGCVIWVTGLSGSGKSTLACALNQMLYQKGKLCYILDGDNVRHGLNRDLSFKAEDRAENIRRVGEVAKLFADAGIICIASLISPYRTDRDACRSLLPEGDFVEVFMDVPLSVCEARDPKGLYKLARAGKIKGFTGIDDPYEPPLNCEISLGREGGTSPIEMAEKVVGYLDNKGYLQA

SEQ ID NO: 29482 - DNA, 630 bp, Arabidopsis thaliana
  misc_feature (1)..(630): Ceres Seq. ID no. 12396845
  misc_feature: MA Experiment ID: 108434 Result: Up-regulated in Transcription
  misc_feature: MA Experiment 108434 PARAMETER Experiment Name: At_Root_Tips_cDNA_P Parameter: Tissue Value: Root Tips
  misc_feature: MA Experiment ID: 108463 Result: Down-regulated in Transcription
  misc_feature: MA Experiment 108463 PARAMETER Experiment Name: At_Germinating_Seeds_cDNA_P Parameter: Age (day) Value: 3 vs. 0
  misc_feature: MA Experiment 108463 PARAMETER Experiment Name: At_Germinating_Seeds_cDNA_P Parameter: Tissue Value: Germinating Seeds
  misc_feature: MA Experiment ID: 108464 Result: Down-regulated in Transcription
  misc_feature: MA Experiment 108464 PARAMETER Experiment Name: At_Germinating_Seeds_cDNA_P Parameter: Age (day) Value: 4 vs. 0
  misc_feature: MA Experiment 108464 PARAMETER Experiment Name: At_Germinating_Seeds_cDNA_P Parameter: Tissue Value: Germinating Seeds
  misc_feature: MA Experiment ID: 108594 Result: Up-regulated in Transcription
  misc_feature: MA Experiment 108594 PARAMETER Experiment Name: At_Ler-rhl_Root_cDNA_P Parameter: Plant Line Value: null
  misc_feature: MA Experiment ID: 20000227 Result: Up-regulated in Transcription
  misc_feature: MA Experiment 20000227 PARAMETER Experiment Name: At_Root-Tips-vs-Tops_P Parameter: Tissue Value: Root Tips vs. Root Tops
  misc_feature: MA Experiment ID: 20000234 Result: Up-regulated in Transcription
  misc_feature: MA Experiment 20000234 PARAMETER Experiment Name: At_Siliques_P Parameter: Age (day) Value: 21
  misc_feature: MA Experiment 20000234 PARAMETER Experiment Name: At_Siliques_P Parameter: Organism Value: A. thaliana
  misc_feature: MA Experiment 20000234 PARAMETER Experiment Name: At_Siliques_P Parameter: Plant Line Value: WS
  misc_feature: MA Experiment 20000234 PARAMETER Experiment Name: At_Siliques_P Parameter: Tissue Value: Less Than 5mm Siliques vs. Whole Plant
  misc_feature: MA Experiment ID: 20000264 Result: Up-regulated in Transcription
  misc_feature: MA Experiment 20000264 PARAMETER Experiment Name: At_Open_Flower_P Parameter: Age (day) Value: 21
  misc_feature: MA Experiment 20000264 PARAMETER Experiment Name: At_Open_Flower_P Parameter: Plant Line Value: WS
  misc_feature: MA Experiment 20000264 PARAMETER Experiment Name: At_Open_Flower_P Parameter: Tissue Value: Open Flower vs. Whole Plant
  misc_feature: MA Experiment ID: 20000265 Result: Up-regulated in Transcription
  misc_feature: MA Experiment 20000265 PARAMETER Experiment Name: At_Open_Flower_P Parameter: Age (day) Value: 21
  misc_feature: MA Experiment 20000265 PARAMETER Experiment Name: At_Open_Flower_P Parameter: Plant Line Value: WS
  misc_feature: MA Experiment 20000265 PARAMETER Experiment Name: At_Open_Flower_P Parameter: Tissue Value: Closed Flower vs. Whole Plant
aacaatggatgaaggaagagaaggagagatagagaagaagaagaagaaagatgaagaaggagaagtgaaggaaggagtagcatcaatagctttgttaccatgtgggactatctctggtcatttcattcagatgcctagctctatctgttatggcctccatggcactgaactagcttgtgagactgagtgtagccgcggtgaggattatcggttgatcaaactcactatcatagactacaatagaaagaaggaacaaacagttgtagtggagtgcaaaggccatgatgctgctcgaattaatgatgtcgagcatgctcacgtgtgggaggaagatgtgataggattagtcgaagaaaaacacgggaagaagaaagtatcggtttcgttcgagtgtgagacatttaaggcagatgaagcagcagaggaccatatcagacagtttatgcccaaattagctggacttgatgctgttattaacattggaccgatgaagatttccgggcttgattttgctgcggtggaagagggacacataaactaagacagcttaactctttctttttgtgtatacatcatatttgaatgctctttgagtctttgtttcatatcgtagaacacaattaacgcttc

SEQ ID NO: 29483 - protein, 179 aa, Arabidopsis thaliana
  peptide (1)..(179): Ceres Seq. ID no. 12396846
  misc_feature (44)..(157): Homolog of NCBI NO: 11994768 NR Description: gene_id:MMF24.3~unknown protein [Arabidopsis
  misc_feature (2)..(179): Homolog of NCBI NO: 15228659 NR Description: hypothetical protein; protein id: At3g29280.1
TMDEGREGEIEKKKKKDEEGEVKEGVASIALLPCGTISGHFIQMPSSICYGLHGTELACETECSRGEDYRLIKLTIIDYNRKKEQTVVVECKGHDAARINDVEHAHVWEEDVIGLVEEKHGKKKVSVSFECETFKADEAAEDHIRQFMPKLAGLDAVINIGPMKISGLDFAAVEEGHIN

SEQ ID NO: 29484 - protein, 178 aa, Arabidopsis thaliana
  peptide (1)..(178): Ceres Seq. ID no. 12396847
  misc_feature (43)..(156): Homolog of NCBI NO: 11994768 NR Description: gene_id:MMF24.3~unknown protein [Arabidopsis
  misc_feature (1)..(178): Homolog of NCBI NO: 15228659 NR Description: hypothetical protein; protein id: At3g29280.1
MDEGREGEIEKKKKKDEEGEVKEGVASIALLPCGTISGHFIQMPSSICYGLHGTELACETECSRGEDYRLIKLTIIDYNRKKEQTVVVECKGHDAARINDVEHAHVWEEDVIGLVEEKHGKKKVSVSFECETFKADEAAEDHIRQFMPKLAGLDAVINIGPMKISGLDFAAVEEGHIN

SEQ ID NO: 29485 - protein, 136 aa, Arabidopsis thaliana
  peptide (1)..(136): Ceres Seq. ID no. 12396848
  misc_feature (1)..(114): Homolog of NCBI NO: 11994768 NR Description: gene_id:MMF24.3~unknown protein [Arabidopsis
  misc_feature (1)..(136): Homolog of NCBI NO: 15228659 NR Description: hypothetical protein; protein id: At3g29280.1
MPSSICYGLHGTELACETECSRGEDYRLIKLTIIDYNRKKEQTVVVECKGHDAARINDVEHAHVWEEDVIGLVEEKHGKKKVSVSFECETFKADEAAEDHIRQFMPKLAGLDAVINIGPMKISGLDFAAVEEGHIN

SEQ ID NO: 29486 - DNA, 2369 bp, Arabidopsis thaliana
  misc_feature (1)..(2369): Ceres Seq. ID no. 13495969
  misc_feature: MA Experiment ID: 108434 Result: Down-regulated in Transcription
  misc_feature: MA Experiment 108434 PARAMETER Experiment Name: At_Root_Tips_cDNA_P Parameter: Tissue Value: Root Tips
  misc_feature: MA Experiment ID: 20000224 Result: Down-regulated in Transcription
atgagagctaagaacaccattacctggaattctctgctcattgggatttctaaagatccaagcagaatgatggaagcacaccaactgttcgacgaaatccctgaaccagatactttctcttataacattatgttgtcttgctacgttcgtaatgttaacttcgagaaggcacagagcttcttcgatcggatgccattcaaggatgcggcgtcatggaacacgatgatcacagggtatgcacgaagaggtgaaatggagaaagcgcgggaattgttctactccatgatggagaagaatgaagtttcttggaatgccatgatctctggatacattgaatgcggagatttggaaaaggcatcacatttcttcaaagtggctccagttagaggcgtcgtggcttggacggcgatgatcacagggtacatgaaagccaagaaggttgaattagctgaggcaatgttcaaagacatgacagtgaataaaaatcttgtaacttggaatgctatgatctctggttatgttgaaaattctaggccagaagatggattgaagcttttcagagctatgcttgaggaaggaattaggcctaactcgtctggactaagcagcgcattgctcggatgcagtgaattatcggcgttacaattagggaggcaaatacatcagatagtgagtaaatctacattgtgtaatgatgtaacagcattgacgtctctgatcagtatgtactgcaaatgtggagaacttggtgatgcttggaagctctttgaggtgatgaagaagaaagatgttgtggcgtggaacgcaatgatttccgggtatgctcagcacggtaatgcggataaggctctgtgtttgttccgtgagatgatagataacaagatcagaccggattggataacgtttgttgcggttttactggcctgtaaccatgctggactagtgaatattgggatggcatatttcgaatcgatggtgagagattataaggtagaaccgcagcctgatcattacacgtgtatggttgatcttttgggtcgggctgggaagctggaggaggcattgaaactgataagatcaatgccgtttagacctcatgctgcggtctttgggacgctcttaggggcttgtagagtgcacaagaatgtggaattggctgaatttgcagctgagaaactgcttcagctaaactcgcaaaatgcagccgggtatgtgcagcttgcgaatatctacgcatcgaagaatcgttgggaagacgttgcaagggttcgcaagagaatgaaagagagcaatgttgtgaaggtagagcgagtcaaagtacctggatacagttggatcgaaatacgaaacaaagttcaccatttcagatcaagtgatcggattcaccctgaactagactcaatacacaagaaactgaaggagttggagaagaagatgaaactagctggatacaaaccggaactagagtttgctttacacaatgtagaggaagagcaaaaagagaagctattgttatggcacagcgagaagttagctgttgcatttggttgcataaaactccctcaaggttcacagatacaagtgttcaagaacttgagaatctgtggtgattgtcataaagcaatcaaatttatctcggagatagagaaacgagagatcattgtaagagacaccacaaggtttcaccatttcaaagatgggtcttgctcttgtggcgattactggtgaaaagagaagagctttgactctctcattggtcaaacctgactgtatttatatgcgttattgtgtggtaaagtttcgacctttgactttacaagttggcgttaagaagagagatgcgtagatcagcgagtggttctagagttttggatcattttccggcgactttaaggtctccgcctcgatctcagagtgttacagctatggaagatgatgtggagctgcttttgcctaggtacgatccgaattcacaagcggggaagagagagaaatcaagattcagatttgcagaaaacgtcatccatttgattcctctcattcttcttctctgtgttgcaatcctctggctctcctcttactcagcagcgttaaggagttgagttcaagaagcaacatgttgtcttgtctccatgggaactcatcatattcagttttgggaaaggaaacaatttttttaccaccggtgattatgtgccgcaaaccatacgtaactcttgtaatttttggttctgtagacacacaaaaggatctctcgttttcatgaaatgtatgtttaatakttcastgatatacatcacacaactcaagtagaaaacactgatggttatccattaatcattctattggtcgaaaaaaagattagtttc

SEQ ID NO: 29487 - protein, 575 aa, Arabidopsis thaliana
  peptide (1)..(575): Ceres Seq. ID no. 15222970
  misc_feature (16)..(575): Homolog of NCBI NO: 15239979 NR Description: pentatricopeptide (PPR) repeat-containing protein
  misc_feature (68)..(575): Homolog of NCBI NO: 15226200 NR Description: pentatricopeptide (PPR) repeat-containing protein
  misc_feature (1)..(575): Homolog of NCBI NO: 34896896 NR Description: hypothetical protein [Oryza sativa (japonica
  misc_feature (1)..(575): Homolog of NCBI NO: 15223594 NR Description: pentatricopeptide (PPR) repeat-containing protein
  misc_feature (1)..(575): Homolog of NCBI NO: 15217508 NR Description: pentatricopeptide (PPR) repeat-containing protein
  misc_feature (7)..(575): Homolog of NCBI NO: 15235498 NR Description: pentatricopeptide (PPR) repeat-containing protein
  misc_feature (1)..(325): Homolog of NCBI NO: 7485181 NR Description: hypothetical protein - Arabidopsis thaliana
  misc_feature (4)..(575): Homolog of NCBI NO: 27817913 NR Description: OJ1066_B03.8 [Oryza sativa (japonica
  misc_feature (26)..(535): Homolog of NCBI NO: 7485181 NR Description: hypothetical protein - Arabidopsis thaliana
  misc_feature (1)..(575): Homolog of NCBI NO: 22328738 NR Description: pentatricopeptide (PPR) repeat-containing protein
MRAKNTITWNSLLIGISKDPSRMMEAHQLFDEIPEPDTFSYNIMLSCYVRNVNFEKAQSFFDRMPFKDAASWNTMITGYARRGEMEKARELFYSMMEKNEVSWNAMISGYIECGDLEKASHFFKVAPVRGVVAWTAMITGYMKAKKVELAEAMFKDMTVNKNLVTWNAMISGYVENSRPEDGLKLFRAMLEEGIRPNSSGLSSALLGCSELSALQLGRQIHQIVSKSTLCNDVTALTSLISMYCKCGELGDAWKLFEVMKKKDVVAWNAMISGYAQHGNADKALCLFREMIDNKIRPDWITFVAVLLACNHAGLVNIGMAYFESMVRDYKVEPQPDHYTCMVDLLGRAGKLEEALKLIRSMPFRPHAAVFGTLLGACRVHKNVELAEFAAEKLLQLNSQNAAGYVQLANIYASKNRWEDVARVRKRMKESNVVKVERVKVPGYSWIEIRNKVHHFRSSDRIHPELDSIHKKLKELEKKMKLAGYKPELEFALHNVEEEQKEKLLLWHSEKLAVAFGCIKLPQGSQIQVFKNLRICGDCHKAIKFISEIEKREIIVRDTTRFHHFKDGSCSCGDYW

SEQ ID NO: 29488 - protein, 553 aa, Arabidopsis thaliana
  peptide (1)..(553): Ceres Seq. ID no. 15222971
  misc_feature (1)..(553): Homolog of NCBI NO: 15239979 NR Description: pentatricopeptide (PPR) repeat-containing protein
  misc_feature (46)..(553): Homolog of NCBI NO: 15226200 NR Description: pentatricopeptide (PPR) repeat-containing protein
  misc_feature (1)..(553): Homolog of NCBI NO: 34896896 NR Description: hypothetical protein [Oryza sativa (japonica
  misc_feature (1)..(553): Homolog of NCBI NO: 15223594 NR Description: pentatricopeptide (PPR) repeat-containing protein
  misc_feature (1)..(553): Homolog of NCBI NO: 15217508 NR Description: pentatricopeptide (PPR) repeat-containing protein
  misc_feature (1)..(553): Homolog of NCBI NO: 15235498 NR Description: pentatricopeptide (PPR) repeat-containing protein
  misc_feature (1)..(303): Homolog of NCBI NO: 7485181 NR Description: hypothetical protein - Arabidopsis thaliana
  misc_feature (1)..(553): Homolog of NCBI NO: 27817913 NR Description: OJ1066_B03.8 [Oryza sativa (japonica
  misc_feature (4)..(513): Homolog of NCBI NO: 7485181 NR Description: hypothetical protein - Arabidopsis thaliana
  misc_feature (1)..(553): Homolog of NCBI NO: 22328738 NR Description: pentatricopeptide (PPR) repeat-containing protein
MMEAHQLFDEIPEPDTFSYNIMLSCYVRNVNFEKAQSFFDRMPFKDAASWNTMITGYARRGEMEKARELFYSMMEKNEVSWNAMISGYIECGDLEKASHFFKVAPVRGVVAWTAMITGYMKAKKVELAEAMFKDMTVNKNLVTWNAMISGYVENSRPEDGLKLFRAMLEEGIRPNSSGLSSALLGCSELSALQLGRQIHQIVSKSTLCNDVTALTSLISMYCKCGELGDAWKLFEVMKKKDVVAWNAMISGYAQHGNADKALCLFREMIDNKIRPDWITFVAVLLACNHAGLVNIGMAYFESMVRDYKVEPQPDHYTCMVDLLGRAGKLEEALKLIRSMPFRPHAAVFGTLLGACRVHKNVELAEFAAEKLLQLNSQNAAGYVQLANIYASKNRWEDVARVRKRMKESNVVKVERVKVPGYSWIEIRNKVHHFRSSDRIHPELDSIHKKLKELEKKMKLAGYKPELEFALHNVEEEQKEKLLLWHSEKLAVAFGCIKLPQGSQIQVFKNLRICGDCHKAIKFISEIEKREIIVRDTTRFHHFKDGSCSCGDYW

SEQ ID NO: 29489 - protein, 552 aa, Arabidopsis thaliana
  peptide (1)..(552): Ceres Seq. ID no. 15222972
  misc_feature (1)..(552): Homolog of NCBI NO: 15239979 NR Description: pentatricopeptide (PPR) repeat-containing protein
  misc_feature (45)..(552): Homolog of NCBI NO: 15226200 NR Description: pentatricopeptide (PPR) repeat-containing protein
  misc_feature (1)..(552): Homolog of NCBI NO: 34896896 NR Description: hypothetical protein [Oryza sativa (japonica
  misc_feature (1)..(552): Homolog of NCBI NO: 15223594 NR Description: pentatricopeptide (PPR) repeat-containing protein
  misc_feature (1)..(552): Homolog of NCBI NO: 15217508 NR Description: pentatricopeptide (PPR) repeat-containing protein
  misc_feature (1)..(552): Homolog of NCBI NO: 15235498 NR Description: pentatricopeptide (PPR) repeat-containing protein
  misc_feature (1)..(302): Homolog of NCBI NO: 7485181 NR Description: hypothetical protein - Arabidopsis thaliana
  misc_feature (1)..(552): Homolog of NCBI NO: 27817913 NR Description: OJ1066_B03.8 [Oryza sativa (japonica
  misc_feature (3)..(512): Homolog of NCBI NO: 7485181 NR Description: hypothetical protein - Arabidopsis thaliana
  misc_feature (1)..(552): Homolog of NCBI NO: 22328738 NR Description: pentatricopeptide (PPR) repeat-containing protein
MEAHQLFDEIPEPDTFSYNIMLSCYVRNVNFEKAQSFFDRMPFKDAASWNTMITGYARRGEMEKARELFYSMMEKNEVSWNAMISGYIECGDLEKASHFFKVAPVRGVVAWTAMITGYMKAKKVELAEAMFKDMTVNKNLVTWNAMISGYVENSRPEDGLKLFRAMLEEGIRPNSSGLSSALLGCSELSALQLGRQIHQIVSKSTLCNDVTALTSLISMYCKCGELGDAWKLFEVMKKKDVVAWNAMISGYAQHGNADKALCLFREMIDNKIRPDWITFVAVLLACNHAGLVNIGMAYFESMVRDYKVEPQPDHYTCMVDLLGRAGKLEEALKLIRSMPFRPHAAVFGTLLGACRVHKNVELAEFAAEKLLQLNSQNAAGYVQLANIYASKNRWEDVARVRKRMKESNVVKVERVKVPGYSWIEIRNKVHHFRSSDRIHPELDSIHKKLKELEKKMKLAGYKPELEFALHNVEEEQKEKLLLWHSEKLAVAFGCIKLPQGSQIQVFKNLRICGDCHKAIKFISEIEKREIIVRDTTRFHHFKDGSCSCGDYW

SEQ ID NO: 29490 - DNA, 909 bp, Arabidopsis thaliana
  misc_feature (1)..(909): Ceres Seq. ID no. 12333026
  misc_feature: MA Experiment ID: 108462 Result: Up-regulated in Transcription
  misc_feature: MA Experiment 108462 PARAMETER Experiment Name: At_Germinating_Seeds_cDNA_P Parameter: Age (day) Value: 2 vs. 0
  misc_feature: MA Experiment 108462 PARAMETER Experiment Name: At_Germinating_Seeds_cDNA_P Parameter: Tissue Value: Germinating Seeds
  misc_feature: MA Experiment ID: 108464 Result: Up-regulated in Transcription
  misc_feature: MA Experiment 108464 PARAMETER Experiment Name: At_Germinating_Seeds_cDNA_P Parameter: Age (day) Value: 4 vs. 0
  misc_feature: MA Experiment 108464 PARAMETER Experiment Name: At_Germinating_Seeds_cDNA_P Parameter: Tissue Value: Germinating Seeds
  misc_feature: MA Experiment ID: 108561 Result: Up-regulated in Transcription
  misc_feature: MA Experiment 108561 PARAMETER Experiment Name: At_100uM_ABA_cDNA_P Parameter: Timepoint (hr) Value: 6
  misc_feature: MA Experiment 108561 PARAMETER Experiment Name: At_100uM_ABA_cDNA_P Parameter: Tissue Value: Aerial
  misc_feature: MA Experiment 108561 PARAMETER Experiment Name: At_100uM_ABA_cDNA_P Parameter: Treatment Value: 100uM ABA vs. No Treatment
  misc_feature: MA Experiment ID: 108573 Result: Up-regulated in Transcription
  misc_feature: MA Experiment 108573 PARAMETER Experiment Name: At_Drought_cDNA_P Parameter: Timepoint (hr) Value: 6
  misc_feature: MA Experiment 108573 PARAMETER Experiment Name: At_Drought_cDNA_P Parameter: Tissue Value: Aerial
  misc_feature: MA Experiment 108573 PARAMETER Experiment Name: At_Drought_cDNA_P Parameter: Treatment Value: Drought vs. No Drought
  misc_feature: MA Experiment ID: 108605 Result: Up-regulated in Transcription
  misc_feature: MA Experiment 108605 PARAMETER Experiment Name: At_100uM_ABA_cDNA_P Parameter: Timepoint (hr) Value: 6
  misc_feature: MA Experiment 108605 PARAMETER Experiment Name: At_100uM_ABA_cDNA_P Parameter: Tissue Value: Aerial
  misc_feature: MA Experiment 108605 PARAMETER Experiment Name: At_100uM_ABA_cDNA_P Parameter: Treatment Value: 100uM ABA vs. No Treatment
  misc_feature: MA Experiment ID: 108607 Result: Up-regulated in Transcription
  misc_feature: MA Experiment 108607 PARAMETER Experiment Name: At_100uM_ABA_cDNA_P Parameter: Timepoint (hr) Value: 4
  misc_feature: MA Experiment 108607 PARAMETER Experiment Name: At_100uM_ABA_cDNA_P Parameter: Tissue Value: Aerial
  misc_feature: MA Experiment 108607 PARAMETER Experiment Name: At_100uM_ABA_cDNA_P Parameter: Treatment Value: 100uM ABA vs. No Treatment
  misc_feature: MA Experiment ID: 108609 Result: Up-regulated in Transcription
  misc_feature: MA Experiment 108609 PARAMETER Experiment Name: At_100uM_ABA_cDNA_P Parameter: Timepoint (hr) Value: 24
  misc_feature: MA Experiment 108609 PARAMETER Experiment Name: At_100uM_ABA_cDNA_P Parameter: Tissue Value: Aerial
  misc_feature: MA Experiment 108609 PARAMETER Experiment Name: At_100uM_ABA_cDNA_P Parameter: Treatment Value: 100uM ABA vs. No Treatment
  misc_feature: MA Experiment ID: 20000069 Result: Up-regulated in Transcription
  misc_feature: MA Experiment 20000069 PARAMETER Experiment Name: At_100uM_ABA_Mutants_cDNA_P Parameter: Plant Line Value: CS23
  misc_feature: MA Experiment 20000069 PARAMETER Experiment Name: At_100uM_ABA_Mutants_cDNA_P Parameter: Timepoint (hr) Value: 6
  misc_feature: MA Experiment 20000069 PARAMETER Experiment Name: At_100uM_ABA_Mutants_cDNA_P Parameter: Tissue Value: Aerial
  misc_feature: MA Experiment 20000069 PARAMETER Experiment Name: At_100uM_ABA_Mutants_cDNA_P Parameter: Treatment Value: 100uM ABA vs. No Treatment
  misc_feature: MA Experiment ID: 20000070 Result: Up-regulated in Transcription
  misc_feature: MA Experiment 20000070 PARAMETER Experiment Name: At_100uM_ABA_Mutants_cDNA_P Parameter: Plant Line Value: CS24
  misc_feature: MA Experiment 20000070 PARAMETER Experiment Name: At_100uM_ABA_Mutants_cDNA_P Parameter: Timepoint (hr) Value: 6
  misc_feature: MA Experiment 20000070 PARAMETER Experiment Name: At_100uM_ABA_Mutants_cDNA_P Parameter: Tissue Value: Aerial
  misc_feature: MA Experiment 20000070 PARAMETER Experiment Name: At_100uM_ABA_Mutants_cDNA_P Parameter: Treatment Value: 100uM ABA vs. No Treatment
  misc_feature: MA Experiment ID: 20000071 Result: Up-regulated in Transcription
  misc_feature: MA Experiment 20000071 PARAMETER Experiment Name: At_100uM_ABA_Mutants_cDNA_P Parameter: Plant Line Value: CS8104
  misc_feature: MA Experiment 20000071 PARAMETER Experiment Name: At_100uM_ABA_Mutants_cDNA_P Parameter: Timepoint (hr) Value: 6
  misc_feature: MA Experiment 20000071 PARAMETER Experiment Name: At_100uM_ABA_Mutants_cDNA_P Parameter: Tissue Value: Aerial
  misc_feature: MA Experiment 20000071 PARAMETER Experiment Name: At_100uM_ABA_Mutants_cDNA_P Parameter: Treatment Value: 100uM ABA vs. No Treatment
  misc_feature: MA Experiment ID: 20000072 Result: Up-regulated in Transcription
  misc_feature: MA Experiment 20000072 PARAMETER Experiment Name: At_100uM_ABA_Mutants_cDNA_P Parameter: Plant Line Value: CS8105
  misc_feature: MA Experiment 20000072 PARAMETER Experiment Name: At_100uM_ABA_Mutants_cDNA_P Parameter: Timepoint (hr) Value: 6
  misc_feature: MA Experiment 20000072 PARAMETER Experiment Name: At_100uM_ABA_Mutants_cDNA_P Parameter: Tissue Value: Aerial
  misc_feature: MA Experiment 20000072 PARAMETER Experiment Name: At_100uM_ABA_Mutants_cDNA_P Parameter: Treatment Value: 100uM ABA vs. No Treatment
  misc_feature: MA Experiment ID: 20000086 Result: Up-regulated in Transcription
  misc_feature: MA Experiment 20000086 PARAMETER Experiment Name: At_100uM_ABA_Mutants_cDNA_P Parameter: Plant Line Value: CS22
  misc_feature: MA Experiment 20000086 PARAMETER Experiment Name: At_100uM_ABA_Mutants_cDNA_P Parameter: Timepoint (hr) Value: 6
  misc_feature: MA Experiment 20000086 PARAMETER Experiment Name: At_100uM_ABA_Mutants_cDNA_P Parameter: Tissue Value: Aerial
  misc_feature: MA Experiment 20000086 PARAMETER Experiment Name: At_100uM_ABA_Mutants_cDNA_P Parameter: Treatment Value: 100uM ABA vs. No Treatment
  misc_feature: MA Experiment ID: 20000087 Result: Up-regulated in Transcription
  misc_feature: MA Experiment 20000087 PARAMETER Experiment Name: At_100uM_ABA_Mutants_cDNA_P Parameter: Plant Line Value: WS
  misc_feature: MA Experiment 20000087 PARAMETER Experiment Name: At_100uM_ABA_Mutants_cDNA_P Parameter: Timepoint (hr) Value: 6
  misc_feature: MA Experiment 20000087 PARAMETER Experiment Name: At_100uM_ABA_Mutants_cDNA_P Parameter: Tissue Value: Aerial
  misc_feature: MA Experiment 20000087 PARAMETER Experiment Name: At_100uM_ABA_Mutants_cDNA_P Parameter: Treatment Value: 100uM ABA vs. No Treatment
  misc_feature: MA Experiment ID: 20000117 Result: Up-regulated in Transcription
  misc_feature: MA Experiment 20000117 PARAMETER Experiment Name: At_100uM_ABA_Mutants_cDNA_P Parameter: Plant Line Value: Columbia
  misc_feature: MA Experiment 20000117 PARAMETER Experiment Name: At_100uM_ABA_Mutants_cDNA_P Parameter: Timepoint (hr) Value: 6
  misc_feature: MA Experiment 20000117 PARAMETER Experiment Name: At_100uM_ABA_Mutants_cDNA_P Parameter: Tissue Value: Aerial
  misc_feature: MA Experiment 20000117 PARAMETER Experiment Name: At_100uM_ABA_Mutants_cDNA_P Parameter: Treatment Value: 100uM ABA vs. No Treatment
  misc_feature: MA Experiment ID: 20000184 Result: Down-regulated in Transcription
  misc_feature: MA Experiment 20000184 PARAMETER Experiment Name: At_Shoots__P Parameter: Age (day) Value: 7
  misc_feature: MA Experiment 20000184 PARAMETER Experiment Name: At_Shoots__P Parameter: Tissue Value: Shoots vs. Whole Plant
  misc_feature: MA Experiment ID: 20000438 Result: Down-regulated in Transcription
  misc_feature: MA Experiment 20000438 PARAMETER Experiment Name: At_Shoots__P Parameter: Age (day) Value: 14
  misc_feature: MA Experiment 20000438 PARAMETER Experiment Name: At_Shoots__P Parameter: Tissue Value: Shoots vs. Whole Plant
  misc_feature: MA Experiment ID: 20000453 Result: Up-regulated in Transcription
  misc_feature: MA Experiment 20000453 PARAMETER Experiment Name: At_100uM_ABA_P Parameter: Age (day) Value: 15
  misc_feature: MA Experiment 20000453 PARAMETER Experiment Name: At_100uM_ABA_P Parameter: Organism Value: A. thaliana
  misc_feature: MA Experiment 20000453 PARAMETER Experiment Name: At_100uM_ABA_P Parameter: Plant Line Value: WS
  misc_feature: MA Experiment 20000453 PARAMETER Experiment Name: At_100uM_ABA_P Parameter: Timepoint (hr) Value: 24
  misc_feature: MA Experiment 20000453 PARAMETER Experiment Name: At_100uM_ABA_P Parameter: Tissue Value: Aerial
  misc_feature: MA Experiment 20000453 PARAMETER Experiment Name: At_100uM_ABA_P Parameter: Treatment Value: 100uM ABA vs. No Treatment
  misc_feature: MA Experiment ID: 20001247 Result: Up-regulated in Transcription
  misc_feature: MA Experiment 20001247 PARAMETER Experiment Name: At_Far-red-induction_P Parameter: Age (day) Value: 7
  misc_feature: MA Experiment 20001247 PARAMETER Experiment Name: At_Far-red-induction_P Parameter: Light Value: Far-red vs. White
  misc_feature: MA Experiment 20001247 PARAMETER Experiment Name: At_Far-red-induction_P Parameter: Organism Value: A. thaliana
  misc_feature: MA Experiment 20001247 PARAMETER Experiment Name: At_Far-red-induction_P Parameter: Plant Line Value: Columbia
  misc_feature: MA Experiment 20001247 PARAMETER Experiment Name: At_Far-red-induction_P Parameter: Timepoint (hr) Value: 1
  misc_feature: MA Experiment 20001247 PARAMETER Experiment Name: At_Far-red-induction_P Parameter: Tissue Value: Whole Plant
  misc_feature: MA Experiment ID: 20001248 Result: Up-regulated in Transcription
  misc_feature: MA Experiment 20001248 PARAMETER Experiment Name: At_Far-red-induction_P Parameter: Age (day) Value: 7
  misc_feature: MA Experiment 20001248 PARAMETER Experiment Name: At_Far-red-induction_P Parameter: Light Value: Far-red vs. White
  misc_feature: MA Experiment 20001248 PARAMETER Experiment Name: At_Far-red-induction_P Parameter: Organism Value: A. thaliana
  misc_feature: MA Experiment 20001248 PARAMETER Experiment Name: At_Far-red-induction_P Parameter: Plant Line Value: Columbia
  misc_feature: MA Experiment 20001248 PARAMETER Experiment Name: At_Far-red-induction_P Parameter: Timepoint (hr) Value: 4
  misc_feature: MA Experiment 20001248 PARAMETER Experiment Name: At_Far-red-induction_P Parameter: Tissue Value: Whole Plant
  misc_feature: MA Experiment ID: 20001450 Result: Up-regulated in Transcription
  misc_feature: MA Experiment 20001450 PARAMETER Experiment Name: At_Far-red-induction_P Parameter: Age (day) Value: 7
  misc_feature: MA Experiment 20001450 PARAMETER Experiment Name: At_Far-red-induction_P Parameter: Light Value: Far-red vs. White
  misc_feature: MA Experiment 20001450 PARAMETER Experiment Name: At_Far-red-induction_P Parameter: Organism Value: A. thaliana
  misc_feature: MA Experiment 20001450 PARAMETER Experiment Name: At_Far-red-induction_P Parameter: Plant Line Value: Columbia
  misc_feature: MA Experiment 20001450 PARAMETER Experiment Name: At_Far-red-induction_P Parameter: Timepoint (hr) Value: 8
  misc_feature: MA Experiment 20001450 PARAMETER Experiment Name: At_Far-red-induction_P Parameter: Tissue Value: Whole Plant
attttctcagtttttcccctctttttaccttttctggaaaaaagttagataaaatcggaattgtttggattagggcttcgattttttgatgttgttgtatacttttttcaatagagatttgattgtgaaacttttgtcgtcgtagctttaagcaaacaaaaaaaaaagatgaccggcgttggcgagaatcagcttatctccattcaacctgatgaactcaaatttctctttgaacttgagaagcaaagctactgtgatcttaaagttgccaataaaacagagaactatgttgctttcaaggtgaaaacaacatctccaaagaagtattttgtaagacctaacactggtgtcattcagccatgggactcttgcatcattagagttactctacaagcgcaacgagagtatcctccagatatgcagtgcaaagacaaatttctcctgcaaagtaccattgtacctccacacactgatgtggatgaacttcctcaagacactttcaccaaggacagtggaaagacattaacagaatgtaagctcaaagtctcttatattaccccgtctacaacccaaagatcctctgaatccggagcaacaaatggtgatggacaaagctcggaaaccatctctactatacagcggctgaaggaagagcgagatgcagccgttaagcaaacacaacagctgcaacatgaattggaaacggtaaggaggcggagaaaccagaggaacagcggaaatgggctatccttgaagttggcagctatggttggactcatcggactcatcatcggtttcatcctaaaacttaccttagcttctcccacataacaactcttgagcttcaacacatcgcctatcatctcaatatatgtaacagccgaatcaaaacagattcacatattttcg

SEQ ID NO: 29491 - protein, 220 aa, Arabidopsis thaliana; identical to SEQ ID NO: 21397
  peptide (1)..(220): Ceres Seq. ID no. 12333027
  misc_feature (149)..(215): Homolog of NCBI NO: 11288305 NR Description: hypothetical protein T4C21.10 - Arabidopsis
  misc_feature (1)..(143): Homolog of NCBI NO: 11288305 NR Description: hypothetical protein T4C21.10 - Arabidopsis
  misc_feature (149)..(215): Homolog of NCBI NO: 21554053 NR Description: putative VAMP-associated protein [Arabidopsis
  misc_feature (4)..(143): Homolog of NCBI NO: 21554053 NR Description: putative VAMP-associated protein [Arabidopsis
  misc_feature (149)..(215): Homolog of NCBI NO: 18411661 NR Description: putative protein
  misc_feature (1)..(143): Homolog of NCBI NO: 18411661 NR Description: putative protein
  misc_feature (8)..(219): Homolog of NCBI NO: 37536644 NR Description: putative membrane protein
  misc_feature (5)..(219): Homolog of NCBI NO: 14140121 NR Description: putative vesicle-associated membrane protein
  misc_feature (54)..(220): Homolog of NCBI NO: 28207603 NR Description: putative VAMP-associated protein [Brassica rapa
  misc_feature (1)..(220): Homolog of NCBI NO: 15238034 NR Description: VAMP (vesicle-associated membrane

SEQ ID NO: 29492 - protein, 137 aa, Arabidopsis thaliana; identical to SEQ ID NO: 21398
  peptide (1)..(137): Ceres Seq. ID no. 12333028
  misc_feature (66)..(132): Homolog of NCBI NO: 11288305 NR Description: hypothetical protein T4C21.10 - Arabidopsis
  misc_feature (1)..(60): Homolog of NCBI NO: 11288305 NR Description: hypothetical protein T4C21.10 - Arabidopsis
  misc_feature (66)..(132): Homolog of NCBI NO: 21554053 NR Description: putative VAMP-associated protein [Arabidopsis
  misc_feature (1)..(60): Homolog of NCBI NO: 21554053 NR Description: putative VAMP-associated protein [Arabidopsis
  misc_feature (66)..(132): Homolog of NCBI NO: 18411661 NR Description: putative protein
  misc_feature (1)..(60): Homolog of NCBI NO: 18411661 NR Description: putative protein
  misc_feature (1)..(136): Homolog of NCBI NO: 37536644 NR Description: putative membrane protein
  misc_feature (1)..(136): Homolog of NCBI NO: 14140121 NR Description: putative vesicle-associated membrane protein
  misc_feature (1)..(137): Homolog of NCBI NO: 28207603 NR Description: putative VAMP-associated protein [Brassica rapa
  misc_feature (1)..(137): Homolog of NCBI NO: 15238034 NR Description: VAMP (vesicle-associated membrane

SEQ ID NO: 29493 - DNA, 818 bp, Arabidopsis thaliana
  misc_feature (1)..(818): Ceres Seq. ID no. 12338666
  misc_feature: MA Experiment ID: 108434 Result: Down-regulated in Transcription
  misc_feature: MA Experiment 108434 PARAMETER Experiment Name: At_Root_Tips_cDNA_P Parameter: Tissue Value: Root Tips
  misc_feature: MA Experiment ID: 108462 Result: Up-regulated in Transcription
  misc_feature: MA Experiment 108462 PARAMETER Experiment Name: At_Germinating_Seeds_cDNA_P Parameter: Age (day) Value: 2 vs. 0
  misc_feature: MA Experiment 108462 PARAMETER Experiment Name: At_Germinating_Seeds_cDNA_P Parameter: Tissue Value: Germinating Seeds
  misc_feature: MA Experiment ID: 108463 Result: Up-regulated in Transcription
  misc_feature: MA Experiment 108463 PARAMETER Experiment Name: At_Germinating_Seeds_cDNA_P Parameter: Age (day) Value: 3 vs. 0
  misc_feature: MA Experiment 108463 PARAMETER Experiment Name: At_Germinating_Seeds_cDNA_P Parameter: Tissue Value: Germinating Seeds
  misc_feature: MA Experiment ID: 108577 Result: Down-regulated in Transcription
  misc_feature: MA Experiment 108577 PARAMETER Experiment Name: At_42deg_Heat_cDNA_P Parameter: Temperature (deg C) Value: 42 vs. 22
  misc_feature: MA Experiment 108577 PARAMETER Experiment Name: At_42deg_Heat_cDNA_P Parameter: Timepoint (hr) Value: 6
  misc_feature: MA Experiment 108577 PARAMETER Experiment Name: At_42deg_Heat_cDNA_P Parameter: Tissue Value: Aerial
  misc_feature: MA Experiment ID: 108579 Result: Down-regulated in Transcription
  misc_feature: MA Experiment 108579 PARAMETER Experiment Name: At_4deg_Cold_cDNA_P Parameter: Temperature (deg C) Value: 4 vs. 22
  misc_feature: MA Experiment 108579 PARAMETER Experiment Name: At_4deg_Cold_cDNA_P Parameter: Timepoint (hr) Value: 6
  misc_feature: MA Experiment 108579 PARAMETER Experiment Name: At_4deg_Cold_cDNA_P Parameter: Tissue Value: Aerial
  misc_feature: MA Experiment ID: 108595 Result: Down-regulated in Transcription
  misc_feature: MA Experiment 108595 PARAMETER Experiment Name: At_Ler-pi_Ovule_cDNA_P Parameter: Plant Line Value: null
  misc_feature: MA Experiment ID: 20000179 Result: Up-regulated in Transcription
  misc_feature: MA Experiment 20000179 PARAMETER Experiment Name: At_Germinating_Seeds_P Parameter: Age (hr) Value: 6 vs. 0
  misc_feature: MA Experiment 20000179 PARAMETER Experiment Name: At_Germinating_Seeds_P Parameter: Tissue Value: Germinating Seeds
  misc_feature: MA Experiment ID: 20000180 Result: Up-regulated in Transcription
  misc_feature: MA Experiment 20000180 PARAMETER Experiment Name: At_Germinating_Seeds_P Parameter: Age (hr) Value: 24 vs. 0
  misc_feature: MA Experiment 20000180 PARAMETER Experiment Name: At_Germinating_Seeds_P Parameter: Tissue Value: Germinating Seeds
  misc_feature: MA Experiment ID: 20000214 Result: Down-regulated in Transcription
  misc_feature: MA Experiment 20000214 PARAMETER Experiment Name: At_4deg_Cold_P Parameter: Timepoint (hr) Value: 6
  misc_feature: MA Experiment ID: 20000224 Result: Down-regulated in Transcription
  misc_feature: MA Experiment ID: 20000227 Result: Down-regulated in Transcription
  misc_feature: MA Experiment 20000227 PARAMETER Experiment Name: At_Root-Tips-vs-Tops_P Parameter: Tissue Value: Root Tips vs. Root Tops
  misc_feature: MA Experiment ID: 20000234 Result: Down-regulated in Transcription
  misc_feature: MA Experiment 20000234 PARAMETER Experiment Name: At_Siliques_P Parameter: Age (day) Value: 21
  misc_feature: MA Experiment 20000234 PARAMETER Experiment Name: At_Siliques_P Parameter: Organism Value: A. thaliana
  misc_feature: MA Experiment 20000234 PARAMETER Experiment Name: At_Siliques_P Parameter: Plant Line Value: WS
  misc_feature: MA Experiment 20000234 PARAMETER Experiment Name: At_Siliques_P Parameter: Tissue Value: Less Than 5mm Siliques vs. Whole Plant
  misc_feature: MA Experiment ID: 20000235 Result: Down-regulated in Transcription
  misc_feature: MA Experiment 20000235 PARAMETER Experiment Name: At_Siliques_P Parameter: Age (day) Value: 21
  misc_feature: MA Experiment 20000235 PARAMETER Experiment Name: At_Siliques_P Parameter: Organism Value: A. thaliana
  misc_feature: MA Experiment 20000235 PARAMETER Experiment Name: At_Siliques_P Parameter: Plant Line Value: WS
  misc_feature: MA Experiment 20000235 PARAMETER Experiment Name: At_Siliques_P Parameter: Tissue Value: 5-10mm Siliques vs. Whole Plant
  misc_feature: MA Experiment ID: 20000264 Result: Down-regulated in Transcription
  misc_feature: MA Experiment 20000264 PARAMETER Experiment Name: At_Open_Flower_P Parameter: Age (day) Value: 21
  misc_feature: MA Experiment 20000264 PARAMETER Experiment Name: At_Open_Flower_P Parameter: Plant Line Value: WS
  misc_feature: MA Experiment 20000264 PARAMETER Experiment Name: At_Open_Flower_P Parameter: Tissue Value: Open Flower vs. Whole Plant
  misc_feature: MA Experiment ID: 20000439 Result: Down-regulated in Transcription
  misc_feature: MA Experiment 20000439 PARAMETER Experiment Name: At_Roots__P Parameter: Age (day) Value: 14 vs. 21
  misc_feature: MA Experiment 20000439 PARAMETER Experiment Name: At_Roots__P Parameter: Organism Value: A. thaliana
  misc_feature: MA Experiment 20000439 PARAMETER Experiment Name: At_Roots__P Parameter: Tissue Value: Roots vs. Whole Plant
  misc_feature: MA Experiment ID: 20001905 Result: Down-regulated in Transcription
  misc_feature: MA Experiment 20001905 PARAMETER Experiment Name: At_Drought_Reproduction_P Parameter: Age (day) Value: 40
  misc_feature: MA Experiment 20001905 PARAMETER Experiment Name: At_Drought_Reproduction_P Parameter: Organism Value: A. thaliana
  misc_feature: MA Experiment 20001905 PARAMETER Experiment Name: At_Drought_Reproduction_P Parameter: Plant Line Value: WS
  misc_feature: MA Experiment 20001905 PARAMETER Experiment Name: At_Drought_Reproduction_P Parameter: Timepoint (day) Value: 10
  misc_feature: MA Experiment 20001905 PARAMETER Experiment Name: At_Drought_Reproduction_P Parameter: Tissue Value: Rosettes
  misc_feature: MA Experiment 20001905 PARAMETER Experiment Name: At_Drought_Reproduction_P Parameter: Treatment Value: Drought vs. No Drought
acattacaagaatcattcgattctcttctatcatcatcttcttcttctccatcaaaattcaccaaaacatggaagctctaattcaccacttcactctcctctccgatcaagctcttgtcgacaaaacattcgacccttcaagaatcgaggacctcatgcgtctctttgaagtcgattcatacaaagcttgggcagctctcgaatccgaacagcaacaagaactcgaagaagctgaagaatctctccgtgaagctgaacttgaacttgatcgggatatggagtgggggatggaggagtataggcggacgttggaggagatggagaggatggaggcggcggagctgaaagagcttgaggagaaagcggagactgctcggagaacggggaatttaatggagaaagcggcgacagttgccgcgaaacgacatattgcggcggcgatgggatcagccgccgcgtctatgagatcagcttggaagactgcagctggaaataaggttcatccatcttgatcgatgatgatgatgatgaatatgataagatgacgatgattgtcaaagtattggtccccatgttataggattagtaggtcaagaacattttaatgaataattatttcctttgataaacatatgggttactacttactattgccgaagaattatgaattataggtagtttctagtttatgtatctgtaatttgtaatcaatatatatttatgggattataggaagtcgtaaaatgtggtactagtttattggtttgatggtagaacagaaaaaaaaaaaaaaaaattggtgggacacctaaaagtac

SEQ ID NO: 29494 - protein, 169 aa, Arabidopsis thaliana
  peptide (1)..(169): Ceres Seq. ID no. 12338668
  misc_feature (52)..(169): Homolog of NCBI NO: 23306438 NR Description: Unknown protein [Arabidopsis thaliana]
  misc_feature (23)..(169): Homolog of NCBI NO: 21553414 NR Description: unknown [Arabidopsis thaliana]
  misc_feature (23)..(169): Homolog of NCBI NO: 18406916 NR Description: expressed protein
ITRIIRFSSIIIFFFSIKIHQNMEALIHHFTLLSDQALVDKTFDPSRIEDLMRLFEVDSYKAWAALESEQQQELEEAEESLREAELELDRDMEWGMEEYRRTLEEMERMEAAELKELEEKAETARRTGNLMEKAATVAAKRHIAAAMGSAAASMRSAWKTAAGNKVHPS

SEQ ID NO: 29495 - protein, 147 aa, Arabidopsis thaliana
  peptide (1)..(147): Ceres Seq. ID no. 12338669
  misc_feature (30)..(147): Homolog of NCBI NO: 23306438 NR Description: Unknown protein [Arabidopsis thaliana]
  misc_feature (1)..(147): Homolog of NCBI NO: 21553414 NR Description: unknown [Arabidopsis thaliana]
  misc_feature (1)..(147): Homolog of NCBI NO: 18406916 NR Description: expressed protein
MEALIHHFTLLSDQALVDKTFDPSRIEDLMRLFEVDSYKAWAALESEQQQELEEAEESLREAELELDRDMEWGMEEYRRTLEEMERMEAAELKELEEKAETARRTGNLMEKAATVAAKRHIAAAMGSAAASMRSAWKTAAGNKVHPS

SEQ ID NO: 29496 - protein, 118 aa, Arabidopsis thaliana
  peptide (1)..(118): Ceres Seq. ID no. 12338670
  misc_feature (1)..(118): Homolog of NCBI NO: 23306438 NR Description: Unknown protein [Arabidopsis thaliana]
  misc_feature (1)..(118): Homolog of NCBI NO: 21553414 NR Description: unknown [Arabidopsis thaliana]
  misc_feature (1)..(118): Homolog of NCBI NO: 18406916 NR Description: expressed protein
MRLFEVDSYKAWAALESEQQQELEEAEESLREAELELDRDMEWGMEEYRRTLEEMERMEAAELKELEEKAETARRTGNLMEKAATVAAKRHIAAAMGSAAASMRSAWKTAAGNKVHPS

SEQ ID NO: 29497 - DNA, 1449 bp, Arabidopsis thaliana
  misc_feature (1)..(1449): Ceres Seq. ID no. 12325319
  misc_feature: MA Experiment ID: 108462 Result: Down-regulated in Transcription
  misc_feature: MA Experiment 108462 PARAMETER Experiment Name: At_Germinating_Seeds_cDNA_P Parameter: Age (day) Value: 2 vs. 0
  misc_feature: MA Experiment 108462 PARAMETER Experiment Name: At_Germinating_Seeds_cDNA_P Parameter: Tissue Value: Germinating Seeds
  misc_feature: MA Experiment ID: 108463 Result: Down-regulated in Transcription
  misc_feature: MA Experiment 108463 PARAMETER Experiment Name: At_Germinating_Seeds_cDNA_P Parameter: Age (day) Value: 3 vs. 0
  misc_feature: MA Experiment 108463 PARAMETER Experiment Name: At_Germinating_Seeds_cDNA_P Parameter: Tissue Value: Germinating Seeds
  misc_feature: MA Experiment ID: 108488 Result: Up-regulated in Transcription
  misc_feature: MA Experiment ID: 108561 Result: Down-regulated in Transcription
  misc_feature: MA Experiment 108561 PARAMETER Experiment Name: At_100uM_ABA_cDNA_P Parameter: Timepoint (hr) Value: 6
  misc_feature: MA Experiment 108561 PARAMETER Experiment Name: At_100uM_ABA_cDNA_P Parameter: Tissue Value: Aerial
  misc_feature: MA Experiment 108561 PARAMETER Experiment Name: At_100uM_ABA_cDNA_P Parameter: Treatment Value: 100uM ABA vs. No Treatment
  misc_feature: MA Experiment ID: 108579 Result: Up-regulated in Transcription
  misc_feature: MA Experiment 108579 PARAMETER Experiment Name: At_4deg_Cold_cDNA_P Parameter: Temperature (deg C) Value: 4 vs. 22
  misc_feature: MA Experiment 108579 PARAMETER Experiment Name: At_4deg_Cold_cDNA_P Parameter: Timepoint (hr) Value: 6
  misc_feature: MA Experiment 108579 PARAMETER Experiment Name: At_4deg_Cold_cDNA_P Parameter: Tissue Value: Aerial
  misc_feature: MA Experiment ID: 108585 Result: Down-regulated in Transcription
  misc_feature: MA Experiment 108585 PARAMETER Experiment Name: At_5mM_NaNP_cDNA_P Parameter: Timepoint (hr) Value: 6
  misc_feature: MA Experiment 108585 PARAMETER Experiment Name: At_5mM_NaNP_cDNA_P Parameter: Tissue Value: Aerial
  misc_feature: MA Experiment 108585 PARAMETER Experiment Name: At_5mM_NaNP_cDNA_P Parameter: Treatment Value: null
  misc_feature: MA Experiment ID: 108595 Result: Down-regulated in Transcription
  misc_feature: MA Experiment 108595 PARAMETER Experiment Name: At_Ler-pi_Ovule_cDNA_P Parameter: Plant Line Value: null
  misc_feature: MA Experiment ID: 108605 Result: Down-regulated in Transcription
  misc_feature: MA Experiment 108605 PARAMETER Experiment Name: At_100uM_ABA_cDNA_P Parameter: Timepoint (hr) Value: 6
  misc_feature: MA Experiment 108605 PARAMETER Experiment Name: At_100uM_ABA_cDNA_P Parameter: Tissue Value: Aerial
  misc_feature: MA Experiment 108605 PARAMETER Experiment Name: At_100uM_ABA_cDNA_P Parameter: Treatment Value: 100uM ABA vs. No Treatment
  misc_feature: MA Experiment ID: 108607 Result: Down-regulated in Transcription
  misc_feature: MA Experiment 108607 PARAMETER Experiment Name: At_100uM_ABA_cDNA_P Parameter: Timepoint (hr) Value: 4
  misc_feature: MA Experiment 108607 PARAMETER Experiment Name: At_100uM_ABA_cDNA_P Parameter: Tissue Value: Aerial
  misc_feature: MA Experiment 108607 PARAMETER Experiment Name: At_100uM_ABA_cDNA_P Parameter: Treatment Value: 100uM ABA vs. No Treatment
  misc_feature: MA Experiment ID: 108668 Result: Down-regulated in Transcription
  misc_feature: MA Experiment 108668 PARAMETER Experiment Name: At_2mM_SA_cDNA_P Parameter: Plant Line Value: WS
  misc_feature: MA Experiment 108668 PARAMETER Experiment Name: At_2mM_SA_cDNA_P Parameter: Timepoint (hr) Value: 6
  misc_feature: MA Experiment 108668 PARAMETER Experiment Name: At_2mM_SA_cDNA_P Parameter: Treatment Value: 2mM SA vs. No Treatment
  misc_feature: MA Experiment ID: 20000070 Result: Down-regulated in Transcription
  misc_feature: MA Experiment 20000070 PARAMETER Experiment Name: At_100uM_ABA_Mutants_cDNA_P Parameter: Plant Line Value: CS24
  misc_feature: MA Experiment 20000070 PARAMETER Experiment Name: At_100uM_ABA_Mutants_cDNA_P Parameter: Timepoint (hr) Value: 6
  misc_feature: MA Experiment 20000070 PARAMETER Experiment Name: At_100uM_ABA_Mutants_cDNA_P Parameter: Tissue Value: Aerial
  misc_feature: MA Experiment 20000070 PARAMETER Experiment Name: At_100uM_ABA_Mutants_cDNA_P Parameter: Treatment Value: 100uM ABA vs. No Treatment
  misc_feature: MA Experiment ID: 20000071 Result: Down-regulated in Transcription
  misc_feature: MA Experiment 20000071 PARAMETER Experiment Name: At_100uM_ABA_Mutants_cDNA_P Parameter: Plant Line Value: CS8104
  misc_feature: MA Experiment 20000071 PARAMETER Experiment Name: At_100uM_ABA_Mutants_cDNA_P Parameter: Timepoint (hr) Value: 6
  misc_feature: MA Experiment 20000071 PARAMETER Experiment Name: At_100uM_ABA_Mutants_cDNA_P Parameter: Tissue Value: Aerial
  misc_feature: MA Experiment 20000071 PARAMETER Experiment Name: At_100uM_ABA_Mutants_cDNA_P Parameter: Treatment Value: 100uM ABA vs. No Treatment
  misc_feature: MA Experiment ID: 20000072 Result: Down-regulated in Transcription
  misc_feature: MA Experiment 20000072 PARAMETER Experiment Name: At_100uM_ABA_Mutants_cDNA_P Parameter: Plant Line Value: CS8105
  misc_feature: MA Experiment 20000072 PARAMETER Experiment Name: At_100uM_ABA_Mutants_cDNA_P Parameter: Timepoint (hr) Value: 6
  misc_feature: MA Experiment 20000072 PARAMETER Experiment Name: At_100uM_ABA_Mutants_cDNA_P Parameter: Tissue Value: Aerial
  misc_feature: MA Experiment 20000072 PARAMETER Experiment Name: At_100uM_ABA_Mutants_cDNA_P Parameter: Treatment Value: 100uM ABA vs. No Treatment
  misc_feature: MA Experiment ID: 20000087 Result: Down-regulated in Transcription
  misc_feature: MA Experiment 20000087 PARAMETER Experiment Name: At_100uM_ABA_Mutants_cDNA_P Parameter: Plant Line Value: WS
  misc_feature: MA Experiment 20000087 PARAMETER Experiment Name: At_100uM_ABA_Mutants_cDNA_P Parameter: Timepoint (hr) Value: 6
  misc_feature: MA Experiment 20000087 PARAMETER Experiment Name: At_100uM_ABA_Mutants_cDNA_P Parameter: Tissue Value: Aerial
  misc_feature: MA Experiment 20000087 PARAMETER Experiment Name: At_100uM_ABA_Mutants_cDNA_P Parameter: Treatment Value: 100uM ABA vs. No Treatment
  misc_feature: MA Experiment ID: 20000117 Result: Down-regulated in Transcription
  misc_feature: MA Experiment 20000117 PARAMETER Experiment Name: At_100uM_ABA_Mutants_cDNA_P Parameter: Plant Line Value: Columbia
  misc_feature: MA Experiment 20000117 PARAMETER Experiment Name: At_100uM_ABA_Mutants_cDNA_P Parameter: Timepoint (hr) Value: 6
  misc_feature: MA Experiment 20000117 PARAMETER Experiment Name: At_100uM_ABA_Mutants_cDNA_P Parameter: Tissue Value: Aerial
  misc_feature: MA Experiment 20000117 PARAMETER Experiment Name: At_100uM_ABA_Mutants_cDNA_P Parameter: Treatment Value: 100uM ABA vs. No Treatment
  misc_feature: MA Experiment ID: 20000169 Result: Down-regulated in Transcription
  misc_feature: MA Experiment 20000169 PARAMETER Experiment Name: At_100uM_ABA_P Parameter: Age (day) Value: 14
  misc_feature: MA Experiment 20000169 PARAMETER Experiment Name: At_100uM_ABA_P Parameter: Organism Value: A. thaliana
  misc_feature: MA Experiment 20000169 PARAMETER Experiment Name: At_100uM_ABA_P Parameter: Plant Line Value: WS
  misc_feature: MA Experiment 20000169 PARAMETER Experiment Name: At_100uM_ABA_P Parameter: Timepoint (hr) Value: 6
  misc_feature: MA Experiment 20000169 PARAMETER Experiment Name: At_100uM_ABA_P Parameter: Tissue Value: Aerial
  misc_feature: MA Experiment 20000169 PARAMETER Experiment Name: At_100uM_ABA_P Parameter: Treatment Value: 100uM ABA vs. No Treatment
  misc_feature: MA Experiment ID: 20000180 Result: Up-regulated in Transcription
  misc_feature: MA Experiment 20000180 PARAMETER Experiment Name: At_Germinating_Seeds_P Parameter: Age (hr) Value: 24 vs. 0
  misc_feature: MA Experiment 20000180 PARAMETER Experiment Name: At_Germinating_Seeds_P Parameter: Tissue Value: Germinating Seeds
  misc_feature: MA Experiment ID: 20000185 Result: Down-regulated in Transcription
  misc_feature: MA Experiment 20000185 PARAMETER Experiment Name: At_Roots__P Parameter: Age (day) Value: 7 vs. 21
  misc_feature: MA Experiment 20000185 PARAMETER Experiment Name: At_Roots__P Parameter: Organism Value: A. thaliana
  misc_feature: MA Experiment 20000185 PARAMETER Experiment Name: At_Roots__P Parameter: Tissue Value: Roots vs. Whole Plant
  misc_feature: MA Experiment ID: 20000224 Result: Up-regulated in Transcription
  misc_feature: MA Experiment ID: 20000234 Result: Up-regulated in Transcription
  misc_feature: MA Experiment 20000234 PARAMETER Experiment Name: At_Siliques_P Parameter: Age (day) Value: 21
  misc_feature: MA Experiment 20000234 PARAMETER Experiment Name: At_Siliques_P Parameter: Organism Value: A. thaliana
  misc_feature: MA Experiment 20000234 PARAMETER Experiment Name: At_Siliques_P Parameter: Plant Line Value: WS
  misc_feature: MA Experiment 20000234 PARAMETER Experiment Name: At_Siliques_P Parameter: Tissue Value: Less Than 5mm Siliques vs. Whole Plant
  misc_feature: MA Experiment ID: 20000436 Result: Down-regulated in Transcription
  misc_feature: MA Experiment 20000436 PARAMETER Experiment Name: At_Drought_P Parameter: Age (day) Value: 7
  misc_feature: MA Experiment 20000436 PARAMETER Experiment Name: At_Drought_P Parameter: Organism Value: A. thaliana
  misc_feature: MA Experiment 20000436 PARAMETER Experiment Name: At_Drought_P Parameter: Plant Line Value: WS
  misc_feature: MA Experiment 20000436 PARAMETER Experiment Name: At_Drought_P Parameter: Timepoint (hr) Value: 12
  misc_feature: MA Experiment 20000436 PARAMETER Experiment Name: At_Drought_P Parameter: Tissue Value: Whole Plant
  misc_feature: MA Experiment 20000436 PARAMETER Experiment Name: At_Drought_P Parameter: Treatment Value: Drought vs. No Drought
  misc_feature: MA Experiment ID: 20000437 Result: Down-regulated in Transcription
  misc_feature: MA Experiment 20000437 PARAMETER Experiment Name: At_Drought_P Parameter: Age (day) Value: 8
  misc_feature: MA Experiment 20000437 PARAMETER Experiment Name: At_Drought_P Parameter: Organism Value: A. thaliana
  misc_feature: MA Experiment 20000437 PARAMETER Experiment Name: At_Drought_P Parameter: Plant Line Value: WS
  misc_feature: MA Experiment 20000437 PARAMETER Experiment Name: At_Drought_P Parameter: Timepoint (hr) Value: 24
  misc_feature: MA Experiment 20000437 PARAMETER Experiment Name: At_Drought_P Parameter: Tissue Value: Whole Plant
  misc_feature: MA Experiment 20000437 PARAMETER Experiment Name: At_Drought_P Parameter: Treatment Value: Drought vs. No Drought
  misc_feature: MA Experiment ID: 20000439 Result: Down-regulated in Transcription
  misc_feature: MA Experiment 20000439 PARAMETER Experiment Name: At_Roots__P Parameter: Age (day) Value: 14 vs. 21
  misc_feature: MA Experiment 20000439 PARAMETER Experiment Name: At_Roots__P Parameter: Organism Value: A. thaliana
  misc_feature: MA Experiment 20000439 PARAMETER Experiment Name: At_Roots__P Parameter: Tissue Value: Roots vs. Whole Plant
  misc_feature: MA Experiment ID: 20001248 Result: Down-regulated in Transcription
  misc_feature: MA Experiment 20001248 PARAMETER Experiment Name: At_Far-red-induction_P Parameter: Age (day) Value: 7
  misc_feature: MA Experiment 20001248 PARAMETER Experiment Name: At_Far-red-induction_P Parameter: Light Value: Far-red vs. White
  misc_feature: MA Experiment 20001248 PARAMETER Experiment Name: At_Far-red-induction_P Parameter: Organism Value: A. thaliana
  misc_feature: MA Experiment 20001248 PARAMETER Experiment Name: At_Far-red-induction_P Parameter: Plant Line Value: Columbia
  misc_feature: MA Experiment 20001248 PARAMETER Experiment Name: At_Far-red-induction_P Parameter: Timepoint (hr) Value: 4
  misc_feature: MA Experiment 20001248 PARAMETER Experiment Name: At_Far-red-induction_P Parameter: Tissue Value: Whole Plant
  misc_feature: MA Experiment ID: 20001450 Result: Down-regulated in Transcription
  misc_feature: MA Experiment 20001450 PARAMETER Experiment Name: At_Far-red-induction_P Parameter: Age (day) Value: 7
  misc_feature: MA Experiment 20001450 PARAMETER Experiment Name: At_Far-red-induction_P Parameter: Light Value: Far-red vs. White
  misc_feature: MA Experiment 20001450 PARAMETER Experiment Name: At_Far-red-induction_P Parameter: Organism Value: A. thaliana
  misc_feature: MA Experiment 20001450 PARAMETER Experiment Name: At_Far-red-induction_P Parameter: Plant Line Value: Columbia
  misc_feature: MA Experiment 20001450 PARAMETER Experiment Name: At_Far-red-induction_P Parameter: Timepoint (hr) Value: 8
  misc_feature: MA Experiment 20001450 PARAMETER Experiment Name: At_Far-red-induction_P Parameter: Tissue Value: Whole Plant
  misc_feature: MA Experiment ID: 20001458 Result: Up-regulated in Transcription
  misc_feature: MA Experiment 20001458 PARAMETER Experiment Name: At_50mM_NH4NO3_L-to-H_P Parameter: Age (day) Value: Undefined
  misc_feature: MA Experiment 20001458 PARAMETER Experiment Name: At_50mM_NH4NO3_L-to-H_P Parameter: Organism Value: Undefined
  misc_feature: MA Experiment 20001458 PARAMETER Experiment Name: At_50mM_NH4NO3_L-to-H_P Parameter: Plant Line Value: Undefined
  misc_feature: MA Experiment 20001458 PARAMETER Experiment Name: At_50mM_NH4NO3_L-to-H_P Parameter: Timepoint (hr) Value: 2
  misc_feature: MA Experiment 20001458 PARAMETER Experiment Name: At_50mM_NH4NO3_L-to-H_P Parameter: Tissue Value: Siliques
  misc_feature: MA Experiment 20001458 PARAMETER Experiment Name: At_50mM_NH4NO3_L-to-H_P Parameter: Treatment Value: 50mM NH4NO3 vs. 100mM Manitol
  misc_feature: MA Experiment ID: 20001560 Result: Up-regulated in Transcription
  misc_feature: MA Experiment 20001560 PARAMETER Experiment Name: At_Drought_Soil_Dry_P Parameter: Age (day) Value: 28
  misc_feature: MA Experiment 20001560 PARAMETER Experiment Name: At_Drought_Soil_Dry_P Parameter: Organism Value: A. thaliana
  misc_feature: MA Experiment 20001560 PARAMETER Experiment Name: At_Drought_Soil_Dry_P Parameter: Plant Line Value: WS
  misc_feature: MA Experiment 20001560 PARAMETER Experiment Name: At_Drought_Soil_Dry_P Parameter: Post Timepoint (hr) Value: None
  misc_feature: MA Experiment 20001560 PARAMETER Experiment Name: At_Drought_Soil_Dry_P Parameter: Post-Treatment Value: None
  misc_feature: MA Experiment 20001560 PARAMETER Experiment Name: At_Drought_Soil_Dry_P Parameter: Timepoint (day) Value: 14
  misc_feature: MA Experiment 20001560 PARAMETER Experiment Name: At_Drought_Soil_Dry_P Parameter: Treatment Value: Drought vs. No Drought
  misc_feature: MA Experiment ID: 20001757 Result: Up-regulated in Transcription
  misc_feature: MA Experiment 20001757 PARAMETER Experiment Name: At_50mM_NH4NO3_L-to-H_P Parameter: Timepoint (hr) Value: 6
  misc_feature: MA Experiment 20001757 PARAMETER Experiment Name: At_50mM_NH4NO3_L-to-H_P Parameter: Tissue Value: Leaf
  misc_feature: MA Experiment 20001757 PARAMETER Experiment Name: At_50mM_NH4NO3_L-to-H_P Parameter: Treatment Value: 50mM NH4NO3 vs 100mM Mannitol
atatttttgtgattagaaattaggatcttacagaaatctttcaaaaagaaattcataacagttccattttttttggtaagattcataaaaaaattcaagttaaatgcattttataaaaatgtaggaaaaactttcaacaaaaatcgttgagaagaacatacagtatatcttatccactctcttcctcatccacgcggcaaaggcacaaacctctttagaaaaatgtcgtcagcttattgttcctccgccgtggctgtatccgccgcagccaccgcttcctccgccgctacctttaatccattactctcctcccactccaattcccaactcttctatcgctttacaccaaaatccttcaaactcgttgccaattgccctaatccactaatcctccactcaaatatccgccgccaccgcttcttctgcgccgccgaaaccgaagctagttccgccgatgatgaaatccaggcatcagtagaagaagaagaagaggtagaagaagaaggagatgaaggtgaagaagaagtagaggaagaaaaacagacgacgcaagcgagtggtgaagaagggaggctttacgttgggaatttaccttacacaatcacttcttctgagctctctcagatttttggagaagctggaactgtcgtcgatgttcagattgtttatgataaagttactgatagaagcagaggatttggatttgtaacaatgggaagcattgaagaagctaaagaagcgatgcagatgtttaacagctctcaaattggtggtagaacggtgaaagtgaacttcccggaggtgccgagaggcggtgagaacgaagtaatgagaaccaaaatccgtgataataaccggagttatgttgatagtcctcataaggtatatgcaggaaaccttggttggaatctaacctcacaaggtttaaaggatgcatttggtgatcaacctggtgtgcttggtgctaaagttatctatgaaagaaatactgggaggtctagggggtttggtttcatctcgttcgagtcagcggaaaatgttcagtctgctttggctacaatgaatggcgtggaagttgaaggacgagcgctgaggctaaatttggcttcagagagagagaaacccactgtgtctcctccttccgtagaagaaggagaaaccgaggaggccagtctagagagtaacgaggtgctttcgaatgttagtgcatgaagcagcaaaagcacaatagattccggataagtttcagactgatctgctcgaggtgccaaaaatgaaaattttgttgtctttataaatgtgttgttttgttctagtgaggctgaagaagaagacaatatatgagatagaaaacaagagattgtttgtaatttttattgagaatgtttttaatccataaatggtgtaatgtaacaacatatcttgattccagtaaactgcaaatttctg

SEQ ID NO: 29498 - protein, 329 aa, Arabidopsis thaliana
  peptide (1)..(329): Ceres Seq. ID no. 12325320
  misc_feature (221)..(292): Pfam Name: RNA recognition motif. (a.k.a. RRM, RBD, or RNP domain) Pfam Description: RNA recognition motif. (a.k.a. RRM, RBD, or RNP
  misc_feature (4)..(298): Homolog of NCBI NO: 7446358 NR Description: cp31AHv protein - barley
  misc_feature (4)..(298): Homolog of NCBI NO: 7446356 NR Description: Ps16 protein - wheat
  misc_feature (69)..(329): Homolog of NCBI NO: 34394882 NR Description: putative RNA-binding protein
  misc_feature (17)..(329): Homolog of NCBI NO: 7446339 NR Description: probable RNA-binding protein cp33 precursor -
  misc_feature (30)..(283): Homolog of NCBI NO: 100376 NR Description: ribonucleoprotein precursor - common tobacco
  misc_feature (3)..(329): Homolog of NCBI NO: 133249 NR Description: 33 kDa ribonucleoprotein, chloroplast precursor
  misc_feature (1)..(329): Homolog of NCBI NO: 7446342 NR Description: RNA-binding protein precursor, 33K - wood tobacco
  misc_feature (9)..(329): Homolog of NCBI NO: 681912 NR Description: cp33 [Arabidopsis thaliana]
  misc_feature (1)..(329): Homolog of NCBI NO: 17064758 NR Description: ubiquitin / ribosomal protein CEP52 [Arabidopsis
  misc_feature (1)..(329): Homolog of NCBI NO: 15231200 NR Description: chloroplast RNA-binding protein cp33
MSSAYCSSAVAVSAAATASSAATFNPLLSSHSNSQLFYRFTPKSFKLVANCPNPLILHSNIRRHRFFCAAETEASSADDEIQASVEEEEEVEEEGDEGEEEVEEEKQTTQASGEEGRLYVGNLPYTITSSELSQIFGEAGTVVDVQIVYDKVTDRSRGFGFVTMGSIEEAKEAMQMFNSSQIGGRTVKVNFPEVPRGGENEVMRTKIRDNNRSYVDSPHKVYAGNLGWNLTSQGLKDAFGDQPGVLGAKVIYERNTGRSRGFGFISFESAENVQSALATMNGVEVEGRALRLNLASEREKPTVSPPSVEEGETEEASLESNEVLSNVSA

SEQ ID NO: 29499 - protein, 166 aa, Arabidopsis thaliana
  peptide (1)..(166): Ceres Seq. ID no. 12325321
  misc_feature (58)..(129): Pfam Name: RNA recognition motif. (a.k.a. RRM, RBD, or RNP domain) Pfam Description: RNA recognition motif. (a.k.a. RRM, RBD, or RNP
  misc_feature (1)..(135): Homolog of NCBI NO: 7446358 NR Description: cp31AHv protein - barley
  misc_feature (1)..(135): Homolog of NCBI NO: 7446356 NR Description: Ps16 protein - wheat
  misc_feature (1)..(166): Homolog of NCBI NO: 34394882 NR Description: putative RNA-binding protein
  misc_feature (1)..(166): Homolog of NCBI NO: 7446339 NR Description: probable RNA-binding protein cp33 precursor -
  misc_feature (1)..(120): Homolog of NCBI NO: 100376 NR Description: ribonucleoprotein precursor - common tobacco
  misc_feature (1)..(166): Homolog of NCBI NO: 133249 NR Description: 33 kDa ribonucleoprotein, chloroplast precursor
  misc_feature (1)..(166): Homolog of NCBI NO: 7446342 NR Description: RNA-binding protein precursor, 33K - wood tobacco
  misc_feature (1)..(166): Homolog of NCBI NO: 681912 NR Description: cp33 [Arabidopsis thaliana]
  misc_feature (1)..(166): Homolog of NCBI NO: 17064758 NR Description: ubiquitin / ribosomal protein CEP52 [Arabidopsis
  misc_feature (1)..(166): Homolog of NCBI NO: 15231200 NR Description: chloroplast RNA-binding protein cp33
MGSIEEAKEAMQMFNSSQIGGRTVKVNFPEVPRGGENEVMRTKIRDNNRSYVDSPHKVYAGNLGWNLTSQGLKDAFGDQPGVLGAKVIYERNTGRSRGFGFISFESAENVQSALATMNGVEVEGRALRLNLASEREKPTVSPPSVEEGETEEASLESNEVLSNVSA

SEQ ID NO: 29500 - DNA, 836 bp, Arabidopsis thaliana
  misc_feature (1)..(836): Ceres Seq. ID no. 12738757
  misc_feature: MA Experiment ID: 108434 Result: Up-regulated in Transcription
  misc_feature: MA Experiment 108434 PARAMETER Experiment Name: At_Root_Tips_cDNA_P Parameter: Tissue Value: Root Tips
  misc_feature: MA Experiment ID: 108595 Result: Down-regulated in Transcription
  misc_feature: MA Experiment 108595 PARAMETER Experiment Name: At_Ler-pi_Ovule_cDNA_P Parameter: Plant Line Value: null
  misc_feature: MA Experiment ID: 20000179 Result: Up-regulated in Transcription
  misc_feature: MA Experiment 20000179 PARAMETER Experiment Name: At_Germinating_Seeds_P Parameter: Age (hr) Value: 6 vs. 0
  misc_feature: MA Experiment 20000179 PARAMETER Experiment Name: At_Germinating_Seeds_P Parameter: Tissue Value: Germinating Seeds
  misc_feature: MA Experiment ID: 20000180 Result: Up-regulated in Transcription
  misc_feature: MA Experiment 20000180 PARAMETER Experiment Name: At_Germinating_Seeds_P Parameter: Age (hr) Value: 24 vs. 0
  misc_feature: MA Experiment 20000180 PARAMETER Experiment Name: At_Germinating_Seeds_P Parameter: Tissue Value: Germinating Seeds
aagctctcatcttcttcagcacaaaaagccatctcaaaggtatattttgaatcaaaaacaatggcagggactaatgattcttgtcctttggtaaagaacattcttcttctagactctgaaggaaagcgtgtggctgtcaagtactactcagatgattggacaactaatgcttccaagttagcttttgaaaaatatgtcttctcgaaaacctccaagaccaatgctcgcacagaagctgaaatcacactgttggagagtaatattgttgtctataagtttgcccaggacctgcatttctttgttactggaggtgaaaatgaaaacgagctcgtcttatcatctgttcttcaaggcttttttgatgctgttgcattacttctgaggaacaatgttgaaaagatggaagcccttgaaaacttgtatctcatctttttgtgccttgatgagatggttgatcaagggatggtacttgaaacagacgcgaatgttattgcggggaaagtagcaatgcaaagcgcagaagcaagtggttcgctctctgaacagacattaactcaagcattggcaacagctcgggagcaccttgcgagaagtcttcttacataattttcatcgtgggtgcgaaatgatatattcataagcccttgtaaccaaccatatctgaaatggttacccgttcactagaaatcaacccctattgacttaactatctcatgactttgttttcttatgtttttttggtggaacgtagatcttttattcgcctgttcttgcggaaccatctttttaaatgtgaggatcaacattgcactagtgattgattgctttacatatcg

SEQ ID NO: 29501 - protein, 201 aa, Arabidopsis thaliana
  peptide (1)..(201): Ceres Seq. ID no. 12738758
  misc_feature (30)..(174): Pfam Name: Clathrin adaptor complex small chain Pfam Description: Clathrin adaptor complex small chain
  misc_feature (26)..(200): Homolog of NCBI NO: 7259352 NR Description: nonclathrin coat protein zeta1-COP [Lycopersicon
  misc_feature (26)..(185): Homolog of NCBI NO: 6681338 NR Description: putative coatomer zeta subunit (zeta-coat
  misc_feature (26)..(201): Homolog of NCBI NO: 30681014 NR Description: coatomer zeta subunit (zeta-coat protein)
  misc_feature (23)..(201): Homolog of NCBI NO: 7259346 NR Description: nonclathrin coat protein zeta1-COP [Brassica rapa]
  misc_feature (21)..(201): Homolog of NCBI NO: 18491175 NR Description: putative coatomer protein [Arabidopsis thaliana]
  misc_feature (21)..(201): Homolog of NCBI NO: 18413126 NR Description: putative coatomer protein
  misc_feature (21)..(201): Homolog of NCBI NO: 21553419 NR Description: putative coatomer protein [Arabidopsis thaliana]
KLSSSSAQKAISKVYFESKTMAGTNDSCPLVKNILLLDSEGKRVAVKYYSDDWTTNASKLAFEKYVFSKTSKTNARTEAEITLLESNIVVYKFAQDLHFFVTGGENENELVLSSVLQGFFDAVALLLRNNVEKMEALENLYLIFLCLDEMVDQGMVLETDANVIAGKVAMQSAEASGSLSEQTLTQALATAREHLARSLLT

SEQ ID NO: 29502 - protein, 181 aa, Arabidopsis thaliana
  peptide (1)..(181): Ceres Seq. ID no. 12738759
  misc_feature (10)..(154): Pfam Name: Clathrin adaptor complex small chain Pfam Description: Clathrin adaptor complex small chain
  misc_feature (6)..(180): Homolog of NCBI NO: 7259352 NR Description: nonclathrin coat protein zeta1-COP [Lycopersicon
  misc_feature (6)..(165): Homolog of NCBI NO: 6681338 NR Description: putative coatomer zeta subunit (zeta-coat
  misc_feature (6)..(181): Homolog of NCBI NO: 30681014 NR Description: coatomer zeta subunit (zeta-coat protein)
  misc_feature (3)..(181): Homolog of NCBI NO: 7259346 NR Description: nonclathrin coat protein zeta1-COP [Brassica rapa]
  misc_feature (1)..(181): Homolog of NCBI NO: 18491175 NR Description: putative coatomer protein [Arabidopsis thaliana]
  misc_feature (1)..(181): Homolog of NCBI NO: 18413126 NR Description: putative coatomer protein
  misc_feature (1)..(181): Homolog of NCBI NO: 21553419 NR Description: putative coatomer protein [Arabidopsis thaliana]
MAGTNDSCPLVKNILLLDSEGKRVAVKYYSDDWTTNASKLAFEKYVFSKTSKTNARTEAEITLLESNIVVYKFAQDLHFFVTGGENENELVLSSVLQGFFDAVALLLRNNVEKMEALENLYLIFLCLDEMVDQGMVLETDANVIAGKVAMQSAEASGSLSEQTLTQALATAREHLARSLLT

SEQ ID NO: 29503 - DNA, 607 bp, Arabidopsis thaliana
  misc_feature (1)..(607): Ceres Seq. ID no. 12333324
  misc_feature: MA Experiment ID: 20001451 Result: Up-regulated in Transcription
  misc_feature: MA Experiment 20001451 PARAMETER Experiment Name: At_Far-red-induction_P Parameter: Age (day) Value: 7
  misc_feature: MA Experiment 20001451 PARAMETER Experiment Name: At_Far-red-induction_P Parameter: Light Value: Far-red vs. White
  misc_feature: MA Experiment 20001451 PARAMETER Experiment Name: At_Far-red-induction_P Parameter: Organism Value: A. thaliana
  misc_feature: MA Experiment 20001451 PARAMETER Experiment Name: At_Far-red-induction_P Parameter: Plant Line Value: Columbia
  misc_feature: MA Experiment 20001451 PARAMETER Experiment Name: At_Far-red-induction_P Parameter: Timepoint (hr) Value: 24
  misc_feature: MA Experiment 20001451 PARAMETER Experiment Name: At_Far-red-induction_P Parameter: Tissue Value: Whole Plant
acgccgagatgagttatcttctgaagacgttaacgacgaagaaagagattgatcgggttatcagagacaccattgatgaagttcttgttttacgatttggtcgttcctccgacgccgtttgtcttcagcatgatgaaatccttgcgaaatcggtgagagatgtttcgaaatttgctaaggtagctttggttgatgttgattcagaggatgttcaagtgtatgtgaagtattttgatatcacgttgtttccttcgacgatcttcttcttcaatgcgcatcatatgaaattggattctggaactgcggatcatactaaatgggttggtgcatttcatataaaacaagactttattgatgttgttgaggctatatatcgaggagcaatgaaagggaagatgattgttcaatgtccaataccgccagagaggataccaaagtaccagctcttgtacaaggatgtgtagacactaaagtttgttgtgcttacaatgcaaaatctgtttctcatcttctgtgttggcaataatatttacatttgacattttgagatttacagttatgtttttgtacacagttgaagaatgagaataaatatgcagatttttcg

SEQ ID NO: 29504 - protein, 153 aa, Arabidopsis thaliana
  peptide (1)..(153): Ceres Seq. ID no. 12333325
  misc_feature (3)..(137): Homolog of NCBI NO: 21537271 NR Description: putative thioredoxin-like U5 small
  misc_feature (3)..(137): Homolog of NCBI NO: 15241574 NR Description: putative protein
  misc_feature (3)..(137): Homolog of NCBI NO: 37535532 NR Description: putative thioredoxin-like U5 small
  misc_feature (3)..(153): Homolog of NCBI NO: 28316734 NR Description: RIKEN cDNA D530025J19 gene
  misc_feature (3)..(153): Homolog of NCBI NO: 27659170 NR Description: similar to hypothetical protein FLJ20511
  misc_feature (3)..(153): Homolog of NCBI NO: 8923475 NR Description: hypothetical protein FLJ20511 [Homo sapiens]
  misc_feature (1)..(153): Homolog of NCBI NO: 15230169 NR Description: hypothetical protein; protein id: At3g24730.1
AEMSYLLKTLTTKKEIDRVIRDTIDEVLVLRFGRSSDAVCLQHDEILAKSVRDVSKFAKVALVDVDSEDVQVYVKYFDITLFPSTIFFFNAHHMKLDSGTADHTKWVGAFHIKQDFIDVVEAIYRGAMKGKMIVQCPIPPERIPKYQLLYKDV

SEQ ID NO: 29505 - protein, 151 aa, Arabidopsis thaliana
  peptide (1)..(151): Ceres Seq. ID no. 12333326
  misc_feature (1)..(135): Homolog of NCBI NO: 21537271 NR Description: putative thioredoxin-like U5 small
  misc_feature (1)..(135): Homolog of NCBI NO: 15241574 NR Description: putative protein
  misc_feature (1)..(135): Homolog of NCBI NO: 37535532 NR Description: putative thioredoxin-like U5 small
  misc_feature (1)..(151): Homolog of NCBI NO: 28316734 NR Description: RIKEN cDNA D530025J19 gene
  misc_feature (1)..(151): Homolog of NCBI NO: 27659170 NR Description: similar to hypothetical protein FLJ20511
  misc_feature (1)..(151): Homolog of NCBI NO: 8923475 NR Description: hypothetical protein FLJ20511 [Homo sapiens]
  misc_feature (1)..(151): Homolog of NCBI NO: 15230169 NR Description: hypothetical protein; protein id: At3g24730.1
MSYLLKTLTTKKEIDRVIRDTIDEVLVLRFGRSSDAVCLQHDEILAKSVRDVSKFAKVALVDVDSEDVQVYVKYFDITLFPSTIFFFNAHHMKLDSGTADHTKWVGAFHIKQDFIDVVEAIYRGAMKGKMIVQCPIPPERIPKYQLLYKDV

SEQ ID NO: 29506 - DNA, 628 bp, Arabidopsis thaliana
  misc_feature (1)..(628): Ceres Seq. ID no. 12420685
  misc_feature: MA Experiment ID: 20000173 Result: Down-regulated in Transcription
  misc_feature: MA Experiment 20000173 PARAMETER Experiment Name: At_42deg_Heat_P Parameter: Age (day) Value: 14
  misc_feature: MA Experiment 20000173 PARAMETER Experiment Name: At_42deg_Heat_P Parameter: Organism Value: A. thaliana
  misc_feature: MA Experiment 20000173 PARAMETER Experiment Name: At_42deg_Heat_P Parameter: Plant Line Value: WS
  misc_feature: MA Experiment 20000173 PARAMETER Experiment Name: At_42deg_Heat_P Parameter: Temperature (deg C) Value: 42 vs. 22
  misc_feature: MA Experiment 20000173 PARAMETER Experiment Name: At_42deg_Heat_P Parameter: Timepoint (hr) Value: 6
  misc_feature: MA Experiment 20000173 PARAMETER Experiment Name: At_42deg_Heat_P Parameter: Tissue Value: Aerial
  misc_feature: MA Experiment ID: 20000180 Result: Down-regulated in Transcription
  misc_feature: MA Experiment 20000180 PARAMETER Experiment Name: At_Germinating_Seeds_P Parameter: Age (hr) Value: 24 vs. 0
  misc_feature: MA Experiment 20000180 PARAMETER Experiment Name: At_Germinating_Seeds_P Parameter: Tissue Value: Germinating Seeds
  misc_feature: MA Experiment ID: 20000224 Result: Down-regulated in Transcription
aaaacagggctaagaggagcttccgcagcagtagctggattcatcaaatcctcaataccgatccgacccatttcctccatggacagttccgacaaagattcatcttccaccaccaccaccagcgaaactgcccgacgtttcgttccgctttcatcggtggtttctgattgtgcgaagcggtggtttaaagacactcttgaggaagctaaagctgggaacatcactatgcaggttttgttaggtcagatgtattactctgggtatggagtccctaaggatgctaaaaaggggagactttggattacgaaagcatcaagagttcgttcttcagtgtggaaagtgatagataaacgaccaggttacaacgcaagtgattcagattcagagtctgattagcatgtcctgatcgagagagcttgtgtttgttctgttttgtttcaatcttggatgatccaagttccaacaatgaacaatatcttctctctgcgcatatcttttgatgcttgctaatcattttgtagctctattactcaaatatgtcttctttttttattttgtttaaattttggtgaatgcctttgctcacagtgtatgattattctagcaatgaaaaggagttaaaaaaggt

SEQ ID NO: 29507 - protein, 131 aa, Arabidopsis thaliana
  peptide (1)..(131): Ceres Seq. ID no. 12420686
  misc_feature (48)..(115): Homolog of NCBI NO: 10176748 NR Description: gene_id:K18I23.16~pir||T02500~similar to unknown
  misc_feature (48)..(128): Homolog of NCBI NO: 30680897 NR Description: expressed protein [Arabidopsis thaliana]
  misc_feature (48)..(128): Homolog of NCBI NO: 28393833 NR Description: unknown protein [Arabidopsis thaliana]
  misc_feature (1)..(131): Homolog of NCBI NO: 7452461 NR Description: hypothetical protein At2g38450 [imported] -
  misc_feature (27)..(131): Homolog of NCBI NO: 18404754 NR Description: expressed protein
  misc_feature (27)..(131): Homolog of NCBI NO: 21553434 NR Description: unknown [Arabidopsis thaliana]
KTGLRGASAAVAGFIKSSIPIRPISSMDSSDKDSSSTTTTSETARRFVPLSSVVSDCAKRWFKDTLEEAKAGNITMQVLLGQMYYSGYGVPKDAKKGRLWITKASRVRSSVWKVIDKRPGYNASDSDSESD

SEQ ID NO: 29508 - protein, 105 aa, Arabidopsis thaliana
  peptide (1)..(105): Ceres Seq. ID no. 12420687
  misc_feature (22)..(89): Homolog of NCBI NO: 10176748 NR Description: gene_id:K18I23.16~pir||T02500~similar to unknown
  misc_feature (22)..(102): Homolog of NCBI NO: 30680897 NR Description: expressed protein [Arabidopsis thaliana]
  misc_feature (22)..(102): Homolog of NCBI NO: 28393833 NR Description: unknown protein [Arabidopsis thaliana]
  misc_feature (1)..(105): Homolog of NCBI NO: 7452461 NR Description: hypothetical protein At2g38450 [imported] -
  misc_feature (1)..(105): Homolog of NCBI NO: 18404754 NR Description: expressed protein
  misc_feature (1)..(105): Homolog of NCBI NO: 21553434 NR Description: unknown [Arabidopsis thaliana]
MDSSDKDSSSTTTTSETARRFVPLSSVVSDCAKRWFKDTLEEAKAGNITMQVLLGQMYYSGYGVPKDAKKGRLWITKASRVRSSVWKVIDKRPGYNASDSDSESD

SEQ ID NO: 29509 - DNA, 1110 bp, Arabidopsis thaliana
  misc_feature (1)..(1110): Ceres Seq. ID no. 13491279
  misc_feature: MA Experiment ID: 108488 Result: Down-regulated in Transcription
  misc_feature: MA Experiment ID: 108561 Result: Up-regulated in Transcription
  misc_feature: MA Experiment 108561 PARAMETER Experiment Name: At_100uM_ABA_cDNA_P Parameter: Timepoint (hr) Value: 6
  misc_feature: MA Experiment 108561 PARAMETER Experiment Name: At_100uM_ABA_cDNA_P Parameter: Tissue Value: Aerial
  misc_feature: MA Experiment 108561 PARAMETER Experiment Name: At_100uM_ABA_cDNA_P Parameter: Treatment Value: 100uM ABA vs. No Treatment
  misc_feature: MA Experiment ID: 108573 Result: Up-regulated in Transcription
  misc_feature: MA Experiment 108573 PARAMETER Experiment Name: At_Drought_cDNA_P Parameter: Timepoint (hr) Value: 6
  misc_feature: MA Experiment 108573 PARAMETER Experiment Name: At_Drought_cDNA_P Parameter: Tissue Value: Aerial
  misc_feature: MA Experiment 108573 PARAMETER Experiment Name: At_Drought_cDNA_P Parameter: Treatment Value: Drought vs. No Drought
  misc_feature: MA Experiment ID: 108585 Result: Up-regulated in Transcription
  misc_feature: MA Experiment 108585 PARAMETER Experiment Name: At_5mM_NaNP_cDNA_P Parameter: Timepoint (hr) Value: 6
  misc_feature: MA Experiment 108585 PARAMETER Experiment Name: At_5mM_NaNP_cDNA_P Parameter: Tissue Value: Aerial
  misc_feature: MA Experiment 108585 PARAMETER Experiment Name: At_5mM_NaNP_cDNA_P Parameter: Treatment Value: null
  misc_feature: MA Experiment ID: 108609 Result: Up-regulated in Transcription
  misc_feature: MA Experiment 108609 PARAMETER Experiment Name: At_100uM_ABA_cDNA_P Parameter: Timepoint (hr) Value: 24
  misc_feature: MA Experiment 108609 PARAMETER Experiment Name: At_100uM_ABA_cDNA_P Parameter: Tissue Value: Aerial
  misc_feature: MA Experiment 108609 PARAMETER Experiment Name: At_100uM_ABA_cDNA_P Parameter: Treatment Value: 100uM ABA vs. No Treatment
  misc_feature: MA Experiment ID: 20000069 Result: Up-regulated in Transcription
  misc_feature: MA Experiment 20000069 PARAMETER Experiment Name: At_100uM_ABA_Mutants_cDNA_P Parameter: Plant Line Value: CS23
  misc_feature: MA Experiment 20000069 PARAMETER Experiment Name: At_100uM_ABA_Mutants_cDNA_P Parameter: Timepoint (hr) Value: 6
  misc_feature: MA Experiment 20000069 PARAMETER Experiment Name: At_100uM_ABA_Mutants_cDNA_P Parameter: Tissue Value: Aerial
  misc_feature: MA Experiment 20000069 PARAMETER Experiment Name: At_100uM_ABA_Mutants_cDNA_P Parameter: Treatment Value: 100uM ABA vs. No Treatment
  misc_feature: MA Experiment ID: 20000087 Result: Up-regulated in Transcription
  misc_feature: MA Experiment 20000087 PARAMETER Experiment Name: At_100uM_ABA_Mutants_cDNA_P Parameter: Plant Line Value: WS
  misc_feature: MA Experiment 20000087 PARAMETER Experiment Name: At_100uM_ABA_Mutants_cDNA_P Parameter: Timepoint (hr) Value: 6
  misc_feature: MA Experiment 20000087 PARAMETER Experiment Name: At_100uM_ABA_Mutants_cDNA_P Parameter: Tissue Value: Aerial
  misc_feature: MA Experiment 20000087 PARAMETER Experiment Name: At_100uM_ABA_Mutants_cDNA_P Parameter: Treatment Value: 100uM ABA vs. No Treatment
  misc_feature: MA Experiment ID: 20000112 Result: Up-regulated in Transcription
  misc_feature: MA Experiment 20000112 PARAMETER Experiment Name: At_42deg_Heat_cDNA_P Parameter: Temperature (deg C) Value: 42 vs. 22
  misc_feature: MA Experiment 20000112 PARAMETER Experiment Name: At_42deg_Heat_cDNA_P Parameter: Timepoint (hr) Value: 2
  misc_feature: MA Experiment 20000112 PARAMETER Experiment Name: At_42deg_Heat_cDNA_P Parameter: Tissue Value: Aerial
  misc_feature: MA Experiment ID: 20000113 Result: Up-regulated in Transcription
  misc_feature: MA Experiment 20000113 PARAMETER Experiment Name: At_42deg_Heat_cDNA_P Parameter: Temperature (deg C) Value: 42 vs. 22
  misc_feature: MA Experiment 20000113 PARAMETER Experiment Name: At_42deg_Heat_cDNA_P Parameter: Timepoint (hr) Value: 8
  misc_feature: MA Experiment 20000113 PARAMETER Experiment Name: At_42deg_Heat_cDNA_P Parameter: Tissue Value: Aerial
  misc_feature: MA Experiment ID: 20000117 Result: Up-regulated in Transcription
  misc_feature: MA Experiment 20000117 PARAMETER Experiment Name: At_100uM_ABA_Mutants_cDNA_P Parameter: Plant Line Value: Columbia
  misc_feature: MA Experiment 20000117 PARAMETER Experiment Name: At_100uM_ABA_Mutants_cDNA_P Parameter: Timepoint (hr) Value: 6
  misc_feature: MA Experiment 20000117 PARAMETER Experiment Name: At_100uM_ABA_Mutants_cDNA_P Parameter: Tissue Value: Aerial
  misc_feature: MA Experiment 20000117 PARAMETER Experiment Name: At_100uM_ABA_Mutants_cDNA_P Parameter: Treatment Value: 100uM ABA vs. No Treatment
  misc_feature: MA Experiment ID: 20000173 Result: Up-regulated in Transcription
  misc_feature: MA Experiment 20000173 PARAMETER Experiment Name: At_42deg_Heat_P Parameter: Age (day) Value: 14
  misc_feature: MA Experiment 20000173 PARAMETER Experiment Name: At_42deg_Heat_P Parameter: Organism Value: A. thaliana
  misc_feature: MA Experiment 20000173 PARAMETER Experiment Name: At_42deg_Heat_P Parameter: Plant Line Value: WS
  misc_feature: MA Experiment 20000173 PARAMETER Experiment Name: At_42deg_Heat_P Parameter: Temperature (deg C) Value: 42 vs. 22
  misc_feature: MA Experiment 20000173 PARAMETER Experiment Name: At_42deg_Heat_P Parameter: Timepoint (hr) Value: 6
  misc_feature: MA Experiment 20000173 PARAMETER Experiment Name: At_42deg_Heat_P Parameter: Tissue Value: Aerial
  misc_feature: MA Experiment ID: 20000185 Result: Up-regulated in Transcription
  misc_feature: MA Experiment 20000185 PARAMETER Experiment Name: At_Roots__P Parameter: Age (day) Value: 7 vs. 21
  misc_feature: MA Experiment 20000185 PARAMETER Experiment Name: At_Roots__P Parameter: Organism Value: A. thaliana
  misc_feature: MA Experiment 20000185 PARAMETER Experiment Name: At_Roots__P Parameter: Tissue Value: Roots vs. Whole Plant
  misc_feature: MA Experiment ID: 20000264 Result: Up-regulated in Transcription
  misc_feature: MA Experiment 20000264 PARAMETER Experiment Name: At_Open_Flower_P Parameter: Age (day) Value: 21
  misc_feature: MA Experiment 20000264 PARAMETER Experiment Name: At_Open_Flower_P Parameter: Plant Line Value: WS
  misc_feature: MA Experiment 20000264 PARAMETER Experiment Name: At_Open_Flower_P Parameter: Tissue Value: Open Flower vs. Whole Plant
  misc_feature: MA Experiment ID: 20000286 Result: Up-regulated in Transcription
  misc_feature: MA Experiment 20000286 PARAMETER Experiment Name: At_Open_Flower_P Parameter: Age (day) Value: 21
  misc_feature: MA Experiment 20000286 PARAMETER Experiment Name: At_Open_Flower_P Parameter: Plant Line Value: WS
  misc_feature: MA Experiment 20000286 PARAMETER Experiment Name: At_Open_Flower_P Parameter: Tissue Value: Half Open vs. Whole Plant
  misc_feature: MA Experiment ID: 20000437 Result: Up-regulated in Transcription
  misc_feature: MA Experiment 20000437 PARAMETER Experiment Name: At_Drought_P Parameter: Age (day) Value: 8
  misc_feature: MA Experiment 20000437 PARAMETER Experiment Name: At_Drought_P Parameter: Organism Value: A. thaliana
  misc_feature: MA Experiment 20000437 PARAMETER Experiment Name: At_Drought_P Parameter: Plant Line Value: WS
  misc_feature: MA Experiment 20000437 PARAMETER Experiment Name: At_Drought_P Parameter: Timepoint (hr) Value: 24
  misc_feature: MA Experiment 20000437 PARAMETER Experiment Name: At_Drought_P Parameter: Tissue Value: Whole Plant
  misc_feature: MA Experiment 20000437 PARAMETER Experiment Name: At_Drought_P Parameter: Treatment Value: Drought vs. No Drought
  misc_feature: MA Experiment ID: 20000439 Result: Up-regulated in Transcription
  misc_feature: MA Experiment 20000439 PARAMETER Experiment Name: At_Roots__P Parameter: Age (day) Value: 14 vs. 21
  misc_feature: MA Experiment 20000439 PARAMETER Experiment Name: At_Roots__P Parameter: Organism Value: A. thaliana
  misc_feature: MA Experiment 20000439 PARAMETER Experiment Name: At_Roots__P Parameter: Tissue Value: Roots vs. Whole Plant
  misc_feature: MA Experiment ID: 20000453 Result: Up-regulated in Transcription
  misc_feature: MA Experiment 20000453 PARAMETER Experiment Name: At_100uM_ABA_P Parameter: Age (day) Value: 15
  misc_feature: MA Experiment 20000453 PARAMETER Experiment Name: At_100uM_ABA_P Parameter: Organism Value: A. thaliana
  misc_feature: MA Experiment 20000453 PARAMETER Experiment Name: At_100uM_ABA_P Parameter: Plant Line Value: WS
  misc_feature: MA Experiment 20000453 PARAMETER Experiment Name: At_100uM_ABA_P Parameter: Timepoint (hr) Value: 24
  misc_feature: MA Experiment 20000453 PARAMETER Experiment Name: At_100uM_ABA_P Parameter: Tissue Value: Aerial
  misc_feature: MA Experiment 20000453 PARAMETER Experiment Name: At_100uM_ABA_P Parameter: Treatment Value: 100uM ABA vs. No Treatment
  misc_feature: MA Experiment ID: 20000527 Result: Down-regulated in Transcription
  misc_feature: MA Experiment 20000527 PARAMETER Experiment Name: At_10percent_PEG_P Parameter: Age (day) Value: 20
  misc_feature: MA Experiment 20000527 PARAMETER Experiment Name: At_10percent_PEG_P Parameter: Organism Value: A. thaliana
  misc_feature: MA Experiment 20000527 PARAMETER Experiment Name: At_10percent_PEG_P Parameter: Plant Line Value: WS
  misc_feature: MA Experiment 20000527 PARAMETER Experiment Name: At_10percent_PEG_P Parameter: Timepoint (day) Value: 20
  misc_feature: MA Experiment 20000527 PARAMETER Experiment Name: At_10percent_PEG_P Parameter: Tissue Value: Whole Plant
  misc_feature: MA Experiment 20000527 PARAMETER Experiment Name: At_10percent_PEG_P Parameter: Treatment Value: 10percent PEG vs. No Treatment
  misc_feature: MA Experiment ID: 20000794 Result: Up-regulated in Transcription
  misc_feature: MA Experiment 20000794 PARAMETER Experiment Name: At_Petals_P Parameter: Age (day) Value: 23-25 days
  misc_feature: MA Experiment 20000794 PARAMETER Experiment Name: At_Petals_P Parameter: Plant Line Value: WS
  misc_feature: MA Experiment 20000794 PARAMETER Experiment Name: At_Petals_P Parameter: Tissue Value: Petals vs. Whole plant
  misc_feature: MA Experiment ID: 20001905 Result: Up-regulated in Transcription
  misc_feature: MA Experiment 20001905 PARAMETER Experiment Name: At_Drought_Reproduction_P Parameter: Age (day) Value: 40
  misc_feature: MA Experiment 20001905 PARAMETER Experiment Name: At_Drought_Reproduction_P Parameter: Organism Value: A. thaliana
  misc_feature: MA Experiment 20001905 PARAMETER Experiment Name: At_Drought_Reproduction_P Parameter: Plant Line Value: WS
  misc_feature: MA Experiment 20001905 PARAMETER Experiment Name: At_Drought_Reproduction_P Parameter: Timepoint (day) Value: 10
  misc_feature: MA Experiment 20001905 PARAMETER Experiment Name: At_Drought_Reproduction_P Parameter: Tissue Value: Rosettes
  misc_feature: MA Experiment 20001905 PARAMETER Experiment Name: At_Drought_Reproduction_P Parameter: Treatment Value: Drought vs. No Drought
  misc_feature: MA Experiment ID: 20001908 Result: Up-regulated in Transcription
  misc_feature: MA Experiment 20001908 PARAMETER Experiment Name: At_Drought_Reproduction_P Parameter: Age (day) Value: 40
  misc_feature: MA Experiment 20001908 PARAMETER Experiment Name: At_Drought_Reproduction_P Parameter: Organism Value: A. thaliana
  misc_feature: MA Experiment 20001908 PARAMETER Experiment Name: At_Drought_Reproduction_P Parameter: Plant Line Value: WS
  misc_feature: MA Experiment 20001908 PARAMETER Experiment Name: At_Drought_Reproduction_P Parameter: Timepoint (day) Value: 10
  misc_feature: MA Experiment 20001908 PARAMETER Experiment Name: At_Drought_Reproduction_P Parameter: Tissue Value: Siliques
  misc_feature: MA Experiment 20001908 PARAMETER Experiment Name: At_Drought_Reproduction_P Parameter: Treatment Value: Drought vs. No Drought
agatttctccgaggaaaaaaatggcgtctggtttgatcggaagattggttggaacgaaaccgtcgaaattagccacggcggcgaggttaattccggcgagatggacctctacaggagcggaggcggaaacaaaagcttcctctggcggcggaagaggatcgaacttgaagacttttcagatctatcgatggaatccagataatccagggaagccagagcttcaaaattaccagatcgatctcaaagattgtggtccaatggtattagatgctttgattaagatcaaaaacgaaatggatccatctcttactttccgtagatcatgccgtgaagggatctgtggttcatgtgctatgaacattgatggatgtaacggacttgcttgtttgacaaagattcaagatgaagcatcggagacgacgattacaccgttgcctcatatgtttgtgattaaggatttggttgttgatatgactaatttttataatcagtataagagtattgagccgtggttgaagaggaagactccagcgtctgttcctgctaaggagattttgcagagtaagaaggatagagctaagcttgatgggatgtatgaatgtattctttgtgcttgttgtagcacatcttgtcctagttactggtggaatcctgagtcttaccttggtccagctgctttgctacacgctaataggtggataagcgacagtcgtgatgagtacactaaggaaagacttgaggctattgacgacgagttcaagctttaccgttgccatacaatcttgaattgtgctcgtgcctgtccaaagggtttgaacccaggaaaacagattactcacatcaagcaacttcagcgttgaaacagctaagtttgtgtgcgggatccgttgggaaactcatcagtcttaacgtttgaagctaataatcttcacaaaacctcttcggattttcaattcattcttgtattgttgttgccaaatattagcgccttaaaaaaactcgtttgcaagtcttcccaagtagatgagctttgtggttgtatcttgctgaaaatctcctctttaagtaataaaactcgagtaaacttaaacctcatctacttatcatctg

SEQ ID NO: 29510 - protein, 285 aa, Arabidopsis thaliana
  peptide (1)..(285): Ceres Seq. ID no. 13491280
  misc_feature (69)..(133): Pfam Name: 2Fe-2S iron-sulfur cluster binding domain Pfam Description: 2Fe-2S iron-sulfur cluster binding domain
  misc_feature (7)..(283): Homolog of NCBI NO: 3851612 NR Description: succinate dehydrogenase Ip subunit [Gallus gallus]
  misc_feature (7)..(284): Homolog of NCBI NO: 4803711 NR Description: iron sulfur subunit of succinate dehydrogenase
  misc_feature (24)..(284): Homolog of NCBI NO: 5688947 NR Description: succinate dehydrogenase iron-protein subunit
  misc_feature (24)..(284): Homolog of NCBI NO: 28611029 NR Description: succinate dehydrogenase [Triticum aestivum]
  misc_feature (7)..(285): Homolog of NCBI NO: 12049600 NR Description: mitochondrial succinate dehydrogenase
  misc_feature (7)..(285): Homolog of NCBI NO: 15237464 NR Description: succinate dehydrogenase, iron-sulphur subunit,
  misc_feature (7)..(285): Homolog of NCBI NO: 21593098 NR Description: succinate dehydrogenase iron-protein subunit-like
  misc_feature (7)..(285): Homolog of NCBI NO: 21555840 NR Description: succinate dehydrogenase iron-protein subunit,
  misc_feature (7)..(285): Homolog of NCBI NO: 12049598 NR Description: mitochondrial succinate dehydrogenase
  misc_feature (7)..(285): Homolog of NCBI NO: 15232149 NR Description: succinate dehydrogenase, iron-sulphur subunit,
ISPRKKMASGLIGRLVGTKPSKLATAARLIPARWTSTGAEAETKASSGGGRGSNLKTFQIYRWNPDNPGKPELQNYQIDLKDCGPMVLDALIKIKNEMDPSLTFRRSCREGICGSCAMNIDGCNGLACLTKIQDEASETTITPLPHMFVIKDLVVDMTNFYNQYKSIEPWLKRKTPASVPAKEILQSKKDRAKLDGMYECILCACCSTSCPSYWWNPESYLGPAALLHANRWISDSRDEYTKERLEAIDDEFKLYRCHTILNCARACPKGLNPGKQITHIKQLQR

SEQ ID NO: 29511 - protein, 279 aa, Arabidopsis thaliana
  peptide (1)..(279): Ceres Seq. ID no. 13491281
  misc_feature (63)..(127): Pfam Name: 2Fe-2S iron-sulfur cluster binding domain Pfam Description: 2Fe-2S iron-sulfur cluster binding domain
  misc_feature (1)..(277): Homolog of NCBI NO: 3851612 NR Description: succinate dehydrogenase Ip subunit [Gallus gallus]
  misc_feature (1)..(278): Homolog of NCBI NO: 4803711 NR Description: iron sulfur subunit of succinate dehydrogenase
  misc_feature (18)..(278): Homolog of NCBI NO: 5688947 NR Description: succinate dehydrogenase iron-protein subunit
  misc_feature (18)..(278): Homolog of NCBI NO: 28611029 NR Description: succinate dehydrogenase [Triticum aestivum]
  misc_feature (1)..(279): Homolog of NCBI NO: 12049600 NR Description: mitochondrial succinate dehydrogenase
  misc_feature (1)..(279): Homolog of NCBI NO: 15237464 NR Description: succinate dehydrogenase, iron-sulphur subunit,
  misc_feature (1)..(279): Homolog of NCBI NO: 21593098 NR Description: succinate dehydrogenase iron-protein subunit-like
  misc_feature (1)..(279): Homolog of NCBI NO: 21555840 NR Description: succinate dehydrogenase iron-protein subunit,
  misc_feature (1)..(279): Homolog of NCBI NO: 12049598 NR Description: mitochondrial succinate dehydrogenase
  misc_feature (1)..(279): Homolog of NCBI NO: 15232149 NR Description: succinate dehydrogenase, iron-sulphur subunit,
MASGLIGRLVGTKPSKLATAARLIPARWTSTGAEAETKASSGGGRGSNLKTFQIYRWNPDNPGKPELQNYQIDLKDCGPMVLDALIKIKNEMDPSLTFRRSCREGICGSCAMNIDGCNGLACLTKIQDEASETTITPLPHMFVIKDLVVDMTNFYNQYKSIEPWLKRKTPASVPAKEILQSKKDRAKLDGMYECILCACCSTSCPSYWWNPESYLGPAALLHANRWISDSRDEYTKERLEAIDDEFKLYRCHTILNCARACPKGLNPGKQITHIKQLQR

SEQ ID NO: 29512 - protein, 200 aa, Arabidopsis thaliana
  peptide (1)..(200): Ceres Seq. ID no. 13491282
  misc_feature (1)..(48): Pfam Name: 2Fe-2S iron-sulfur cluster binding domain Pfam Description: 2Fe-2S iron-sulfur cluster binding domain
  misc_feature (1)..(198): Homolog of NCBI NO: 3851612 NR Description: succinate dehydrogenase Ip subunit [Gallus gallus]
  misc_feature (1)..(199): Homolog of NCBI NO: 4803711 NR Description: iron sulfur subunit of succinate dehydrogenase
  misc_feature (1)..(199): Homolog of NCBI NO: 5688947 NR Description: succinate dehydrogenase iron-protein subunit
  misc_feature (1)..(199): Homolog of NCBI NO: 28611029 NR Description: succinate dehydrogenase [Triticum aestivum]
  misc_feature (1)..(200): Homolog of NCBI NO: 12049600 NR Description: mitochondrial succinate dehydrogenase
  misc_feature (1)..(200): Homolog of NCBI NO: 15237464 NR Description: succinate dehydrogenase, iron-sulphur subunit,
  misc_feature (1)..(200): Homolog of NCBI NO: 21593098 NR Description: succinate dehydrogenase iron-protein subunit-like
  misc_feature (1)..(200): Homolog of NCBI NO: 21555840 NR Description: succinate dehydrogenase iron-protein subunit,
  misc_feature (1)..(200): Homolog of NCBI NO: 12049598 NR Description: mitochondrial succinate dehydrogenase
  misc_feature (1)..(200): Homolog of NCBI NO: 15232149 NR Description: succinate dehydrogenase, iron-sulphur subunit,
MVLDALIKIKNEMDPSLTFRRSCREGICGSCAMNIDGCNGLACLTKIQDEASETTITPLPHMFVIKDLVVDMTNFYNQYKSIEPWLKRKTPASVPAKEILQSKKDRAKLDGMYECILCACCSTSCPSYWWNPESYLGPAALLHANRWISDSRDEYTKERLEAIDDEFKLYRCHTILNCARACPKGLNPGKQITHIKQLQR

SEQ ID NO: 29513 - DNA, 998 bp, Arabidopsis thaliana
  misc_feature (1)..(998): Ceres Seq. ID no. 12389197
  misc_feature: MA Experiment ID: 108461 Result: Up-regulated in Transcription
  misc_feature: MA Experiment 108461 PARAMETER Experiment Name: At_Germinating_Seeds_cDNA_P Parameter: Age (day) Value: 1 vs. 0
  misc_feature: MA Experiment 108461 PARAMETER Experiment Name: At_Germinating_Seeds_cDNA_P Parameter: Tissue Value: Germinating Seeds
  misc_feature: MA Experiment ID: 108463 Result: Up-regulated in Transcription
  misc_feature: MA Experiment 108463 PARAMETER Experiment Name: At_Germinating_Seeds_cDNA_P Parameter: Age (day) Value: 3 vs. 0
  misc_feature: MA Experiment 108463 PARAMETER Experiment Name: At_Germinating_Seeds_cDNA_P Parameter: Tissue Value: Germinating Seeds
  misc_feature: MA Experiment ID: 108585 Result: Down-regulated in Transcription
  misc_feature: MA Experiment 108585 PARAMETER Experiment Name: At_5mM_NaNP_cDNA_P Parameter: Timepoint (hr) Value: 6
  misc_feature: MA Experiment 108585 PARAMETER Experiment Name: At_5mM_NaNP_cDNA_P Parameter: Tissue Value: Aerial
  misc_feature: MA Experiment 108585 PARAMETER Experiment Name: At_5mM_NaNP_cDNA_P Parameter: Treatment Value: null
  misc_feature: MA Experiment ID: 20001905 Result: Down-regulated in Transcription
  misc_feature: MA Experiment 20001905 PARAMETER Experiment Name: At_Drought_Reproduction_P Parameter: Age (day) Value: 40
  misc_feature: MA Experiment 20001905 PARAMETER Experiment Name: At_Drought_Reproduction_P Parameter: Organism Value: A. thaliana
  misc_feature: MA Experiment 20001905 PARAMETER Experiment Name: At_Drought_Reproduction_P Parameter: Plant Line Value: WS
  misc_feature: MA Experiment 20001905 PARAMETER Experiment Name: At_Drought_Reproduction_P Parameter: Timepoint (day) Value: 10
  misc_feature: MA Experiment 20001905 PARAMETER Experiment Name: At_Drought_Reproduction_P Parameter: Tissue Value: Rosettes
  misc_feature: MA Experiment 20001905 PARAMETER Experiment Name: At_Drought_Reproduction_P Parameter: Treatment Value: Drought vs. No Drought
aggagaaggacgatcgatctaaggagacgatgaagatcttccacgttccttgtctgcaagacaactactcttatctgataatcgatgagagcaccggagacgcggcggttgtggatccagttgatccggagaaggtgatcgcatcggctgagaagcaccaagctaagatcaagttcgtactcactacgcatcatcactgggatcatgccggtggaaacgagaagattaagcagttggttcctgatatcaaagtatatggaggttctctggataaggtgaagggttgcactgatgcggttgataatggtgacaagctgactttgggtcaggatattaacatattggctctccacactccttgtcacaccaagggtcacattagttattatgtgaacggaaaagaaggagaaaacccagccgtgttcaccggagatacactttttgttgctggatgtgggaagttttttgaagggacagctgagcagatgtatcagtcgttgtgtgtgactctggctgcattacctaaaccgacacaggtttactgcggccatgagtacaccgttaagaacttggaatttgctctaactgtggaaccaaacaacgggaagatacaacagaagttagcatgggcccgtcaacagcgccaagcagatcttcccacaatcccttcaacactggaggaagagctcgaaacaaatccatttatgcgtgttgataagccagagatacaggagaaactcggttgcaagtcgccaattgatacaatgagggaagttcggaacaagaaggatcagtggaggggatgatgataaatggagagcttcttgcctatgttttgtgtacttgtgttgaatgatcctgtaaaaggtgtatgaaccagtaatgttgatattctgtgtgaaactgtgaaccggtttggtaaaccgaaatcagaccgacctgtaagccgtactccctttttgaattttcagtttactatggataataatttcagtgtc

SEQ ID NO: 29514 - protein, 267 aa, Arabidopsis thaliana
  peptide (1)..(267): Ceres Seq. ID no. 12389198
  misc_feature (20)..(183): Pfam Name: Metallo-beta-lactamase superfamily Pfam Description: Metallo-beta-lactamase superfamily
  misc_feature (10)..(265): Homolog of NCBI NO: 29841459 NR Description: similar to probable hydroxyacylglutathione
  misc_feature (3)..(266): Homolog of NCBI NO: 24667703 NR Description: CG4365-PC [Drosophila melanogaster]
  misc_feature (3)..(266): Homolog of NCBI NO: 24667711 NR Description: CG4365-PB [Drosophila melanogaster]
  misc_feature (3)..(266): Homolog of NCBI NO: 21356335 NR Description: CG4365-PA [Drosophila melanogaster]
  misc_feature (10)..(266): Homolog of NCBI NO: 2494848 NR Description: Hydroxyacylglutathione hydrolase (Glyoxalase II)
  misc_feature (10)..(266): Homolog of NCBI NO: 4885389 NR Description: hydroxyacyl glutathione hydrolase
  misc_feature (10)..(266): Homolog of NCBI NO: 15375320 NR Description: hydroxyacyl glutathione hydrolase
  misc_feature (10)..(266): Homolog of NCBI NO: 21729786 NR Description: hydroxyacyl glutathione hydrolase
  misc_feature (10)..(267): Homolog of NCBI NO: 2570342 NR Description: glyoxalase II cytoplasmic isozyme [Arabidopsis
  misc_feature (10)..(267): Homolog of NCBI NO: 15228389 NR Description: glyoxalase II (hydroxyacylglutathione
EKDDRSKETMKIFHVPCLQDNYSYLIIDESTGDAAVVDPVDPEKVIASAEKHQAKIKFVLTTHHHWDHAGGNEKIKQLVPDIKVYGGSLDKVKGCTDAVDNGDKLTLGQDINILALHTPCHTKGHISYYVNGKEGENPAVFTGDTLFVAGCGKFFEGTAEQMYQSLCVTLAALPKPTQVYCGHEYTVKNLEFALTVEPNNGKIQQKLAWARQQRQADLPTIPSTLEEELETNPFMRVDKPEIQEKLGCKSPIDTMREVRNKKDQWRG

SEQ ID NO: 29515 - protein, 258 aa, Arabidopsis thaliana
  peptide (1)..(258): Ceres Seq. ID no. 12389199
  misc_feature (11)..(174): Pfam Name: Metallo-beta-lactamase superfamily Pfam Description: Metallo-beta-lactamase superfamily
  misc_feature (1)..(256): Homolog of NCBI NO: 29841459 NR Description: similar to probable hydroxyacylglutathione
  misc_feature (1)..(257): Homolog of NCBI NO: 24667711 NR Description: CG4365-PB [Drosophila melanogaster]
  misc_feature (1)..(257): Homolog of NCBI NO: 24667703 NR Description: CG4365-PC [Drosophila melanogaster]
  misc_feature (1)..(257): Homolog of NCBI NO: 21356335 NR Description: CG4365-PA [Drosophila melanogaster]
  misc_feature (1)..(257): Homolog of NCBI NO: 2494848 NR Description: Hydroxyacylglutathione hydrolase (Glyoxalase II)
  misc_feature (1)..(257): Homolog of NCBI NO: 4885389 NR Description: hydroxyacyl glutathione hydrolase
  misc_feature (1)..(257): Homolog of NCBI NO: 15375320 NR Description: hydroxyacyl glutathione hydrolase
  misc_feature (1)..(257): Homolog of NCBI NO: 21729786 NR Description: hydroxyacyl glutathione hydrolase
  misc_feature (1)..(258): Homolog of NCBI NO: 2570342 NR Description: glyoxalase II cytoplasmic isozyme [Arabidopsis
  misc_feature (1)..(258): Homolog of NCBI NO: 15228389 NR Description: glyoxalase II (hydroxyacylglutathione
MKIFHVPCLQDNYSYLIIDESTGDAAVVDPVDPEKVIASAEKHQAKIKFVLTTHHHWDHAGGNEKIKQLVPDIKVYGGSLDKVKGCTDAVDNGDKLTLGQDINILALHTPCHTKGHISYYVNGKEGENPAVFTGDTLFVAGCGKFFEGTAEQMYQSLCVTLAALPKPTQVYCGHEYTVKNLEFALTVEPNNGKIQQKLAWARQQRQADLPTIPSTLEEELETNPFMRVDKPEIQEKLGCKSPIDTMREVRNKKDQWRG

SEQ ID NO: 29516 - DNA, 843 bp, Arabidopsis thaliana
  misc_feature (1)..(843): Ceres Seq. ID no. 13496878
  misc_feature: MA Experiment ID: 108435 Result: Up-regulated in Transcription
  misc_feature: MA Experiment 108435 PARAMETER Experiment Name: At_stm_Mutants_cDNA_P Parameter: Plant Line Value: wt Landsburg vs stm
  misc_feature: MA Experiment 108435 PARAMETER Experiment Name: At_stm_Mutants_cDNA_P Parameter: Tissue Value: Shoot Apical Meristem Region
  misc_feature: MA Experiment ID: 108461 Result: Down-regulated in Transcription
  misc_feature: MA Experiment 108461 PARAMETER Experiment Name: At_Germinating_Seeds_cDNA_P Parameter: Age (day) Value: 1 vs. 0
  misc_feature: MA Experiment 108461 PARAMETER Experiment Name: At_Germinating_Seeds_cDNA_P Parameter: Tissue Value: Germinating Seeds
  misc_feature: MA Experiment ID: 108462 Result: Down-regulated in Transcription
  misc_feature: MA Experiment 108462 PARAMETER Experiment Name: At_Germinating_Seeds_cDNA_P Parameter: Age (day) Value: 2 vs. 0
  misc_feature: MA Experiment 108462 PARAMETER Experiment Name: At_Germinating_Seeds_cDNA_P Parameter: Tissue Value: Germinating Seeds
  misc_feature: MA Experiment ID: 108463 Result: Down-regulated in Transcription
  misc_feature: MA Experiment 108463 PARAMETER Experiment Name: At_Germinating_Seeds_cDNA_P Parameter: Age (day) Value: 3 vs. 0
  misc_feature: MA Experiment 108463 PARAMETER Experiment Name: At_Germinating_Seeds_cDNA_P Parameter: Tissue Value: Germinating Seeds
  misc_feature: MA Experiment ID: 108594 Result: Up-regulated in Transcription
  misc_feature: MA Experiment 108594 PARAMETER Experiment Name: At_Ler-rhl_Root_cDNA_P Parameter: Plant Line Value: null
  misc_feature: MA Experiment ID: 108668 Result: Up-regulated in Transcription
  misc_feature: MA Experiment 108668 PARAMETER Experiment Name: At_2mM_SA_cDNA_P Parameter: Plant Line Value: WS
  misc_feature: MA Experiment 108668 PARAMETER Experiment Name: At_2mM_SA_cDNA_P Parameter: Timepoint (hr) Value: 6
  misc_feature: MA Experiment 108668 PARAMETER Experiment Name: At_2mM_SA_cDNA_P Parameter: Treatment Value: 2mM SA vs. No Treatment
  misc_feature: MA Experiment ID: 20000182 Result: Up-regulated in Transcription
  misc_feature: MA Experiment 20000182 PARAMETER Experiment Name: At_2mM_SA_P Parameter: Age (day) Value: 14
  misc_feature: MA Experiment 20000182 PARAMETER Experiment Name: At_2mM_SA_P Parameter: Organism Value: A. thaliana
  misc_feature: MA Experiment 20000182 PARAMETER Experiment Name: At_2mM_SA_P Parameter: Plant Line Value: WS
  misc_feature: MA Experiment 20000182 PARAMETER Experiment Name: At_2mM_SA_P Parameter: Timepoint (hr) Value: 6
  misc_feature: MA Experiment 20000182 PARAMETER Experiment Name: At_2mM_SA_P Parameter: Tissue Value: Aerial
  misc_feature: MA Experiment 20000182 PARAMETER Experiment Name: At_2mM_SA_P Parameter: Treatment Value: 2mM SA vs. No Treatment
  misc_feature: MA Experiment ID: 20000184 Result: Down-regulated in Transcription
  misc_feature: MA Experiment 20000184 PARAMETER Experiment Name: At_Shoots__P Parameter: Age (day) Value: 7
  misc_feature: MA Experiment 20000184 PARAMETER Experiment Name: At_Shoots__P Parameter: Tissue Value: Shoots vs. Whole Plant
  misc_feature: MA Experiment ID: 20000234 Result: Up-regulated in Transcription
  misc_feature: MA Experiment 20000234 PARAMETER Experiment Name: At_Siliques_P Parameter: Age (day) Value: 21
  misc_feature: MA Experiment 20000234 PARAMETER Experiment Name: At_Siliques_P Parameter: Organism Value: A. thaliana
  misc_feature: MA Experiment 20000234 PARAMETER Experiment Name: At_Siliques_P Parameter: Plant Line Value: WS
  misc_feature: MA Experiment 20000234 PARAMETER Experiment Name: At_Siliques_P Parameter: Tissue Value: Less Than 5mm Siliques vs. Whole Plant
  misc_feature: MA Experiment ID: 20000264 Result: Up-regulated in Transcription
  misc_feature: MA Experiment 20000264 PARAMETER Experiment Name: At_Open_Flower_P Parameter: Age (day) Value: 21
  misc_feature: MA Experiment 20000264 PARAMETER Experiment Name: At_Open_Flower_P Parameter: Plant Line Value: WS
  misc_feature: MA Experiment 20000264 PARAMETER Experiment Name: At_Open_Flower_P Parameter: Tissue Value: Open Flower vs. Whole Plant
  misc_feature: MA Experiment ID: 20000265 Result: Up-regulated in Transcription
  misc_feature: MA Experiment 20000265 PARAMETER Experiment Name: At_Open_Flower_P Parameter: Age (day) Value: 21
  misc_feature: MA Experiment 20000265 PARAMETER Experiment Name: At_Open_Flower_P Parameter: Plant Line Value: WS
  misc_feature: MA Experiment 20000265 PARAMETER Experiment Name: At_Open_Flower_P Parameter: Tissue Value: Closed Flower vs. Whole Plant
  misc_feature: MA Experiment ID: 20000286 Result: Up-regulated in Transcription
  misc_feature: MA Experiment 20000286 PARAMETER Experiment Name: At_Open_Flower_P Parameter: Age (day) Value: 21
  misc_feature: MA Experiment 20000286 PARAMETER Experiment Name: At_Open_Flower_P Parameter: Plant Line Value: WS
  misc_feature: MA Experiment 20000286 PARAMETER Experiment Name: At_Open_Flower_P Parameter: Tissue Value: Half Open vs. Whole Plant
  misc_feature: MA Experiment ID: 20000794 Result: Up-regulated in Transcription
  misc_feature: MA Experiment 20000794 PARAMETER Experiment Name: At_Petals_P Parameter: Age (day) Value: 23-25 days
  misc_feature: MA Experiment 20000794 PARAMETER Experiment Name: At_Petals_P Parameter: Plant Line Value: WS
  misc_feature: MA Experiment 20000794 PARAMETER Experiment Name: At_Petals_P Parameter: Tissue Value: Petals vs. Whole plant
attgtgaatttattagtaatttataaattcatcaaaaacaaactcttttcagaaaaaaaataacaacaacaacaataatggcgtcttttgcaacccatcttgttgttgttgttacaatgttgtttgtagccatggcctccgcggagatgcttcaagatgtttgtgttgctgatttgtctaatgcggtcaaggtcaacggatacacttgcaaggactcaacacaaataacaccagaagacttctacttcaaaggcttagccaacattgccgccacaaacacctctaccggctcagtcgtgaccggagccaacgtagaaaagctaccgggactcaacactctcggcctctccatgtcccgcatcgactacgccccaaacggcctaaacccaccccatgtccacccacgtgcctccgagatcattttcgtccttgaaggtcagctctatgttggctttgtaacaaccgctggaaaactcatcgccaagaaccttaacaagggagacgttttcaccttccccaagggactcatccatttccagaagaacattgccaacagtccagcatctgtactcgcagccttcgatagccaattgcccggaacacaatcacttgtcgcctctctctttggagctcttcccgatgacattctggccaagtcattccagctcaaacacaaacaggttaagaagatcaaactgagatacgcacccaagaaatgagtttgtttttgtttatattgtaaacactaagcaaagaagaatgaatcaatataaagtttgcaactttaaaactattatgagatgaaactaaagaactgataaaaagctttgttttcattgtttc

SEQ ID NO: 29517 - protein, 213 aa, Arabidopsis thaliana
  peptide (1)..(213): Ceres Seq. ID no. 13496879
  misc_feature (58)..(203): Pfam Name: Cupin Pfam Description: Cupin
  misc_feature (8)..(213): Homolog of NCBI NO: 34904670 NR Description: putative germin protein [Oryza sativa (japonica
  misc_feature (23)..(213): Homolog of NCBI NO: 15228673 NR Description: germin-like protein (GLP10) [Arabidopsis
  misc_feature (23)..(213): Homolog of NCBI NO: 1934730 NR Description: germin-like protein [Arabidopsis thaliana]
  misc_feature (8)..(213): Homolog of NCBI NO: 18203442 NR Description: Rhicadhesin receptor precursor (Germin-like
  misc_feature (1)..(213): Homolog of NCBI NO: 15217561 NR Description: germin-like protein (GLP4) (GLP5) [Arabidopsis
  misc_feature (4)..(213): Homolog of NCBI NO: 21592538 NR Description: germin-like protein [Arabidopsis thaliana]
  misc_feature (1)..(213): Homolog of NCBI NO: 15230582 NR Description: germin-like protein (GLP8) [Arabidopsis thaliana]
  misc_feature (4)..(213): Homolog of NCBI NO: 7447332 NR Description: germin homolog F21E10.2 - Arabidopsis thaliana
  misc_feature (1)..(213): Homolog of NCBI NO: 21553437 NR Description: nectarin-like protein [Arabidopsis thaliana]
  misc_feature (1)..(213): Homolog of NCBI NO: 30690288 NR Description: germin-like protein, putative [Arabidopsis
MASFATHLVVVVTMLFVAMASAEMLQDVCVADLSNAVKVNGYTCKDSTQITPEDFYFKGLANIAATNTSTGSVVTGANVEKLPGLNTLGLSMSRIDYAPNGLNPPHVHPRASEIIFVLEGQLYVGFVTTAGKLIAKNLNKGDVFTFPKGLIHFQKNIANSPASVLAAFDSQLPGTQSLVASLFGALPDDILAKSFQLKHKQVKKIKLRYAPKK

SEQ ID NO: 29518 - protein, 200 aa, Arabidopsis thaliana
  peptide (1)..(200): Ceres Seq. ID no. 13496880
  misc_feature (45)..(190): Pfam Name: Cupin Pfam Description: Cupin
  misc_feature (1)..(200): Homolog of NCBI NO: 34904670 NR Description: putative germin protein [Oryza sativa (japonica
  misc_feature (10)..(200): Homolog of NCBI NO: 15228673 NR Description: germin-like protein (GLP10) [Arabidopsis
  misc_feature (10)..(200): Homolog of NCBI NO: 1934730 NR Description: germin-like protein [Arabidopsis thaliana]
  misc_feature (1)..(200): Homolog of NCBI NO: 18203442 NR Description: Rhicadhesin receptor precursor (Germin-like
  misc_feature (1)..(200): Homolog of NCBI NO: 15217561 NR Description: germin-like protein (GLP4) (GLP5) [Arabidopsis
  misc_feature (1)..(200): Homolog of NCBI NO: 21592538 NR Description: germin-like protein [Arabidopsis thaliana]
  misc_feature (1)..(200): Homolog of NCBI NO: 15230582 NR Description: germin-like protein (GLP8) [Arabidopsis thaliana]
  misc_feature (1)..(200): Homolog of NCBI NO: 7447332 NR Description: germin homolog F21E10.2 - Arabidopsis thaliana
  misc_feature (1)..(200): Homolog of NCBI NO: 21553437 NR Description: nectarin-like protein [Arabidopsis thaliana]
  misc_feature (1)..(200): Homolog of NCBI NO: 30690288 NR Description: germin-like protein, putative [Arabidopsis
MLFVAMASAEMLQDVCVADLSNAVKVNGYTCKDSTQITPEDFYFKGLANIAATNTSTGSVVTGANVEKLPGLNTLGLSMSRIDYAPNGLNPPHVHPRASEIIFVLEGQLYVGFVTTAGKLIAKNLNKGDVFTFPKGLIHFQKNIANSPASVLAAFDSQLPGTQSLVASLFGALPDDILAKSFQLKHKQVKKIKLRYAPKK

SEQ ID NO: 29519 - protein, 195 aa, Arabidopsis thaliana
  peptide (1)..(195): Ceres Seq. ID no. 13496881
  misc_feature (40)..(185): Pfam Name: Cupin Pfam Description: Cupin
  misc_feature (1)..(195): Homolog of NCBI NO: 34904670 NR Description: putative germin protein [Oryza sativa (japonica
  misc_feature (5)..(195): Homolog of NCBI NO: 15228673 NR Description: germin-like protein (GLP10) [Arabidopsis
  misc_feature (5)..(195): Homolog of NCBI NO: 1934730 NR Description: germin-like protein [Arabidopsis thaliana]
  misc_feature (1)..(195): Homolog of NCBI NO: 18203442 NR Description: Rhicadhesin receptor precursor (Germin-like
  misc_feature (1)..(195): Homolog of NCBI NO: 15217561 NR Description: germin-like protein (GLP4) (GLP5) [Arabidopsis
  misc_feature (1)..(195): Homolog of NCBI NO: 21592538 NR Description: germin-like protein [Arabidopsis thaliana]
  misc_feature (1)..(195): Homolog of NCBI NO: 15230582 NR Description: germin-like protein (GLP8) [Arabidopsis thaliana]
  misc_feature (1)..(195): Homolog of NCBI NO: 7447332 NR Description: germin homolog F21E10.2 - Arabidopsis thaliana
  misc_feature (1)..(195): Homolog of NCBI NO: 21553437 NR Description: nectarin-like protein [Arabidopsis thaliana]
  misc_feature (1)..(195): Homolog of NCBI NO: 30690288 NR Description: germin-like protein, putative [Arabidopsis
MASAEMLQDVCVADLSNAVKVNGYTCKDSTQITPEDFYFKGLANIAATNTSTGSVVTGANVEKLPGLNTLGLSMSRIDYAPNGLNPPHVHPRASEIIFVLEGQLYVGFVTTAGKLIAKNLNKGDVFTFPKGLIHFQKNIANSPASVLAAFDSQLPGTQSLVASLFGALPDDILAKSFQLKHKQVKKIKLRYAPKK

SEQ ID NO: 29520 - DNA, 980 bp, Arabidopsis thaliana
  misc_feature (1)..(980): Ceres Seq. ID no. 13499491
  misc_feature: MA Experiment ID: 108501 Result: Down-regulated in Transcription
  misc_feature: MA Experiment 108501 PARAMETER Experiment Name: At_ap2_floral_buds_cDNA_P Parameter: Plant Line Value: ap2 (Ler.)
  misc_feature: MA Experiment 108501 PARAMETER Experiment Name: At_ap2_floral_buds_cDNA_P Parameter: Tissue Value: Closed Flower
  misc_feature: MA Experiment ID: 108573 Result: Up-regulated in Transcription
  misc_feature: MA Experiment 108573 PARAMETER Experiment Name: At_Drought_cDNA_P Parameter: Timepoint (hr) Value: 6
  misc_feature: MA Experiment 108573 PARAMETER Experiment Name: At_Drought_cDNA_P Parameter: Tissue Value: Aerial
  misc_feature: MA Experiment 108573 PARAMETER Experiment Name: At_Drought_cDNA_P Parameter: Treatment Value: Drought vs. No Drought
  misc_feature: MA Experiment ID: 108595 Result: Up-regulated in Transcription
  misc_feature: MA Experiment 108595 PARAMETER Experiment Name: At_Ler-pi_Ovule_cDNA_P Parameter: Plant Line Value: null
  misc_feature: MA Experiment ID: 20000112 Result: Up-regulated in Transcription
  misc_feature: MA Experiment 20000112 PARAMETER Experiment Name: At_42deg_Heat_cDNA_P Parameter: Temperature (deg C) Value: 42 vs. 22
  misc_feature: MA Experiment 20000112 PARAMETER Experiment Name: At_42deg_Heat_cDNA_P Parameter: Timepoint (hr) Value: 2
  misc_feature: MA Experiment 20000112 PARAMETER Experiment Name: At_42deg_Heat_cDNA_P Parameter: Tissue Value: Aerial
  misc_feature: MA Experiment ID: 20000113 Result: Up-regulated in Transcription
  misc_feature: MA Experiment 20000113 PARAMETER Experiment Name: At_42deg_Heat_cDNA_P Parameter: Temperature (deg C) Value: 42 vs. 22
  misc_feature: MA Experiment 20000113 PARAMETER Experiment Name: At_42deg_Heat_cDNA_P Parameter: Timepoint (hr) Value: 8
  misc_feature: MA Experiment 20000113 PARAMETER Experiment Name: At_42deg_Heat_cDNA_P Parameter: Tissue Value: Aerial
  misc_feature: MA Experiment ID: 20000173 Result: Up-regulated in Transcription
  misc_feature: MA Experiment 20000173 PARAMETER Experiment Name: At_42deg_Heat_P Parameter: Age (day) Value: 14
  misc_feature: MA Experiment 20000173 PARAMETER Experiment Name: At_42deg_Heat_P Parameter: Organism Value: A. thaliana
  misc_feature: MA Experiment 20000173 PARAMETER Experiment Name: At_42deg_Heat_P Parameter: Plant Line Value: WS
  misc_feature: MA Experiment 20000173 PARAMETER Experiment Name: At_42deg_Heat_P Parameter: Temperature (deg C) Value: 42 vs. 22
  misc_feature: MA Experiment 20000173 PARAMETER Experiment Name: At_42deg_Heat_P Parameter: Timepoint (hr) Value: 6
  misc_feature: MA Experiment 20000173 PARAMETER Experiment Name: At_42deg_Heat_P Parameter: Tissue Value: Aerial
  misc_feature: MA Experiment ID: 20000214 Result: Down-regulated in Transcription
  misc_feature: MA Experiment 20000214 PARAMETER Experiment Name: At_4deg_Cold_P Parameter: Timepoint (hr) Value: 6
  misc_feature: MA Experiment ID: 20000224 Result: Down-regulated in Transcription
  misc_feature: MA Experiment ID: 20000234 Result: Down-regulated in Transcription
  misc_feature: MA Experiment 20000234 PARAMETER Experiment Name: At_Siliques_P Parameter: Age (day) Value: 21
  misc_feature: MA Experiment 20000234 PARAMETER Experiment Name: At_Siliques_P Parameter: Organism Value: A. thaliana
  misc_feature: MA Experiment 20000234 PARAMETER Experiment Name: At_Siliques_P Parameter: Plant Line Value: WS
  misc_feature: MA Experiment 20000234 PARAMETER Experiment Name: At_Siliques_P Parameter: Tissue Value: Less Than 5mm Siliques vs. Whole Plant
  misc_feature: MA Experiment ID: 20001247 Result: Up-regulated in Transcription
  misc_feature: MA Experiment 20001247 PARAMETER Experiment Name: At_Far-red-induction_P Parameter: Age (day) Value: 7
  misc_feature: MA Experiment 20001247 PARAMETER Experiment Name: At_Far-red-induction_P Parameter: Light Value: Far-red vs. White
  misc_feature: MA Experiment 20001247 PARAMETER Experiment Name: At_Far-red-induction_P Parameter: Organism Value: A. thaliana
  misc_feature: MA Experiment 20001247 PARAMETER Experiment Name: At_Far-red-induction_P Parameter: Plant Line Value: Columbia
  misc_feature: MA Experiment 20001247 PARAMETER Experiment Name: At_Far-red-induction_P Parameter: Timepoint (hr) Value: 1
  misc_feature: MA Experiment 20001247 PARAMETER Experiment Name: At_Far-red-induction_P Parameter: Tissue Value: Whole Plant
  misc_feature: MA Experiment ID: 20001557 Result: Down-regulated in Transcription
  misc_feature: MA Experiment 20001557 PARAMETER Experiment Name: At_Drought_Soil_Dry_P Parameter: Age (day) Value: 27
  misc_feature: MA Experiment 20001557 PARAMETER Experiment Name: At_Drought_Soil_Dry_P Parameter: Organism Value: A. thaliana
  misc_feature: MA Experiment 20001557 PARAMETER Experiment Name: At_Drought_Soil_Dry_P Parameter: Plant Line Value: WS
  misc_feature: MA Experiment 20001557 PARAMETER Experiment Name: At_Drought_Soil_Dry_P Parameter: Post Timepoint (hr) Value: 3
  misc_feature: MA Experiment 20001557 PARAMETER Experiment Name: At_Drought_Soil_Dry_P Parameter: Post-Treatment Value: Re-Water vs. No Drought
  misc_feature: MA Experiment 20001557 PARAMETER Experiment Name: At_Drought_Soil_Dry_P Parameter: Timepoint (day) Value: 13
  misc_feature: MA Experiment 20001557 PARAMETER Experiment Name: At_Drought_Soil_Dry_P Parameter: Treatment Value: Drought vs. No Drought
  misc_feature: MA Experiment ID: 20001911 Result: Up-regulated in Transcription
  misc_feature: MA Experiment 20001911 PARAMETER Experiment Name: At_Drought_Reproduction_P Parameter: Age (day) Value: 40
  misc_feature: MA Experiment 20001911 PARAMETER Experiment Name: At_Drought_Reproduction_P Parameter: Organism Value: A. thaliana
  misc_feature: MA Experiment 20001911 PARAMETER Experiment Name: At_Drought_Reproduction_P Parameter: Plant Line Value: WS
  misc_feature: MA Experiment 20001911 PARAMETER Experiment Name: At_Drought_Reproduction_P Parameter: Timepoint (day) Value: 10
  misc_feature: MA Experiment 20001911 PARAMETER Experiment Name: At_Drought_Reproduction_P Parameter: Tissue Value: Flowers
  misc_feature: MA Experiment 20001911 PARAMETER Experiment Name: At_Drought_Reproduction_P Parameter: Treatment Value: Drought vs. No Drought
gaagaaggtttcggaagtaaatatgtcttccttggggagcagcaaatccctgagggatgagatggaggtaacaaccgccgatgtttttccggaggttaacgccgccgctgtgacggaaaatcttgatcggaacgagcttgtgcttgctgacggagtcgtgtcggctgaggaaaggaatattgagccagacaatcgtggagagaggaagatagagagcgagtcgcctccagaggatgatgtttgcccgatctgtttcggctcctttacggttccgtgtcgtggaaattgtggtcattggtattgcggaaattgcatcttgcagtactggaactatgctgcaatatctaggccttgcaagtgtcccatgtgtgttaggcacatcacgaagctgtcaccagaaccatctttgcaagagcgtcaggagcaagaggtgaaggaggttcttgataaagtccgtaggtataaccgtctctttgttggaggtctaactggctttgttcagaaggtgcatgagcttccgtttctagtgaagagaatggtgtggcatatgatggatacagatgtgaacaatctgtattttcacgaagtgcgcatctttgcaatgttcatgagtaccctttacactgccgcagagtttaacttcattccaacgggcgggttcagaatagtgacagtttttgactacgctgcgattgctatgatcctgattctacgcttagtagggatatatcggaggagacgcctagctcagcaggttagacatctagcagctgcagcaattgagccggaattagagcaaagggaattgtaacagacacgtgaatctattaagtcttgtgcagtttgatccttgtggataagtttggtagtagatcatagaaacctcgagagtcgtgtgcagttttacagacaatgatattgcagactttaaaagtatatacatatctccttttctaacagtggaaataaaatattgattg

SEQ ID NO: 29521 - protein, 269 aa, Arabidopsis thaliana
  peptide (1)..(269): Ceres Seq. ID no. 13499492
  misc_feature (81)..(123): Pfam Name: Zinc finger, C3HC4 type (RING finger) Pfam Description: Zinc finger, C3HC4 type (RING finger)
  misc_feature (78)..(244): Homolog of NCBI NO: 21361954 NR Description: hypothetical protein DKFZp564A022 [Homo sapiens]
  misc_feature (72)..(254): Homolog of NCBI NO: 28376707 NR Description: unknown protein [Oryza sativa (japonica
  misc_feature (74)..(244): Homolog of NCBI NO: 18395127 NR Description: zinc finger (C3HC4-type RING finger) protein
  misc_feature (74)..(244): Homolog of NCBI NO: 21554064 NR Description: unknown [Arabidopsis thaliana]
  misc_feature (74)..(244): Homolog of NCBI NO: 18410010 NR Description: zinc finger (C3HC4-type RING finger) protein
  misc_feature (189)..(264): Homolog of NCBI NO: 7485612 NR Description: hypothetical protein F17I5.130 - Arabidopsis
  misc_feature (8)..(167): Homolog of NCBI NO: 7485612 NR Description: hypothetical protein F17I5.130 - Arabidopsis
  misc_feature (19)..(269): Homolog of NCBI NO: 26453304 NR Description: unknown protein [Arabidopsis thaliana]
  misc_feature (8)..(269): Homolog of NCBI NO: 21553438 NR Description: unknown [Arabidopsis thaliana]
  misc_feature (8)..(269): Homolog of NCBI NO: 18418331 NR Description: zinc finger (C3HC4-type RING finger) protein
KKVSEVNMSSLGSSKSLRDEMEVTTADVFPEVNAAAVTENLDRNELVLADGVVSAEERNIEPDNRGERKIESESPPEDDVCPICFGSFTVPCRGNCGHWYCGNCILQYWNYAAISRPCKCPMCVRHITKLSPEPSLQERQEQEVKEVLDKVRRYNRLFVGGLTGFVQKVHELPFLVKRMVWHMMDTDVNNLYFHEVRIFAMFMSTLYTAAEFNFIPTGGFRIVTVFDYAAIAMILILRLVGIYRRRRLAQQVRHLAAAAIEPELEQREL

SEQ ID NO: 29522 - protein, 262 aa, Arabidopsis thaliana
  peptide (1)..(262): Ceres Seq. ID no. 13499493
  misc_feature (74)..(116): Pfam Name: Zinc finger, C3HC4 type (RING finger) Pfam Description: Zinc finger, C3HC4 type (RING finger)
  misc_feature (71)..(237): Homolog of NCBI NO: 21361954 NR Description: hypothetical protein DKFZp564A022 [Homo sapiens]
  misc_feature (65)..(247): Homolog of NCBI NO: 28376707 NR Description: unknown protein [Oryza sativa (japonica
  misc_feature (67)..(237): Homolog of NCBI NO: 18395127 NR Description: zinc finger (C3HC4-type RING finger) protein
  misc_feature (67)..(237): Homolog of NCBI NO: 21554064 NR Description: unknown [Arabidopsis thaliana]
  misc_feature (67)..(237): Homolog of NCBI NO: 18410010 NR Description: zinc finger (C3HC4-type RING finger) protein
  misc_feature (182)..(257): Homolog of NCBI NO: 7485612 NR Description: hypothetical protein F17I5.130 - Arabidopsis
  misc_feature (1)..(160): Homolog of NCBI NO: 7485612 NR Description: hypothetical protein F17I5.130 - Arabidopsis
  misc_feature (12)..(262): Homolog of NCBI NO: 26453304 NR Description: unknown protein [Arabidopsis thaliana]
  misc_feature (1)..(262): Homolog of NCBI NO: 21553438 NR Description: unknown [Arabidopsis thaliana]
  misc_feature (1)..(262): Homolog of NCBI NO: 18418331 NR Description: zinc finger (C3HC4-type RING finger) protein
MSSLGSSKSLRDEMEVTTADVFPEVNAAAVTENLDRNELVLADGVVSAEERNIEPDNRGERKIESESPPEDDVCPICFGSFTVPCRGNCGHWYCGNCILQYWNYAAISRPCKCPMCVRHITKLSPEPSLQERQEQEVKEVLDKVRRYNRLFVGGLTGFVQKVHELPFLVKRMVWHMMDTDVNNLYFHEVRIFAMFMSTLYTAAEFNFIPTGGFRIVTVFDYAAIAMILILRLVGIYRRRRLAQQVRHLAAAAIEPELEQREL

SEQ ID NO: 29523 - protein, 249 aa, Arabidopsis thaliana
  peptide (1)..(249): Ceres Seq. ID no. 13499494
  misc_feature (61)..(103): Pfam Name: Zinc finger, C3HC4 type (RING finger) Pfam Description: Zinc finger, C3HC4 type (RING finger)
  misc_feature (58)..(224): Homolog of NCBI NO: 21361954 NR Description: hypothetical protein DKFZp564A022 [Homo sapiens]
  misc_feature (52)..(234): Homolog of NCBI NO: 28376707 NR Description: unknown protein [Oryza sativa (japonica
  misc_feature (54)..(224): Homolog of NCBI NO: 18395127 NR Description: zinc finger (C3HC4-type RING finger) protein
  misc_feature (54)..(224): Homolog of NCBI NO: 21554064 NR Description: unknown [Arabidopsis thaliana]
  misc_feature (54)..(224): Homolog of NCBI NO: 18410010 NR Description: zinc finger (C3HC4-type RING finger) protein
  misc_feature (169)..(244): Homolog of NCBI NO: 7485612 NR Description: hypothetical protein F17I5.130 - Arabidopsis
  misc_feature (1)..(147): Homolog of NCBI NO: 7485612 NR Description: hypothetical protein F17I5.130 - Arabidopsis
  misc_feature (1)..(249): Homolog of NCBI NO: 26453304 NR Description: unknown protein [Arabidopsis thaliana]
  misc_feature (1)..(249): Homolog of NCBI NO: 21553438 NR Description: unknown [Arabidopsis thaliana]
  misc_feature (1)..(249): Homolog of NCBI NO: 18418331 NR Description: zinc finger (C3HC4-type RING finger) protein
MEVTTADVFPEVNAAAVTENLDRNELVLADGVVSAEERNIEPDNRGERKIESESPPEDDVCPICFGSFTVPCRGNCGHWYCGNCILQYWNYAAISRPCKCPMCVRHITKLSPEPSLQERQEQEVKEVLDKVRRYNRLFVGGLTGFVQKVHELPFLVKRMVWHMMDTDVNNLYFHEVRIFAMFMSTLYTAAEFNFIPTGGFRIVTVFDYAAIAMILILRLVGIYRRRRLAQQVRHLAAAAIEPELEQREL

SEQ ID NO: 29524 - DNA, 787 bp, Arabidopsis thaliana
  misc_feature (1)..(787): Ceres Seq. ID no. 13580358
  misc_feature: MA Experiment ID: 20000180 Result: Down-regulated in Transcription
  misc_feature: MA Experiment 20000180 PARAMETER Experiment Name: At_Germinating_Seeds_P Parameter: Age (hr) Value: 24 vs. 0
  misc_feature: MA Experiment 20000180 PARAMETER Experiment Name: At_Germinating_Seeds_P Parameter: Tissue Value: Germinating Seeds
  misc_feature: MA Experiment ID: 20000227 Result: Up-regulated in Transcription
  misc_feature: MA Experiment 20000227 PARAMETER Experiment Name: At_Root-Tips-vs-Tops_P Parameter: Tissue Value: Root Tips vs. Root Tops
  misc_feature: MA Experiment ID: 20000234 Result: Up-regulated in Transcription
  misc_feature: MA Experiment 20000234 PARAMETER Experiment Name: At_Siliques_P Parameter: Age (day) Value: 21
  misc_feature: MA Experiment 20000234 PARAMETER Experiment Name: At_Siliques_P Parameter: Organism Value: A. thaliana
  misc_feature: MA Experiment 20000234 PARAMETER Experiment Name: At_Siliques_P Parameter: Plant Line Value: WS
  misc_feature: MA Experiment 20000234 PARAMETER Experiment Name: At_Siliques_P Parameter: Tissue Value: Less Than 5mm Siliques vs. Whole Plant
  misc_feature: MA Experiment ID: 20000794 Result: Down-regulated in Transcription
  misc_feature: MA Experiment 20000794 PARAMETER Experiment Name: At_Petals_P Parameter: Age (day) Value: 23-25 days
  misc_feature: MA Experiment 20000794 PARAMETER Experiment Name: At_Petals_P Parameter: Plant Line Value: WS
  misc_feature: MA Experiment 20000794 PARAMETER Experiment Name: At_Petals_P Parameter: Tissue Value: Petals vs. Whole plant
  misc_feature: MA Experiment ID: 20001451 Result: Down-regulated in Transcription
  misc_feature: MA Experiment 20001451 PARAMETER Experiment Name: At_Far-red-induction_P Parameter: Age (day) Value: 7
  misc_feature: MA Experiment 20001451 PARAMETER Experiment Name: At_Far-red-induction_P Parameter: Light Value: Far-red vs. White
  misc_feature: MA Experiment 20001451 PARAMETER Experiment Name: At_Far-red-induction_P Parameter: Organism Value: A. thaliana
  misc_feature: MA Experiment 20001451 PARAMETER Experiment Name: At_Far-red-induction_P Parameter: Plant Line Value: Columbia
  misc_feature: MA Experiment 20001451 PARAMETER Experiment Name: At_Far-red-induction_P Parameter: Timepoint (hr) Value: 24
  misc_feature: MA Experiment 20001451 PARAMETER Experiment Name: At_Far-red-induction_P Parameter: Tissue Value: Whole Plant
  misc_feature: MA Experiment ID: 20001557 Result: Up-regulated in Transcription
  misc_feature: MA Experiment 20001557 PARAMETER Experiment Name: At_Drought_Soil_Dry_P Parameter: Age (day) Value: 27
  misc_feature: MA Experiment 20001557 PARAMETER Experiment Name: At_Drought_Soil_Dry_P Parameter: Organism Value: A. thaliana
  misc_feature: MA Experiment 20001557 PARAMETER Experiment Name: At_Drought_Soil_Dry_P Parameter: Plant Line Value: WS
  misc_feature: MA Experiment 20001557 PARAMETER Experiment Name: At_Drought_Soil_Dry_P Parameter: Post Timepoint (hr) Value: 3
  misc_feature: MA Experiment 20001557 PARAMETER Experiment Name: At_Drought_Soil_Dry_P Parameter: Post-Treatment Value: Re-Water vs. No Drought
  misc_feature: MA Experiment 20001557 PARAMETER Experiment Name: At_Drought_Soil_Dry_P Parameter: Timepoint (day) Value: 13
  misc_feature: MA Experiment 20001557 PARAMETER Experiment Name: At_Drought_Soil_Dry_P Parameter: Treatment Value: Drought vs. No Drought
  misc_feature: MA Experiment ID: 20001558 Result: Up-regulated in Transcription
  misc_feature: MA Experiment 20001558 PARAMETER Experiment Name: At_Drought_Soil_Dry_P Parameter: Age (day) Value: 27
  misc_feature: MA Experiment 20001558 PARAMETER Experiment Name: At_Drought_Soil_Dry_P Parameter: Organism Value: A. thaliana
  misc_feature: MA Experiment 20001558 PARAMETER Experiment Name: At_Drought_Soil_Dry_P Parameter: Plant Line Value: WS
  misc_feature: MA Experiment 20001558 PARAMETER Experiment Name: At_Drought_Soil_Dry_P Parameter: Post Timepoint (hr) Value: 6
  misc_feature: MA Experiment 20001558 PARAMETER Experiment Name: At_Drought_Soil_Dry_P Parameter: Post-Treatment Value: Re-Water vs. No Drought
  misc_feature: MA Experiment 20001558 PARAMETER Experiment Name: At_Drought_Soil_Dry_P Parameter: Timepoint (day) Value: 13
  misc_feature: MA Experiment 20001558 PARAMETER Experiment Name: At_Drought_Soil_Dry_P Parameter: Treatment Value: Drought vs. No Drought
  misc_feature: MA Experiment ID: 20001560 Result: Up-regulated in Transcription
  misc_feature: MA Experiment 20001560 PARAMETER Experiment Name: At_Drought_Soil_Dry_P Parameter: Age (day) Value: 28
  misc_feature: MA Experiment 20001560 PARAMETER Experiment Name: At_Drought_Soil_Dry_P Parameter: Organism Value: A. thaliana
  misc_feature: MA Experiment 20001560 PARAMETER Experiment Name: At_Drought_Soil_Dry_P Parameter: Plant Line Value: WS
  misc_feature: MA Experiment 20001560 PARAMETER Experiment Name: At_Drought_Soil_Dry_P Parameter: Post Timepoint (hr) Value: None
  misc_feature: MA Experiment 20001560 PARAMETER Experiment Name: At_Drought_Soil_Dry_P Parameter: Post-Treatment Value: None
  misc_feature: MA Experiment 20001560 PARAMETER Experiment Name: At_Drought_Soil_Dry_P Parameter: Timepoint (day) Value: 14
  misc_feature: MA Experiment 20001560 PARAMETER Experiment Name: At_Drought_Soil_Dry_P Parameter: Treatment Value: Drought vs. No Drought
  misc_feature: MA Experiment ID: 20001757 Result: Up-regulated in Transcription
  misc_feature: MA Experiment 20001757 PARAMETER Experiment Name: At_50mM_NH4NO3_L-to-H_P Parameter: Timepoint (hr) Value: 6
  misc_feature: MA Experiment 20001757 PARAMETER Experiment Name: At_50mM_NH4NO3_L-to-H_P Parameter: Tissue Value: Leaf
  misc_feature: MA Experiment 20001757 PARAMETER Experiment Name: At_50mM_NH4NO3_L-to-H_P Parameter: Treatment Value: 50mM NH4NO3 vs 100mM Mannitol
gggtttgtggatactctgaagcgcagcagcagccgtaagaaagaaaccgaggaagaacgatctcagtgagaggacgatcacttcgccgtcgcagtcatgggtcgaatgcatagtagaggtaagggtatctcggcatctgctttgccgtacaagcgttcatctccgagctggctcaagacaacccctcaagatgttgatgagtccatctgcaagtttgcgaagaagggtttgaccccatcgcagattggtgtcattcttcgtgactctcacggaattccacaggtgaaaagtgttactggaagcaagattctcagaattttgaaagctcatggtcttgcacctgagatccctgaggatctgtatcacttgatcaagaaagctgttgctatccgcaagcatcttgagaggaacaggaaagataaggattccaaattcaggctgattcttgtagagagcagaatccatcgtcttgctcgttactacaagaagaccaagaagctcccacccgtctggaagtacgagtctacaactgcaagcactcttgtggcttgagaagaatagagttgatcatgtccttcaagaaggaccatttcattgtctgcattgcaactcaaagctcttcttcttttgaacctatgtatctgttttcgctagttttgatgggttacaacttgctatgagattttgattttagggaacgaatttgtttatgcgaatctttccattatcgttacagcttatctttcaattaacgttaattatcgttctcagagaatttttacagact

SEQ ID NO: 29525 - protein, 151 aa, Arabidopsis thaliana
  peptide (1)..(151): Ceres Seq. ID no. 13580359
  misc_feature (1)..(151): Homolog of NCBI NO: 17136832 NR Description: Ribosomal protein S13 CG13389-PA [Drosophila
  misc_feature (1)..(151): Homolog of NCBI NO: 3688434 NR Description: 40S ribosomal protein S13 [Lumbricus rubellus]
  misc_feature (1)..(151): Homolog of NCBI NO: 464705 NR Description: 40S RIBOSOMAL PROTEIN S13
  misc_feature (1)..(151): Homolog of NCBI NO: 1173198 NR Description: 40S RIBOSOMAL PROTEIN S13
  misc_feature (1)..(151): Homolog of NCBI NO: 7440402 NR Description: ribosomal protein S13, cytosolic - Arabidopsis
  misc_feature (1)..(151): Homolog of NCBI NO: 8131699 NR Description: cytoplasmic ribosomal protein S13 [Panax ginseng]
  misc_feature (1)..(151): Homolog of NCBI NO: 11276609 NR Description: ribosomal protein S13-like - Arabidopsis thaliana
  misc_feature (1)..(151): Homolog of NCBI NO: 18411224 NR Description: 40S ribosomal protein S13 (RPS13B) [Arabidopsis
  misc_feature (1)..(151): Homolog of NCBI NO: 14190367 NR Description: AT3g60770/T4C21_180 [Arabidopsis thaliana]
  misc_feature (1)..(151): Homolog of NCBI NO: 18411716 NR Description: 40S ribosomal protein S13 (RPS13A) [Arabidopsis
  misc_feature (1)..(151): Homolog of NCBI NO: 17136832 NR Description: Ribosomal protein S13 CG13389-PA [Drosophila
  misc_feature (1)..(151): Homolog of NCBI NO: 3688434 NR Description: 40S ribosomal protein S13 [Lumbricus rubellus]
  misc_feature (1)..(151): Homolog of NCBI NO: 464705 NR Description: 40S RIBOSOMAL PROTEIN S13
  misc_feature (1)..(151): Homolog of NCBI NO: 1173198 NR Description: 40S RIBOSOMAL PROTEIN S13
  misc_feature (1)..(151): Homolog of NCBI NO: 7440402 NR Description: ribosomal protein S13, cytosolic - Arabidopsis
  misc_feature (1)..(151): Homolog of NCBI NO: 8131699 NR Description: cytoplasmic ribosomal protein S13 [Panax ginseng]
  misc_feature (1)..(151): Homolog of NCBI NO: 11276609 NR Description: ribosomal protein S13-like - Arabidopsis thaliana
  misc_feature (1)..(151): Homolog of NCBI NO: 18411224 NR Description: 40S ribosomal protein S13 (RPS13B) [Arabidopsis
  misc_feature (1)..(151): Homolog of NCBI NO: 14190367 NR Description: AT3g60770/T4C21_180 [Arabidopsis thaliana]
  misc_feature (1)..(151): Homolog of NCBI NO: 18411716 NR Description: 40S ribosomal protein S13 (RPS13A) [Arabidopsis
MGRMHSRGKGISASALPYKRSSPSWLKTTPQDVDESICKFAKKGLTPSQIGVILRDSHGIPQVKSVTGSKILRILKAHGLAPEIPEDLYHLIKKAVAIRKHLERNRKDKDSKFRLILVESRIHRLARYYKKTKKLPPVWKYESTTASTLVA

SEQ ID NO: 29526 - protein, 148 aa, Arabidopsis thaliana
  peptide (1)..(148): Ceres Seq. ID no. 13580360
  misc_feature (1)..(148): Homolog of NCBI NO: 17136832 NR Description: Ribosomal protein S13 CG13389-PA [Drosophila
  misc_feature (1)..(148): Homolog of NCBI NO: 3688434 NR Description: 40S ribosomal protein S13 [Lumbricus rubellus]
  misc_feature (1)..(148): Homolog of NCBI NO: 464705 NR Description: 40S RIBOSOMAL PROTEIN S13
  misc_feature (1)..(148): Homolog of NCBI NO: 1173198 NR Description: 40S RIBOSOMAL PROTEIN S13
  misc_feature (1)..(148): Homolog of NCBI NO: 7440402 NR Description: ribosomal protein S13, cytosolic - Arabidopsis
  misc_feature (1)..(148): Homolog of NCBI NO: 8131699 NR Description: cytoplasmic ribosomal protein S13 [Panax ginseng]
  misc_feature (1)..(148): Homolog of NCBI NO: 11276609 NR Description: ribosomal protein S13-like - Arabidopsis thaliana
  misc_feature (1)..(148): Homolog of NCBI NO: 18411224 NR Description: 40S ribosomal protein S13 (RPS13B) [Arabidopsis
  misc_feature (1)..(148): Homolog of NCBI NO: 14190367 NR Description: AT3g60770/T4C21_180 [Arabidopsis thaliana]
  misc_feature (1)..(148): Homolog of NCBI NO: 18411716 NR Description: 40S ribosomal protein S13 (RPS13A) [Arabidopsis
  misc_feature (1)..(148): Homolog of NCBI NO: 17136832 NR Description: Ribosomal protein S13 CG13389-PA [Drosophila
  misc_feature (1)..(148): Homolog of NCBI NO: 3688434 NR Description: 40S ribosomal protein S13 [Lumbricus rubellus]
  misc_feature (1)..(148): Homolog of NCBI NO: 464705 NR Description: 40S RIBOSOMAL PROTEIN S13
  misc_feature (1)..(148): Homolog of NCBI NO: 1173198 NR Description: 40S RIBOSOMAL PROTEIN S13
  misc_feature (1)..(148): Homolog of NCBI NO: 7440402 NR Description: ribosomal protein S13, cytosolic - Arabidopsis
  misc_feature (1)..(148): Homolog of NCBI NO: 8131699 NR Description: cytoplasmic ribosomal protein S13 [Panax ginseng]
  misc_feature (1)..(148): Homolog of NCBI NO: 11276609 NR Description: ribosomal protein S13-like - Arabidopsis thaliana
  misc_feature (1)..(148): Homolog of NCBI NO: 18411224 NR Description: 40S ribosomal protein S13 (RPS13B) [Arabidopsis
  misc_feature (1)..(148): Homolog of NCBI NO: 14190367 NR Description: AT3g60770/T4C21_180 [Arabidopsis thaliana]
  misc_feature (1)..(148): Homolog of NCBI NO: 18411716 NR Description: 40S ribosomal protein S13 (RPS13A) [Arabidopsis
MHSRGKGISASALPYKRSSPSWLKTTPQDVDESICKFAKKGLTPSQIGVILRDSHGIPQVKSVTGSKILRILKAHGLAPEIPEDLYHLIKKAVAIRKHLERNRKDKDSKFRLILVESRIHRLARYYKKTKKLPPVWKYESTTASTLVA

SEQ ID NO: 29527 - DNA, 674 bp, Arabidopsis thaliana
  misc_feature (1)..(674): Ceres Seq. ID no. 12393615
  misc_feature: MA Experiment ID: 108434 Result: Up-regulated in Transcription
  misc_feature: MA Experiment 108434 PARAMETER Experiment Name: At_Root_Tips_cDNA_P Parameter: Tissue Value: Root Tips
  misc_feature: MA Experiment ID: 108463 Result: Down-regulated in Transcription
  misc_feature: MA Experiment 108463 PARAMETER Experiment Name: At_Germinating_Seeds_cDNA_P Parameter: Age (day) Value: 3 vs. 0
  misc_feature: MA Experiment 108463 PARAMETER Experiment Name: At_Germinating_Seeds_cDNA_P Parameter: Tissue Value: Germinating Seeds
  misc_feature: MA Experiment ID: 108573 Result: Down-regulated in Transcription
  misc_feature: MA Experiment 108573 PARAMETER Experiment Name: At_Drought_cDNA_P Parameter: Timepoint (hr) Value: 6
  misc_feature: MA Experiment 108573 PARAMETER Experiment Name: At_Drought_cDNA_P Parameter: Tissue Value: Aerial
  misc_feature: MA Experiment 108573 PARAMETER Experiment Name: At_Drought_cDNA_P Parameter: Treatment Value: Drought vs. No Drought
  misc_feature: MA Experiment ID: 20000173 Result: Up-regulated in Transcription
  misc_feature: MA Experiment 20000173 PARAMETER Experiment Name: At_42deg_Heat_P Parameter: Age (day) Value: 14
  misc_feature: MA Experiment 20000173 PARAMETER Experiment Name: At_42deg_Heat_P Parameter: Organism Value: A. thaliana
  misc_feature: MA Experiment 20000173 PARAMETER Experiment Name: At_42deg_Heat_P Parameter: Plant Line Value: WS
  misc_feature: MA Experiment 20000173 PARAMETER Experiment Name: At_42deg_Heat_P Parameter: Temperature (deg C) Value: 42 vs. 22
  misc_feature: MA Experiment 20000173 PARAMETER Experiment Name: At_42deg_Heat_P Parameter: Timepoint (hr) Value: 6
  misc_feature: MA Experiment 20000173 PARAMETER Experiment Name: At_42deg_Heat_P Parameter: Tissue Value: Aerial
  misc_feature: MA Experiment ID: 20000184 Result: Up-regulated in Transcription
  misc_feature: MA Experiment 20000184 PARAMETER Experiment Name: At_Shoots__P Parameter: Age (day) Value: 7
  misc_feature: MA Experiment 20000184 PARAMETER Experiment Name: At_Shoots__P Parameter: Tissue Value: Shoots vs. Whole Plant
  misc_feature: MA Experiment ID: 20000437 Result: Down-regulated in Transcription
  misc_feature: MA Experiment 20000437 PARAMETER Experiment Name: At_Drought_P Parameter: Age (day) Value: 8
  misc_feature: MA Experiment 20000437 PARAMETER Experiment Name: At_Drought_P Parameter: Organism Value: A. thaliana
  misc_feature: MA Experiment 20000437 PARAMETER Experiment Name: At_Drought_P Parameter: Plant Line Value: WS
  misc_feature: MA Experiment 20000437 PARAMETER Experiment Name: At_Drought_P Parameter: Timepoint (hr) Value: 24
  misc_feature: MA Experiment 20000437 PARAMETER Experiment Name: At_Drought_P Parameter: Tissue Value: Whole Plant
  misc_feature: MA Experiment 20000437 PARAMETER Experiment Name: At_Drought_P Parameter: Treatment Value: Drought vs. No Drought
  misc_feature: MA Experiment ID: 20000794 Result: Down-regulated in Transcription
  misc_feature: MA Experiment 20000794 PARAMETER Experiment Name: At_Petals_P Parameter: Age (day) Value: 23-25 days
  misc_feature: MA Experiment 20000794 PARAMETER Experiment Name: At_Petals_P Parameter: Plant Line Value: WS
  misc_feature: MA Experiment 20000794 PARAMETER Experiment Name: At_Petals_P Parameter: Tissue Value: Petals vs. Whole plant
  misc_feature: MA Experiment ID: 20001557 Result: Up-regulated in Transcription
  misc_feature: MA Experiment 20001557 PARAMETER Experiment Name: At_Drought_Soil_Dry_P Parameter: Age (day) Value: 27
  misc_feature: MA Experiment 20001557 PARAMETER Experiment Name: At_Drought_Soil_Dry_P Parameter: Organism Value: A. thaliana
  misc_feature: MA Experiment 20001557 PARAMETER Experiment Name: At_Drought_Soil_Dry_P Parameter: Plant Line Value: WS
  misc_feature: MA Experiment 20001557 PARAMETER Experiment Name: At_Drought_Soil_Dry_P Parameter: Post Timepoint (hr) Value: 3
  misc_feature: MA Experiment 20001557 PARAMETER Experiment Name: At_Drought_Soil_Dry_P Parameter: Post-Treatment Value: Re-Water vs. No Drought
  misc_feature: MA Experiment 20001557 PARAMETER Experiment Name: At_Drought_Soil_Dry_P Parameter: Timepoint (day) Value: 13
  misc_feature: MA Experiment 20001557 PARAMETER Experiment Name: At_Drought_Soil_Dry_P Parameter: Treatment Value: Drought vs. No Drought
  misc_feature: MA Experiment ID: 20001558 Result: Up-regulated in Transcription
  misc_feature: MA Experiment 20001558 PARAMETER Experiment Name: At_Drought_Soil_Dry_P Parameter: Age (day) Value: 27
  misc_feature: MA Experiment 20001558 PARAMETER Experiment Name: At_Drought_Soil_Dry_P Parameter: Organism Value: A. thaliana
  misc_feature: MA Experiment 20001558 PARAMETER Experiment Name: At_Drought_Soil_Dry_P Parameter: Plant Line Value: WS
  misc_feature: MA Experiment 20001558 PARAMETER Experiment Name: At_Drought_Soil_Dry_P Parameter: Post Timepoint (hr) Value: 6
  misc_feature: MA Experiment 20001558 PARAMETER Experiment Name: At_Drought_Soil_Dry_P Parameter: Post-Treatment Value: Re-Water vs. No Drought
  misc_feature: MA Experiment 20001558 PARAMETER Experiment Name: At_Drought_Soil_Dry_P Parameter: Timepoint (day) Value: 13
  misc_feature: MA Experiment 20001558 PARAMETER Experiment Name: At_Drought_Soil_Dry_P Parameter: Treatment Value: Drought vs. No Drought
  misc_feature: MA Experiment ID: 20001560 Result: Up-regulated in Transcription
  misc_feature: MA Experiment 20001560 PARAMETER Experiment Name: At_Drought_Soil_Dry_P Parameter: Age (day) Value: 28
  misc_feature: MA Experiment 20001560 PARAMETER Experiment Name: At_Drought_Soil_Dry_P Parameter: Organism Value: A. thaliana
  misc_feature: MA Experiment 20001560 PARAMETER Experiment Name: At_Drought_Soil_Dry_P Parameter: Plant Line Value: WS
  misc_feature: MA Experiment 20001560 PARAMETER Experiment Name: At_Drought_Soil_Dry_P Parameter: Post Timepoint (hr) Value: None
  misc_feature: MA Experiment 20001560 PARAMETER Experiment Name: At_Drought_Soil_Dry_P Parameter: Post-Treatment Value: None
  misc_feature: MA Experiment 20001560 PARAMETER Experiment Name: At_Drought_Soil_Dry_P Parameter: Timepoint (day) Value: 14
  misc_feature: MA Experiment 20001560 PARAMETER Experiment Name: At_Drought_Soil_Dry_P Parameter: Treatment Value: Drought vs. No Drought
  misc_feature: MA Experiment ID: 20001757 Result: Up-regulated in Transcription
  misc_feature: MA Experiment 20001757 PARAMETER Experiment Name: At_50mM_NH4NO3_L-to-H_P Parameter: Timepoint (hr) Value: 6
  misc_feature: MA Experiment 20001757 PARAMETER Experiment Name: At_50mM_NH4NO3_L-to-H_P Parameter: Tissue Value: Leaf
  misc_feature: MA Experiment 20001757 PARAMETER Experiment Name: At_50mM_NH4NO3_L-to-H_P Parameter: Treatment Value: 50mM NH4NO3 vs 100mM Mannitol
gatacaaagctttctttataaacgctgcgtcacatcactgaatcaaaaaccctagcgatacttcatctctcgagccggagccgcgttgcgaaagcatttcaatcgtagtctaagagaatgtcgacagtgggagagctcgcttgcagctacgctgttatgatcctcgaggatgagggtattgctatcacggctgacaaaatcgccactttggtgaaagctgctggtgttaccattgagtcatactggccaatgctattcgccaagatggctgagaaacgtaatgtcactgatctcatcatgaacgttggtgctggtggtggaggtggtgcgcctgttgcagctgctgctcctgctgctggcggtggtgctgccgctgctgctcctgctgccgaggagaagaagaaggacgaaccagcagaagagagtgatggagatttgggttttggcttgttcgattaagtgcattttacttgttttttcttcttcgatttgagactatttttttttcgtatcgagctattacttgttttggtctggctgaagaactataattagttgttttctgaaccatatgttgtatgacacaagttttcaagcaaacccatcggctccttctttccttagaaatgattttgtcacctcttttttttttaattcattcgagatattagtct

SEQ ID NO: 29528 - protein, 113 aa, Arabidopsis thaliana
  peptide (1)..(113): Ceres Seq. ID no. 12393616
  misc_feature (22)..(112): Pfam Name: 60s Acidic ribosomal protein Pfam Description: 60s Acidic ribosomal protein
  misc_feature (1)..(113): Homolog of NCBI NO: 25150244 NR Description: 60S Ribosomal Protein, Acidic 1
  misc_feature (1)..(113): Homolog of NCBI NO: 266947 NR Description: 60S ACIDIC RIBOSOMAL PROTEIN P1
  misc_feature (5)..(113): Homolog of NCBI NO: 1710590 NR Description: 60S ACIDIC RIBOSOMAL PROTEIN P1 (L12)
  misc_feature (5)..(113): Homolog of NCBI NO: 7440759 NR Description: acidic ribosomal protein P1a - maize
  misc_feature (1)..(113): Homolog of NCBI NO: 6094103 NR Description: 60S acidic ribosomal protein P1
  misc_feature (1)..(113): Homolog of NCBI NO: 18411448 NR Description: acidic ribosomal protein p1
  misc_feature (1)..(113): Homolog of NCBI NO: 21592477 NR Description: acidic ribosomal protein, putative [Arabidopsis
  misc_feature (1)..(113): Homolog of NCBI NO: 15223303 NR Description: acidic ribosomal protein, putative
  misc_feature (1)..(113): Homolog of NCBI NO: 21553441 NR Description: 60S acidic ribosomal protein P1-like protein
  misc_feature (1)..(113): Homolog of NCBI NO: 15238170 NR Description: 60S acidic ribosomal protein P1-like protein
MSTVGELACSYAVMILEDEGIAITADKIATLVKAAGVTIESYWPMLFAKMAEKRNVTDLIMNVGAGGGGGAPVAAAAPAAGGGAAAAAPAAEEKKKDEPAEESDGDLGFGLFD

SEQ ID NO: 29529 - protein, 100 aa, Arabidopsis thaliana
  peptide (1)..(100): Ceres Seq. ID no. 12393617
  misc_feature (9)..(99): Pfam Name: 60s Acidic ribosomal protein Pfam Description: 60s Acidic ribosomal protein
  misc_feature (1)..(100): Homolog of NCBI NO: 25150244 NR Description: 60S Ribosomal Protein, Acidic 1
  misc_feature (1)..(100): Homolog of NCBI NO: 266947 NR Description: 60S ACIDIC RIBOSOMAL PROTEIN P1
  misc_feature (1)..(100): Homolog of NCBI NO: 1710590 NR Description: 60S ACIDIC RIBOSOMAL PROTEIN P1 (L12)
  misc_feature (1)..(100): Homolog of NCBI NO: 7440759 NR Description: acidic ribosomal protein P1a - maize
  misc_feature (1)..(100): Homolog of NCBI NO: 6094103 NR Description: 60S acidic ribosomal protein P1
  misc_feature (1)..(100): Homolog of NCBI NO: 18411448 NR Description: acidic ribosomal protein p1
  misc_feature (1)..(100): Homolog of NCBI NO: 21592477 NR Description: acidic ribosomal protein, putative [Arabidopsis
  misc_feature (1)..(100): Homolog of NCBI NO: 15223303 NR Description: acidic ribosomal protein, putative
  misc_feature (1)..(100): Homolog of NCBI NO: 21553441 NR Description: 60S acidic ribosomal protein P1-like protein
  misc_feature (1)..(100): Homolog of NCBI NO: 15238170 NR Description: 60S acidic ribosomal protein P1-like protein
MILEDEGIAITADKIATLVKAAGVTIESYWPMLFAKMAEKRNVTDLIMNVGAGGGGGAPVAAAAPAAGGGAAAAAPAAEEKKKDEPAEESDGDLGFGLFD

SEQ ID NO: 29530 - protein, 69 aa, Arabidopsis thaliana
  peptide (1)..(69): Ceres Seq. ID no. 12393618
  misc_feature (1)..(68): Pfam Name: 60s Acidic ribosomal protein Pfam Description: 60s Acidic ribosomal protein
  misc_feature (1)..(69): Homolog of NCBI NO: 25150244 NR Description: 60S Ribosomal Protein, Acidic 1
  misc_feature (1)..(69): Homolog of NCBI NO: 266947 NR Description: 60S ACIDIC RIBOSOMAL PROTEIN P1
  misc_feature (1)..(69): Homolog of NCBI NO: 1710590 NR Description: 60S ACIDIC RIBOSOMAL PROTEIN P1 (L12)
  misc_feature (1)..(69): Homolog of NCBI NO: 7440759 NR Description: acidic ribosomal protein P1a - maize
  misc_feature (1)..(69): Homolog of NCBI NO: 6094103 NR Description: 60S acidic ribosomal protein P1
  misc_feature (1)..(69): Homolog of NCBI NO: 18411448 NR Description: acidic ribosomal protein p1
  misc_feature (1)..(69): Homolog of NCBI NO: 21592477 NR Description: acidic ribosomal protein, putative [Arabidopsis
  misc_feature (1)..(69): Homolog of NCBI NO: 15223303 NR Description: acidic ribosomal protein, putative
  misc_feature (1)..(69): Homolog of NCBI NO: 21553441 NR Description: 60S acidic ribosomal protein P1-like protein
  misc_feature (1)..(69): Homolog of NCBI NO: 15238170 NR Description: 60S acidic ribosomal protein P1-like protein
MLFAKMAEKRNVTDLIMNVGAGGGGGAPVAAAAPAAGGGAAAAAPAAEEKKKDEPAEESDGDLGFGLFD

SEQ ID NO: 29531 - DNA, 1087 bp, Arabidopsis thaliana
  misc_feature (1)..(1087): Ceres Seq. ID no. 12384539
  misc_feature: MA Experiment ID: 108462 Result: Up-regulated in Transcription
  misc_feature: MA Experiment 108462 PARAMETER Experiment Name: At_Germinating_Seeds_cDNA_P Parameter: Age (day) Value: 2 vs. 0
  misc_feature: MA Experiment 108462 PARAMETER Experiment Name: At_Germinating_Seeds_cDNA_P Parameter: Tissue Value: Germinating Seeds
  misc_feature: MA Experiment ID: 108463 Result: Up-regulated in Transcription
  misc_feature: MA Experiment 108463 PARAMETER Experiment Name: At_Germinating_Seeds_cDNA_P Parameter: Age (day) Value: 3 vs. 0
  misc_feature: MA Experiment 108463 PARAMETER Experiment Name: At_Germinating_Seeds_cDNA_P Parameter: Tissue Value: Germinating Seeds
  misc_feature: MA Experiment ID: 108464 Result: Up-regulated in Transcription
  misc_feature: MA Experiment 108464 PARAMETER Experiment Name: At_Germinating_Seeds_cDNA_P Parameter: Age (day) Value: 4 vs. 0
  misc_feature: MA Experiment 108464 PARAMETER Experiment Name: At_Germinating_Seeds_cDNA_P Parameter: Tissue Value: Germinating Seeds
  misc_feature: MA Experiment ID: 108561 Result: Up-regulated in Transcription
  misc_feature: MA Experiment 108561 PARAMETER Experiment Name: At_100uM_ABA_cDNA_P Parameter: Timepoint (hr) Value: 6
  misc_feature: MA Experiment 108561 PARAMETER Experiment Name: At_100uM_ABA_cDNA_P Parameter: Tissue Value: Aerial
  misc_feature: MA Experiment 108561 PARAMETER Experiment Name: At_100uM_ABA_cDNA_P Parameter: Treatment Value: 100uM ABA vs. No Treatment
  misc_feature: MA Experiment ID: 108605 Result: Up-regulated in Transcription
  misc_feature: MA Experiment 108605 PARAMETER Experiment Name: At_100uM_ABA_cDNA_P Parameter: Timepoint (hr) Value: 6
  misc_feature: MA Experiment 108605 PARAMETER Experiment Name: At_100uM_ABA_cDNA_P Parameter: Tissue Value: Aerial
  misc_feature: MA Experiment 108605 PARAMETER Experiment Name: At_100uM_ABA_cDNA_P Parameter: Treatment Value: 100uM ABA vs. No Treatment
  misc_feature: MA Experiment ID: 20000436 Result: Up-regulated in Transcription
  misc_feature: MA Experiment 20000436 PARAMETER Experiment Name: At_Drought_P Parameter: Age (day) Value: 7
  misc_feature: MA Experiment 20000436 PARAMETER Experiment Name: At_Drought_P Parameter: Organism Value: A. thaliana
  misc_feature: MA Experiment 20000436 PARAMETER Experiment Name: At_Drought_P Parameter: Plant Line Value: WS
  misc_feature: MA Experiment 20000436 PARAMETER Experiment Name: At_Drought_P Parameter: Timepoint (hr) Value: 12
  misc_feature: MA Experiment 20000436 PARAMETER Experiment Name: At_Drought_P Parameter: Tissue Value: Whole Plant
  misc_feature: MA Experiment 20000436 PARAMETER Experiment Name: At_Drought_P Parameter: Treatment Value: Drought vs. No Drought
  misc_feature: MA Experiment ID: 20000437 Result: Up-regulated in Transcription
  misc_feature: MA Experiment 20000437 PARAMETER Experiment Name: At_Drought_P Parameter: Age (day) Value: 8
  misc_feature: MA Experiment 20000437 PARAMETER Experiment Name: At_Drought_P Parameter: Organism Value: A. thaliana
  misc_feature: MA Experiment 20000437 PARAMETER Experiment Name: At_Drought_P Parameter: Plant Line Value: WS
  misc_feature: MA Experiment 20000437 PARAMETER Experiment Name: At_Drought_P Parameter: Timepoint (hr) Value: 24
  misc_feature: MA Experiment 20000437 PARAMETER Experiment Name: At_Drought_P Parameter: Tissue Value: Whole Plant
  misc_feature: MA Experiment 20000437 PARAMETER Experiment Name: At_Drought_P Parameter: Treatment Value: Drought vs. No Drought
  misc_feature: MA Experiment ID: 20000438 Result: Up-regulated in Transcription
  misc_feature: MA Experiment 20000438 PARAMETER Experiment Name: At_Shoots__P Parameter: Age (day) Value: 14
  misc_feature: MA Experiment 20000438 PARAMETER Experiment Name: At_Shoots__P Parameter: Tissue Value: Shoots vs. Whole Plant
  misc_feature: MA Experiment ID: 20000573 Result: Down-regulated in Transcription
  misc_feature: MA Experiment 20000573 PARAMETER Experiment Name: At_100uM_ABA_Mutants__P Parameter: Organism Value: A. thaliana
  misc_feature: MA Experiment 20000573 PARAMETER Experiment Name: At_100uM_ABA_Mutants__P Parameter: Plant Line Value: CS22 vs. Ler wt
  misc_feature: MA Experiment 20000573 PARAMETER Experiment Name: At_100uM_ABA_Mutants__P Parameter: Timepoint (hr) Value: N/A
  misc_feature: MA Experiment 20000573 PARAMETER Experiment Name: At_100uM_ABA_Mutants__P Parameter: Tissue Value: Whole Plant
  misc_feature: MA Experiment 20000573 PARAMETER Experiment Name: At_100uM_ABA_Mutants__P Parameter: Treatment Value: None
  misc_feature: MA Experiment ID: 20000794 Result: Up-regulated in Transcription
  misc_feature: MA Experiment 20000794 PARAMETER Experiment Name: At_Petals_P Parameter: Age (day) Value: 23-25 days
  misc_feature: MA Experiment 20000794 PARAMETER Experiment Name: At_Petals_P Parameter: Plant Line Value: WS
  misc_feature: MA Experiment 20000794 PARAMETER Experiment Name: At_Petals_P Parameter: Tissue Value: Petals vs. Whole plant
  misc_feature: MA Experiment ID: 20001248 Result: Down-regulated in Transcription
  misc_feature: MA Experiment 20001248 PARAMETER Experiment Name: At_Far-red-induction_P Parameter: Age (day) Value: 7
  misc_feature: MA Experiment 20001248 PARAMETER Experiment Name: At_Far-red-induction_P Parameter: Light Value: Far-red vs. White
  misc_feature: MA Experiment 20001248 PARAMETER Experiment Name: At_Far-red-induction_P Parameter: Organism Value: A. thaliana
  misc_feature: MA Experiment 20001248 PARAMETER Experiment Name: At_Far-red-induction_P Parameter: Plant Line Value: Columbia
  misc_feature: MA Experiment 20001248 PARAMETER Experiment Name: At_Far-red-induction_P Parameter: Timepoint (hr) Value: 4
  misc_feature: MA Experiment 20001248 PARAMETER Experiment Name: At_Far-red-induction_P Parameter: Tissue Value: Whole Plant
  misc_feature: MA Experiment ID: 20001555 Result: Up-regulated in Transcription
  misc_feature: MA Experiment 20001555 PARAMETER Experiment Name: At_Drought_Soil_Dry_P Parameter: Age (day) Value: 24
  misc_feature: MA Experiment 20001555 PARAMETER Experiment Name: At_Drought_Soil_Dry_P Parameter: Organism Value: A. thaliana
  misc_feature: MA Experiment 20001555 PARAMETER Experiment Name: At_Drought_Soil_Dry_P Parameter: Plant Line Value: WS
  misc_feature: MA Experiment 20001555 PARAMETER Experiment Name: At_Drought_Soil_Dry_P Parameter: Post Timepoint (hr) Value: None
  misc_feature: MA Experiment 20001555 PARAMETER Experiment Name: At_Drought_Soil_Dry_P Parameter: Post-Treatment Value: None
  misc_feature: MA Experiment 20001555 PARAMETER Experiment Name: At_Drought_Soil_Dry_P Parameter: Timepoint (day) Value: 10
  misc_feature: MA Experiment 20001555 PARAMETER Experiment Name: At_Drought_Soil_Dry_P Parameter: Treatment Value: Drought vs. No Drought
cttcttcttgatctttttcagaaatcaacttcatctcatcattcctctgtttttttctctctatctctcttaataaagaaaatgatgaaaatgagtatcggaacaacaacttccggcgacggtgaaatggagctccgacctggaggaatggttgtacagaaaaggacggatcatagctcaagcgtgccacgtggcattcgggttcgggtcaaatacgggtcggtccatcacgagatcagtatcaactctcaatctactttcggggaattaaagaagatattgtctggtgcgacaggagttcatcatcaagacatgcagattatatacaaagacaaagaaagagactcaaagatgtttcttgatctttctggtgtcaaagatcgttcgaaacttattcttatagaagatcccatttctcaggagaaacgtctccttgagttgaggaaaatcgccaccaaagagaaatcatctaaagcaatctctgatattagtttccaagtcgaaagactcgccggacaactgtcggcgtttgatacagtgattggtaaaggagggaaagttgaagagaagaatcttgagaatttgatggagatgttgatgaatcaattggtcaagctcgatgccatctcaggtgatggagacgttaaattgaagaagaagatgcagaatctaatgattcgatttacaaattgttggaaggaggaaagattacacaagtatgttgaggctctcgacttgttgaagatcaagaactcaaggcaaccgcaaacgaaaccaaagccgcaatacaaggaacgggaaatgctgacattttacgaggaggcgtcaaggaaaccgacggcctcctcatcaagtcctccggtgatcataacaacaagatgggaaacgtttgattctagttcagcctccacggcaaccctacaacccgttagaccggttcacccaaaatttaaatgggaattattcaattaatatctagatattaattacacgataatataatatactatacttagttttcagatttattgtaaggtgtaacatatgtgattatttttgtctagttgtatatgatttgtgattggtc

SEQ ID NO: 29532 - protein, 323 aa, Arabidopsis thaliana
  peptide (1)..(323): Ceres Seq. ID no. 12384540
  misc_feature (159)..(248): Pfam Name: BAG domain Pfam Description: BAG domain
  misc_feature (99)..(288): Homolog of NCBI NO: 10334497 NR Description: hypothetical protein [Cicer arietinum]
  misc_feature (44)..(306): Homolog of NCBI NO: 34898024 NR Description: ESTs AU082174(S13676),AU032395(R3986) correspond a region of the predicted gene.~Similar to Arabidopsis thaliana
  misc_feature (44)..(306): Homolog of NCBI NO: 25553557 NR Description: OSJNBa0038F22.4 [Oryza sativa (japonica
  misc_feature (34)..(323): Homolog of NCBI NO: 15242267 NR Description: putative protein; protein id: At5g52060.1
  misc_feature (33)..(323): Homolog of NCBI NO: 21537107 NR Description: unknown [Arabidopsis thaliana]
  misc_feature (28)..(323): Homolog of NCBI NO: 15240726 NR Description: putative protein
  misc_feature (86)..(323): Homolog of NCBI NO: 10176928 NR Description: contains similarity to unknown
  misc_feature (28)..(323): Homolog of NCBI NO: 30697630 NR Description: BAG domain containing protein [Arabidopsis
  misc_feature (31)..(323): Homolog of NCBI NO: 21553443 NR Description: unknown [Arabidopsis thaliana]
  misc_feature (28)..(323): Homolog of NCBI NO: 30697627 NR Description: BAG domain containing protein [Arabidopsis
LLLDLFQKSTSSHHSSVFFSLSLLIKKMMKMSIGTTTSGDGEMELRPGGMVVQKRTDHSSSVPRGIRVRVKYGSVHHEISINSQSTFGELKKILSGATGVHHQDMQIIYKDKERDSKMFLDLSGVKDRSKLILIEDPISQEKRLLELRKIATKEKSSKAISDISFQVERLAGQLSAFDTVIGKGGKVEEKNLENLMEMLMNQLVKLDAISGDGDVKLKKKMQNLMIRFTNCWKEERLHKYVEALDLLKIKNSRQPQTKPKPQYKEREMLTFYEEASRKPTASSSSPPVIITTRWETFDSSSASTATLQPVRPVHPKFKWELFN

SEQ ID NO: 29533 - protein, 296 aa, Arabidopsis thaliana
  peptide (1)..(296): Ceres Seq. ID no. 12384541
  misc_feature (132)..(221): Pfam Name: BAG domain Pfam Description: BAG domain
  misc_feature (72)..(261): Homolog of NCBI NO: 10334497 NR Description: hypothetical protein [Cicer arietinum]
  misc_feature (17)..(279): Homolog of NCBI NO: 34898024 NR Description: ESTs AU082174(S13676),AU032395(R3986) correspond a region of the predicted gene.~Similar to Arabidopsis thaliana
  misc_feature (17)..(279): Homolog of NCBI NO: 25553557 NR Description: OSJNBa0038F22.4 [Oryza sativa (japonica
  misc_feature (7)..(296): Homolog of NCBI NO: 15242267 NR Description: putative protein; protein id: At5g52060.1
  misc_feature (6)..(296): Homolog of NCBI NO: 21537107 NR Description: unknown [Arabidopsis thaliana]
  misc_feature (1)..(296): Homolog of NCBI NO: 15240726 NR Description: putative protein
  misc_feature (59)..(296): Homolog of NCBI NO: 10176928 NR Description: contains similarity to unknown
  misc_feature (1)..(296): Homolog of NCBI NO: 30697630 NR Description: BAG domain containing protein [Arabidopsis
  misc_feature (4)..(296): Homolog of NCBI NO: 21553443 NR Description: unknown [Arabidopsis thaliana]
  misc_feature (1)..(296): Homolog of NCBI NO: 30697627 NR Description: BAG domain containing protein [Arabidopsis
MMKMSIGTTTSGDGEMELRPGGMVVQKRTDHSSSVPRGIRVRVKYGSVHHEISINSQSTFGELKKILSGATGVHHQDMQIIYKDKERDSKMFLDLSGVKDRSKLILIEDPISQEKRLLELRKIATKEKSSKAISDISFQVERLAGQLSAFDTVIGKGGKVEEKNLENLMEMLMNQLVKLDAISGDGDVKLKKKMQNLMIRFTNCWKEERLHKYVEALDLLKIKNSRQPQTKPKPQYKEREMLTFYEEASRKPTASSSSPPVIITTRWETFDSSSASTATLQPVRPVHPKFKWELFN

SEQ ID NO: 29534 - protein, 295 aa, Arabidopsis thaliana
  peptide (1)..(295): Ceres Seq. ID no. 12384542
  misc_feature (131)..(220): Pfam Name: BAG domain Pfam Description: BAG domain
  misc_feature (71)..(260): Homolog of NCBI NO: 10334497 NR Description: hypothetical protein [Cicer arietinum]
  misc_feature (16)..(278): Homolog of NCBI NO: 34898024 NR Description: ESTs AU082174(S13676),AU032395(R3986) correspond a region of the predicted gene.~Similar to Arabidopsis thaliana
  misc_feature (16)..(278): Homolog of NCBI NO: 25553557 NR Description: OSJNBa0038F22.4 [Oryza sativa (japonica
  misc_feature (6)..(295): Homolog of NCBI NO: 15242267 NR Description: putative protein; protein id: At5g52060.1
  misc_feature (5)..(295): Homolog of NCBI NO: 21537107 NR Description: unknown [Arabidopsis thaliana]
  misc_feature (1)..(295): Homolog of NCBI NO: 15240726 NR Description: putative protein
  misc_feature (58)..(295): Homolog of NCBI NO: 10176928 NR Description: contains similarity to unknown
  misc_feature (1)..(295): Homolog of NCBI NO: 30697630 NR Description: BAG domain containing protein [Arabidopsis
  misc_feature (3)..(295): Homolog of NCBI NO: 21553443 NR Description: unknown [Arabidopsis thaliana]
  misc_feature (1)..(295): Homolog of NCBI NO: 30697627 NR Description: BAG domain containing protein [Arabidopsis
MKMSIGTTTSGDGEMELRPGGMVVQKRTDHSSSVPRGIRVRVKYGSVHHEISINSQSTFGELKKILSGATGVHHQDMQIIYKDKERDSKMFLDLSGVKDRSKLILIEDPISQEKRLLELRKIATKEKSSKAISDISFQVERLAGQLSAFDTVIGKGGKVEEKNLENLMEMLMNQLVKLDAISGDGDVKLKKKMQNLMIRFTNCWKEERLHKYVEALDLLKIKNSRQPQTKPKPQYKEREMLTFYEEASRKPTASSSSPPVIITTRWETFDSSSASTATLQPVRPVHPKFKWELFN

SEQ ID NO: 29535 - DNA, 854 bp, Arabidopsis thaliana
  misc_feature (1)..(854): Ceres Seq. ID no. 12333023
  misc_feature: MA Experiment ID: 108434 Result: Down-regulated in Transcription
  misc_feature: MA Experiment 108434 PARAMETER Experiment Name: At_Root_Tips_cDNA_P Parameter: Tissue Value: Root Tips
  misc_feature: MA Experiment ID: 108461 Result: Down-regulated in Transcription
  misc_feature: MA Experiment 108461 PARAMETER Experiment Name: At_Germinating_Seeds_cDNA_P Parameter: Age (day) Value: 1 vs. 0
  misc_feature: MA Experiment 108461 PARAMETER Experiment Name: At_Germinating_Seeds_cDNA_P Parameter: Tissue Value: Germinating Seeds
  misc_feature: MA Experiment ID: 108595 Result: Up-regulated in Transcription
  misc_feature: MA Experiment 108595 PARAMETER Experiment Name: At_Ler-pi_Ovule_cDNA_P Parameter: Plant Line Value: null
  misc_feature: MA Experiment ID: 20000113 Result: Down-regulated in Transcription
  misc_feature: MA Experiment 20000113 PARAMETER Experiment Name: At_42deg_Heat_cDNA_P Parameter: Temperature (deg C) Value: 42 vs. 22
  misc_feature: MA Experiment 20000113 PARAMETER Experiment Name: At_42deg_Heat_cDNA_P Parameter: Timepoint (hr) Value: 8
  misc_feature: MA Experiment 20000113 PARAMETER Experiment Name: At_42deg_Heat_cDNA_P Parameter: Tissue Value: Aerial
aaatttctcagtgaaacactgaaacttccttttcagttcgtaccgttcttcgctactttactcattctttagggtttcaaggttttctattggtcttgttgtagactcgagtagcttctgggttcaagccacaaagtttgagccttttttgatttgcagagtcctctgtgtttcttggtttgtctcttgatcaagaatctgagatgggcgagccactaggactgctccaggtgactgttattcaaggaaagaaactggtgatccgagatttcaagtcaagtgatccttatgtgattgtcaaattaggaaatgagtcagcgaagaccaaagtgatcaacaattgcctgaatccagtgtggaatgaggaactgaactttactctgaaagatcctgcagcagttctcgcattggaagtgtttgataaagataggttcaaggcagatgacaagatgggccatgcctctctcagccttcaaccgcttatctcagttgccagactaagacacgtagtccgcgtgtcctctggtgagacaacgcttaggaaagtattaccggatccagagaactgcgtatctcgagagagcacaatcagttgcatagacggagaggtggtgcagagtgtgtggctgaggctgtgtgctgttgaatcgggtgagattgagttgaagataaagttgattgatcctcctggaacaaacaagtagcaatagggtattttatgttagtttgtaacacgagacccgtttgtgactagtataattgcaacatcagtatggtcttgtcttgtttccaagtgtgcctttgtgactactcaccaatttattaggaatctttgagatacattgttctgctcc

SEQ ID NO: 29536 - protein, 166 aa, Arabidopsis thaliana; identical to SEQ ID NO: 26630
  peptide (1)..(166): Ceres Seq. ID no. 12333024
  misc_feature (8)..(87): Pfam Name: C2 domain Pfam Description: C2 domain
  misc_feature (1)..(163): Homolog of NCBI NO: 15223248 NR Description: unknown protein; protein id: At1g70800.1
  misc_feature (1)..(163): Homolog of NCBI NO: 18408493 NR Description: expressed protein
  misc_feature (3)..(157): Homolog of NCBI NO: 15226306 NR Description: hypothetical protein
  misc_feature (1)..(163): Homolog of NCBI NO: 25405940 NR Description: protein T1N15.21 [imported] - Arabidopsis
  misc_feature (1)..(163): Homolog of NCBI NO: 15221907 NR Description: unknown protein; protein id: At1g48590.1
  misc_feature (1)..(164): Homolog of NCBI NO: 15219500 NR Description: hypothetical protein; protein id: At1g73580.1
  misc_feature (1)..(159): Homolog of NCBI NO: 19386828 NR Description: putative zinc finger and C2 domain protein
  misc_feature (1)..(164): Homolog of NCBI NO: 30684739 NR Description: C2 domain-containing protein [Arabidopsis
  misc_feature (3)..(163): Homolog of NCBI NO: 18409675 NR Description: zinc finger and C2 domain protein, putative
  misc_feature (1)..(166): Homolog of NCBI NO: 15238792 NR Description: putative protein

SEQ ID NO: 29537 - protein, 84 aa, Arabidopsis thaliana; identical to SEQ ID NO: 26631
  peptide (1)..(84): Ceres Seq. ID no. 12333025
  misc_feature (1)..(81): Homolog of NCBI NO: 15223248 NR Description: unknown protein; protein id: At1g70800.1
  misc_feature (1)..(81): Homolog of NCBI NO: 18408493 NR Description: expressed protein
  misc_feature (1)..(75): Homolog of NCBI NO: 15226306 NR Description: hypothetical protein
  misc_feature (1)..(81): Homolog of NCBI NO: 25405940 NR Description: protein T1N15.21 [imported] - Arabidopsis
  misc_feature (1)..(81): Homolog of NCBI NO: 15221907 NR Description: unknown protein; protein id: At1g48590.1
  misc_feature (1)..(82): Homolog of NCBI NO: 15219500 NR Description: hypothetical protein; protein id: At1g73580.1
  misc_feature (1)..(77): Homolog of NCBI NO: 19386828 NR Description: putative zinc finger and C2 domain protein
  misc_feature (1)..(82): Homolog of NCBI NO: 30684739 NR Description: C2 domain-containing protein [Arabidopsis
  misc_feature (1)..(81): Homolog of NCBI NO: 18409675 NR Description: zinc finger and C2 domain protein, putative
  misc_feature (1)..(84): Homolog of NCBI NO: 15238792 NR Description: putative protein

SEQ ID NO: 29538 - DNA, 1871 bp, Arabidopsis thaliana
  misc_feature (1)..(1871): Ceres Seq. ID no. 13496804
  misc_feature: MA Experiment ID: 108464 Result: Up-regulated in Transcription
  misc_feature: MA Experiment 108464 PARAMETER Experiment Name: At_Germinating_Seeds_cDNA_P Parameter: Age (day) Value: 4 vs. 0
  misc_feature: MA Experiment 108464 PARAMETER Experiment Name: At_Germinating_Seeds_cDNA_P Parameter: Tissue Value: Germinating Seeds
  misc_feature: MA Experiment ID: 108488 Result: Down-regulated in Transcription
  misc_feature: MA Experiment ID: 108572 Result: Up-regulated in Transcription
  misc_feature: MA Experiment 108572 PARAMETER Experiment Name: At_Drought_cDNA_P Parameter: Timepoint (hr) Value: 1
  misc_feature: MA Experiment 108572 PARAMETER Experiment Name: At_Drought_cDNA_P Parameter: Tissue Value: Aerial
  misc_feature: MA Experiment 108572 PARAMETER Experiment Name: At_Drought_cDNA_P Parameter: Treatment Value: Drought vs. No Drought
  misc_feature: MA Experiment ID: 108573 Result: Up-regulated in Transcription
  misc_feature: MA Experiment 108573 PARAMETER Experiment Name: At_Drought_cDNA_P Parameter: Timepoint (hr) Value: 6
  misc_feature: MA Experiment 108573 PARAMETER Experiment Name: At_Drought_cDNA_P Parameter: Tissue Value: Aerial
  misc_feature: MA Experiment 108573 PARAMETER Experiment Name: At_Drought_cDNA_P Parameter: Treatment Value: Drought vs. No Drought
  misc_feature: MA Experiment ID: 108595 Result: Up-regulated in Transcription
  misc_feature: MA Experiment 108595 PARAMETER Experiment Name: At_Ler-pi_Ovule_cDNA_P Parameter: Plant Line Value: null
  misc_feature: MA Experiment ID: 108605 Result: Up-regulated in Transcription
  misc_feature: MA Experiment 108605 PARAMETER Experiment Name: At_100uM_ABA_cDNA_P Parameter: Timepoint (hr) Value: 6
  misc_feature: MA Experiment 108605 PARAMETER Experiment Name: At_100uM_ABA_cDNA_P Parameter: Tissue Value: Aerial
  misc_feature: MA Experiment 108605 PARAMETER Experiment Name: At_100uM_ABA_cDNA_P Parameter: Treatment Value: 100uM ABA vs. No Treatment
  misc_feature: MA Experiment ID: 108607 Result: Up-regulated in Transcription
  misc_feature: MA Experiment 108607 PARAMETER Experiment Name: At_100uM_ABA_cDNA_P Parameter: Timepoint (hr) Value: 4
  misc_feature: MA Experiment 108607 PARAMETER Experiment Name: At_100uM_ABA_cDNA_P Parameter: Tissue Value: Aerial
  misc_feature: MA Experiment 108607 PARAMETER Experiment Name: At_100uM_ABA_cDNA_P Parameter: Treatment Value: 100uM ABA vs. No Treatment
  misc_feature: MA Experiment ID: 108609 Result: Up-regulated in Transcription
  misc_feature: MA Experiment 108609 PARAMETER Experiment Name: At_100uM_ABA_cDNA_P Parameter: Timepoint (hr) Value: 24
  misc_feature: MA Experiment 108609 PARAMETER Experiment Name: At_100uM_ABA_cDNA_P Parameter: Tissue Value: Aerial
  misc_feature: MA Experiment 108609 PARAMETER Experiment Name: At_100uM_ABA_cDNA_P Parameter: Treatment Value: 100uM ABA vs. No Treatment
  misc_feature: MA Experiment ID: 20000071 Result: Up-regulated in Transcription
  misc_feature: MA Experiment 20000071 PARAMETER Experiment Name: At_100uM_ABA_Mutants_cDNA_P Parameter: Plant Line Value: CS8104
  misc_feature: MA Experiment 20000071 PARAMETER Experiment Name: At_100uM_ABA_Mutants_cDNA_P Parameter: Timepoint (hr) Value: 6
  misc_feature: MA Experiment 20000071 PARAMETER Experiment Name: At_100uM_ABA_Mutants_cDNA_P Parameter: Tissue Value: Aerial
  misc_feature: MA Experiment 20000071 PARAMETER Experiment Name: At_100uM_ABA_Mutants_cDNA_P Parameter: Treatment Value: 100uM ABA vs. No Treatment
  misc_feature: MA Experiment ID: 20000087 Result: Up-regulated in Transcription
  misc_feature: MA Experiment 20000087 PARAMETER Experiment Name: At_100uM_ABA_Mutants_cDNA_P Parameter: Plant Line Value: WS
  misc_feature: MA Experiment 20000087 PARAMETER Experiment Name: At_100uM_ABA_Mutants_cDNA_P Parameter: Timepoint (hr) Value: 6
  misc_feature: MA Experiment 20000087 PARAMETER Experiment Name: At_100uM_ABA_Mutants_cDNA_P Parameter: Tissue Value: Aerial
  misc_feature: MA Experiment 20000087 PARAMETER Experiment Name: At_100uM_ABA_Mutants_cDNA_P Parameter: Treatment Value: 100uM ABA vs. No Treatment
  misc_feature: MA Experiment ID: 20000117 Result: Up-regulated in Transcription
  misc_feature: MA Experiment 20000117 PARAMETER Experiment Name: At_100uM_ABA_Mutants_cDNA_P Parameter: Plant Line Value: Columbia
  misc_feature: MA Experiment 20000117 PARAMETER Experiment Name: At_100uM_ABA_Mutants_cDNA_P Parameter: Timepoint (hr) Value: 6
  misc_feature: MA Experiment 20000117 PARAMETER Experiment Name: At_100uM_ABA_Mutants_cDNA_P Parameter: Tissue Value: Aerial
  misc_feature: MA Experiment 20000117 PARAMETER Experiment Name: At_100uM_ABA_Mutants_cDNA_P Parameter: Treatment Value: 100uM ABA vs. No Treatment
  misc_feature: MA Experiment ID: 20000179 Result: Down-regulated in Transcription
  misc_feature: MA Experiment 20000179 PARAMETER Experiment Name: At_Germinating_Seeds_P Parameter: Age (hr) Value: 6 vs. 0
  misc_feature: MA Experiment 20000179 PARAMETER Experiment Name: At_Germinating_Seeds_P Parameter: Tissue Value: Germinating Seeds
  misc_feature: MA Experiment ID: 20000180 Result: Down-regulated in Transcription
  misc_feature: MA Experiment 20000180 PARAMETER Experiment Name: At_Germinating_Seeds_P Parameter: Age (hr) Value: 24 vs. 0
  misc_feature: MA Experiment 20000180 PARAMETER Experiment Name: At_Germinating_Seeds_P Parameter: Tissue Value: Germinating Seeds
  misc_feature: MA Experiment ID: 20000182 Result: Up-regulated in Transcription
  misc_feature: MA Experiment 20000182 PARAMETER Experiment Name: At_2mM_SA_P Parameter: Age (day) Value: 14
  misc_feature: MA Experiment 20000182 PARAMETER Experiment Name: At_2mM_SA_P Parameter: Organism Value: A. thaliana
  misc_feature: MA Experiment 20000182 PARAMETER Experiment Name: At_2mM_SA_P Parameter: Plant Line Value: WS
  misc_feature: MA Experiment 20000182 PARAMETER Experiment Name: At_2mM_SA_P Parameter: Timepoint (hr) Value: 6
  misc_feature: MA Experiment 20000182 PARAMETER Experiment Name: At_2mM_SA_P Parameter: Tissue Value: Aerial
  misc_feature: MA Experiment 20000182 PARAMETER Experiment Name: At_2mM_SA_P Parameter: Treatment Value: 2mM SA vs. No Treatment
  misc_feature: MA Experiment ID: 20000185 Result: Down-regulated in Transcription
  misc_feature: MA Experiment 20000185 PARAMETER Experiment Name: At_Roots__P Parameter: Age (day) Value: 7 vs. 21
  misc_feature: MA Experiment 20000185 PARAMETER Experiment Name: At_Roots__P Parameter: Organism Value: A. thaliana
  misc_feature: MA Experiment 20000185 PARAMETER Experiment Name: At_Roots__P Parameter: Tissue Value: Roots vs. Whole Plant
  misc_feature: MA Experiment ID: 20000439 Result: Down-regulated in Transcription
  misc_feature: MA Experiment 20000439 PARAMETER Experiment Name: At_Roots__P Parameter: Age (day) Value: 14 vs. 21
  misc_feature: MA Experiment 20000439 PARAMETER Experiment Name: At_Roots__P Parameter: Organism Value: A. thaliana
  misc_feature: MA Experiment 20000439 PARAMETER Experiment Name: At_Roots__P Parameter: Tissue Value: Roots vs. Whole Plant
  misc_feature: MA Experiment ID: 20000445 Result: Up-regulated in Transcription
  misc_feature: MA Experiment 20000445 PARAMETER Experiment Name: At_100uM_NAA__P Parameter: Age (day) Value: 14
  misc_feature: MA Experiment 20000445 PARAMETER Experiment Name: At_100uM_NAA__P Parameter: Organism Value: A. thaliana
  misc_feature: MA Experiment 20000445 PARAMETER Experiment Name: At_100uM_NAA__P Parameter: Plant Line Value: WS
  misc_feature: MA Experiment 20000445 PARAMETER Experiment Name: At_100uM_NAA__P Parameter: Timepoint (hr) Value: 6
  misc_feature: MA Experiment 20000445 PARAMETER Experiment Name: At_100uM_NAA__P Parameter: Tissue Value: Aerial
  misc_feature: MA Experiment 20000445 PARAMETER Experiment Name: At_100uM_NAA__P Parameter: Treatment Value: 100uM NAA vs. No Treatment
  misc_feature: MA Experiment ID: 20000453 Result: Up-regulated in Transcription
  misc_feature: MA Experiment 20000453 PARAMETER Experiment Name: At_100uM_ABA_P Parameter: Age (day) Value: 15
  misc_feature: MA Experiment 20000453 PARAMETER Experiment Name: At_100uM_ABA_P Parameter: Organism Value: A. thaliana
  misc_feature: MA Experiment 20000453 PARAMETER Experiment Name: At_100uM_ABA_P Parameter: Plant Line Value: WS
  misc_feature: MA Experiment 20000453 PARAMETER Experiment Name: At_100uM_ABA_P Parameter: Timepoint (hr) Value: 24
  misc_feature: MA Experiment 20000453 PARAMETER Experiment Name: At_100uM_ABA_P Parameter: Tissue Value: Aerial
  misc_feature: MA Experiment 20000453 PARAMETER Experiment Name: At_100uM_ABA_P Parameter: Treatment Value: 100uM ABA vs. No Treatment
  misc_feature: MA Experiment ID: 20000527 Result: Down-regulated in Transcription
  misc_feature: MA Experiment 20000527 PARAMETER Experiment Name: At_10percent_PEG_P Parameter: Age (day) Value: 20
  misc_feature: MA Experiment 20000527 PARAMETER Experiment Name: At_10percent_PEG_P Parameter: Organism Value: A. thaliana
  misc_feature: MA Experiment 20000527 PARAMETER Experiment Name: At_10percent_PEG_P Parameter: Plant Line Value: WS
  misc_feature: MA Experiment 20000527 PARAMETER Experiment Name: At_10percent_PEG_P Parameter: Timepoint (day) Value: 20
  misc_feature: MA Experiment 20000527 PARAMETER Experiment Name: At_10percent_PEG_P Parameter: Tissue Value: Whole Plant
  misc_feature: MA Experiment 20000527 PARAMETER Experiment Name: At_10percent_PEG_P Parameter: Treatment Value: 10percent PEG vs. No Treatment
  misc_feature: MA Experiment ID: 20000794 Result: Up-regulated in Transcription
  misc_feature: MA Experiment 20000794 PARAMETER Experiment Name: At_Petals_P Parameter: Age (day) Value: 23-25 days
  misc_feature: MA Experiment 20000794 PARAMETER Experiment Name: At_Petals_P Parameter: Plant Line Value: WS
  misc_feature: MA Experiment 20000794 PARAMETER Experiment Name: At_Petals_P Parameter: Tissue Value: Petals vs. Whole plant
  misc_feature: MA Experiment ID: 20001457 Result: Down-regulated in Transcription
  misc_feature: MA Experiment 20001457 PARAMETER Experiment Name: At_50mM_NH4NO3_L-to-H_P Parameter: Age (day) Value: Undefined
  misc_feature: MA Experiment 20001457 PARAMETER Experiment Name: At_50mM_NH4NO3_L-to-H_P Parameter: Organism Value: Undefined
  misc_feature: MA Experiment 20001457 PARAMETER Experiment Name: At_50mM_NH4NO3_L-to-H_P Parameter: Plant Line Value: Undefined
  misc_feature: MA Experiment 20001457 PARAMETER Experiment Name: At_50mM_NH4NO3_L-to-H_P Parameter: Timepoint (hr) Value: 0.5
  misc_feature: MA Experiment 20001457 PARAMETER Experiment Name: At_50mM_NH4NO3_L-to-H_P Parameter: Tissue Value: Siliques
  misc_feature: MA Experiment 20001457 PARAMETER Experiment Name: At_50mM_NH4NO3_L-to-H_P Parameter: Treatment Value: 50mM NH4NO3 vs. 100mM Manitol
  misc_feature: MA Experiment ID: 20001458 Result: Down-regulated in Transcription
  misc_feature: MA Experiment 20001458 PARAMETER Experiment Name: At_50mM_NH4NO3_L-to-H_P Parameter: Age (day) Value: Undefined
  misc_feature: MA Experiment 20001458 PARAMETER Experiment Name: At_50mM_NH4NO3_L-to-H_P Parameter: Organism Value: Undefined
  misc_feature: MA Experiment 20001458 PARAMETER Experiment Name: At_50mM_NH4NO3_L-to-H_P Parameter: Plant Line Value: Undefined
  misc_feature: MA Experiment 20001458 PARAMETER Experiment Name: At_50mM_NH4NO3_L-to-H_P Parameter: Timepoint (hr) Value: 2
  misc_feature: MA Experiment 20001458 PARAMETER Experiment Name: At_50mM_NH4NO3_L-to-H_P Parameter: Tissue Value: Siliques
  misc_feature: MA Experiment 20001458 PARAMETER Experiment Name: At_50mM_NH4NO3_L-to-H_P Parameter: Treatment Value: 50mM NH4NO3 vs. 100mM Manitol
  misc_feature: MA Experiment ID: 20001557 Result: Up-regulated in Transcription
  misc_feature: MA Experiment 20001557 PARAMETER Experiment Name: At_Drought_Soil_Dry_P Parameter: Age (day) Value: 27
  misc_feature: MA Experiment 20001557 PARAMETER Experiment Name: At_Drought_Soil_Dry_P Parameter: Organism Value: A. thaliana
  misc_feature: MA Experiment 20001557 PARAMETER Experiment Name: At_Drought_Soil_Dry_P Parameter: Plant Line Value: WS
  misc_feature: MA Experiment 20001557 PARAMETER Experiment Name: At_Drought_Soil_Dry_P Parameter: Post Timepoint (hr) Value: 3
  misc_feature: MA Experiment 20001557 PARAMETER Experiment Name: At_Drought_Soil_Dry_P Parameter: Post-Treatment Value: Re-Water vs. No Drought
  misc_feature: MA Experiment 20001557 PARAMETER Experiment Name: At_Drought_Soil_Dry_P Parameter: Timepoint (day) Value: 13
  misc_feature: MA Experiment 20001557 PARAMETER Experiment Name: At_Drought_Soil_Dry_P Parameter: Treatment Value: Drought vs. No Drought
gttccacttcatacccatttgcttccttgaatggcaagtctcttctcctcacgtctcggctctcaatctctttctctcctcatcaacatcttcttcatctttctcatctttctccatttcgcttcacaaactcctcctccctccggatccatccaaaccttaaattcctttgccggcggtgacagtgacagctgcagcggaggactcgccagccttgacgaccaccgttccaagtgttcttacataagatctcaatcaaaatgtggcccacaaggttacatagactatctcaagattttcttctgcatcttcggacaatcccctgttttgggccatctagttttatccgcctggttgtttgttctgttctacttgctcggagacacggccgcgagttacttctgtccttctttagacagcttatctaaggttttgaagctgtctcctacaatggctggagtcacgcttctctctcttggcaacggtgcgcctgatttgttctcaagtgttgtctccttcacaagatcgaataatggcgattttgggctcaactctattttaggcggtgcgttcttcgtctctagcttcgttgttgggacgatttgtgtgttgattggatctagagatgtcgctatcgacagaaatagctttatccgcgacgtggtttttcttcttgtcgctctttgctgtctcggtttgatcatcttcataggcaaagtaaccatttgggtcgctctctgttatctctccatttatctcctctatgtagggtttttatcggtttcacatttctttgaccgcaagaaacgtatgtccgatcagattcttcgtagcagagaagatttggccgagatgggtgtttcgttgctaggctatatagcagaggagaagctggctttgccagagaaaacaactcaagaattcaagattgtgtttgaagattctccaaaaaggcaccgatcttgcttctcggtgctagtgagcataattggactacctctatatctccccaggcggctcacaattcccgtcgtttgcgaagaaaaatggtcaaagccttgcgctgtggtttccacggccatcgctcctgttctactaaccgaactttactgttctcattacagcgggtcacaaagaaacctaatcttgtacataatatccggatctatcgggctaatcgtcggtatcttagcttacttgacgacagaaaaatcacatccgccgaagaaattctcattagtttggcttctaggaggcttcacgatgagtgtgacatggacatacatgatagcacaagagctagtctcattgttaatatccttaggtaatatctttggtataagcccatccgtgctaggactaaccgtcctagcttggggaaattctctaggcgatcttatcgcgaatgtgaccgtggcgtttcacggaggcaacgatggtgctcagatagcactttccggatgctacgcaggcccgctattcaacacggtaattggactaggtgtgccacttgtcatctcctcgttggccgaataccccggggtctacatcattcctagtgacaattcgttgcttgagacactagggttcttaatggtaggcttgctttgggcacttgtgataatgccaaagaagaagatgagacttgataagcttgtcggtgggggcttactcgctatttacctctgtttcttgtccttgaggttggctagagttttcggagtccttgataccgaccggtgaattttatagtaatgtaaattttgttttatttgtttttgtaatagtagttaattcttaaagaaaaaaattgcaaataggtcaaatttgtgggtcttaatttattccttaaatgaaaagatactttgtgc

SEQ ID NO: 29539 - protein, 570 aa, Arabidopsis thaliana
  peptide (1)..(570): Ceres Seq. ID no. 13496805
  misc_feature (415)..(558): Pfam Name: Sodium/calcium exchanger protein Pfam Description: Sodium/calcium exchanger protein
  misc_feature (45)..(565): Homolog of NCBI NO: 18483233 NR Description: K-exchanger-like protein [Sorghum bicolor]
  misc_feature (30)..(260): Homolog of NCBI NO: 24960738 NR Description: Putative potassium-dependent sodium-calcium
  misc_feature (313)..(566): Homolog of NCBI NO: 24960738 NR Description: Putative potassium-dependent sodium-calcium
  misc_feature (303)..(566): Homolog of NCBI NO: 18400266 NR Description: cation exchanger, putative (CAX9) [Arabidopsis
  misc_feature (45)..(311): Homolog of NCBI NO: 18400266 NR Description: cation exchanger, putative (CAX9) [Arabidopsis
  misc_feature (3)..(564): Homolog of NCBI NO: 15238663 NR Description: cation exchanger, putative (CAX8) [Arabidopsis
  misc_feature (45)..(260): Homolog of NCBI NO: 18404796 NR Description: cation exchanger, putative [Arabidopsis thaliana]
  misc_feature (303)..(566): Homolog of NCBI NO: 18404796 NR Description: cation exchanger, putative [Arabidopsis thaliana]
  misc_feature (1)..(570): Homolog of NCBI NO: 18087575 NR Description: AT5g17860/MVA3_210 [Arabidopsis thaliana]
  misc_feature (1)..(570): Homolog of NCBI NO: 15238665 NR Description: cation exchanger, putative (CAX7) [Arabidopsis
MASLFSSRLGSQSLSLLINIFFIFLIFLHFASQTPPPSGSIQTLNSFAGGDSDSCSGGLASLDDHRSKCSYIRSQSKCGPQGYIDYLKIFFCIFGQSPVLGHLVLSAWLFVLFYLLGDTAASYFCPSLDSLSKVLKLSPTMAGVTLLSLGNGAPDLFSSVVSFTRSNNGDFGLNSILGGAFFVSSFVVGTICVLIGSRDVAIDRNSFIRDVVFLLVALCCLGLIIFIGKVTIWVALCYLSIYLLYVGFLSVSHFFDRKKRMSDQILRSREDLAEMGVSLLGYIAEEKLALPEKTTQEFKIVFEDSPKRHRSCFSVLVSIIGLPLYLPRRLTIPVVCEEKWSKPCAVVSTAIAPVLLTELYCSHYSGSQRNLILYIISGSIGLIVGILAYLTTEKSHPPKKFSLVWLLGGFTMSVTWTYMIAQELVSLLISLGNIFGISPSVLGLTVLAWGNSLGDLIANVTVAFHGGNDGAQIALSGCYAGPLFNTVIGLGVPLVISSLAEYPGVYIIPSDNSLLETLGFLMVGLLWALVIMPKKKMRLDKLVGGGLLAIYLCFLSLRLARVFGVLDTDR

SEQ ID NO: 29540 - protein, 430 aa, Arabidopsis thaliana
  peptide (1)..(430): Ceres Seq. ID no. 13496806
  misc_feature (275)..(418): Pfam Name: Sodium/calcium exchanger protein Pfam Description: Sodium/calcium exchanger protein
  misc_feature (1)..(425): Homolog of NCBI NO: 18483233 NR Description: K-exchanger-like protein [Sorghum bicolor]
  misc_feature (1)..(120): Homolog of NCBI NO: 24960738 NR Description: Putative potassium-dependent sodium-calcium
  misc_feature (173)..(426): Homolog of NCBI NO: 24960738 NR Description: Putative potassium-dependent sodium-calcium
  misc_feature (163)..(426): Homolog of NCBI NO: 18400266 NR Description: cation exchanger, putative (CAX9) [Arabidopsis
  misc_feature (1)..(171): Homolog of NCBI NO: 18400266 NR Description: cation exchanger, putative (CAX9) [Arabidopsis
  misc_feature (1)..(424): Homolog of NCBI NO: 15238663 NR Description: cation exchanger, putative (CAX8) [Arabidopsis
  misc_feature (1)..(120): Homolog of NCBI NO: 18404796 NR Description: cation exchanger, putative [Arabidopsis thaliana]
  misc_feature (163)..(426): Homolog of NCBI NO: 18404796 NR Description: cation exchanger, putative [Arabidopsis thaliana]
  misc_feature (1)..(430): Homolog of NCBI NO: 18087575 NR Description: AT5g17860/MVA3_210 [Arabidopsis thaliana]
  misc_feature (1)..(430): Homolog of NCBI NO: 15238665 NR Description: cation exchanger, putative (CAX7) [Arabidopsis
MAGVTLLSLGNGAPDLFSSVVSFTRSNNGDFGLNSILGGAFFVSSFVVGTICVLIGSRDVAIDRNSFIRDVVFLLVALCCLGLIIFIGKVTIWVALCYLSIYLLYVGFLSVSHFFDRKKRMSDQILRSREDLAEMGVSLLGYIAEEKLALPEKTTQEFKIVFEDSPKRHRSCFSVLVSIIGLPLYLPRRLTIPVVCEEKWSKPCAVVSTAIAPVLLTELYCSHYSGSQRNLILYIISGSIGLIVGILAYLTTEKSHPPKKFSLVWLLGGFTMSVTWTYMIAQELVSLLISLGNIFGISPSVLGLTVLAWGNSLGDLIANVTVAFHGGNDGAQIALSGCYAGPLFNTVIGLGVPLVISSLAEYPGVYIIPSDNSLLETLGFLMVGLLWALVIMPKKKMRLDKLVGGGLLAIYLCFLSLRLARVFGVLDTDR

SEQ ID NO: 29541 - protein, 310 aa, Arabidopsis thaliana
  peptide (1)..(310): Ceres Seq. ID no. 13496807
  misc_feature (155)..(298): Pfam Name: Sodium/calcium exchanger protein Pfam Description: Sodium/calcium exchanger protein
  misc_feature (1)..(302): Homolog of NCBI NO: 15223985 NR Description: cation exchanger, putative (CAX11) [Arabidopsis
  misc_feature (1)..(304): Homolog of NCBI NO: 37534692 NR Description: putative potassium-dependent sodium-calcium
  misc_feature (1)..(305): Homolog of NCBI NO: 18483233 NR Description: K-exchanger-like protein [Sorghum bicolor]
  misc_feature (53)..(306): Homolog of NCBI NO: 24960738 NR Description: Putative potassium-dependent sodium-calcium
  misc_feature (43)..(306): Homolog of NCBI NO: 18400266 NR Description: cation exchanger, putative (CAX9) [Arabidopsis
  misc_feature (1)..(51): Homolog of NCBI NO: 18400266 NR Description: cation exchanger, putative (CAX9) [Arabidopsis
  misc_feature (1)..(304): Homolog of NCBI NO: 15238663 NR Description: cation exchanger, putative (CAX8) [Arabidopsis
  misc_feature (43)..(306): Homolog of NCBI NO: 18404796 NR Description: cation exchanger, putative [Arabidopsis thaliana]
  misc_feature (1)..(310): Homolog of NCBI NO: 18087575 NR Description: AT5g17860/MVA3_210 [Arabidopsis thaliana]
  misc_feature (1)..(310): Homolog of NCBI NO: 15238665 NR Description: cation exchanger, putative (CAX7) [Arabidopsis
MSDQILRSREDLAEMGVSLLGYIAEEKLALPEKTTQEFKIVFEDSPKRHRSCFSVLVSIIGLPLYLPRRLTIPVVCEEKWSKPCAVVSTAIAPVLLTELYCSHYSGSQRNLILYIISGSIGLIVGILAYLTTEKSHPPKKFSLVWLLGGFTMSVTWTYMIAQELVSLLISLGNIFGISPSVLGLTVLAWGNSLGDLIANVTVAFHGGNDGAQIALSGCYAGPLFNTVIGLGVPLVISSLAEYPGVYIIPSDNSLLETLGFLMVGLLWALVIMPKKKMRLDKLVGGGLLAIYLCFLSLRLARVFGVLDTDR

SEQ ID NO: 29542 - DNA, 2338 bp, Arabidopsis thaliana
  misc_feature (1)..(2338): Ceres Seq. ID no. 13497306
  misc_feature: MA Experiment ID: 108434 Result: Up-regulated in Transcription
  misc_feature: MA Experiment 108434 PARAMETER Experiment Name: At_Root_Tips_cDNA_P Parameter: Tissue Value: Root Tips
  misc_feature: MA Experiment ID: 108461 Result: Down-regulated in Transcription
  misc_feature: MA Experiment 108461 PARAMETER Experiment Name: At_Germinating_Seeds_cDNA_P Parameter: Age (day) Value: 1 vs. 0
  misc_feature: MA Experiment 108461 PARAMETER Experiment Name: At_Germinating_Seeds_cDNA_P Parameter: Tissue Value: Germinating Seeds
  misc_feature: MA Experiment ID: 108462 Result: Down-regulated in Transcription
  misc_feature: MA Experiment 108462 PARAMETER Experiment Name: At_Germinating_Seeds_cDNA_P Parameter: Age (day) Value: 2 vs. 0
  misc_feature: MA Experiment 108462 PARAMETER Experiment Name: At_Germinating_Seeds_cDNA_P Parameter: Tissue Value: Germinating Seeds
  misc_feature: MA Experiment ID: 108463 Result: Down-regulated in Transcription
  misc_feature: MA Experiment 108463 PARAMETER Experiment Name: At_Germinating_Seeds_cDNA_P Parameter: Age (day) Value: 3 vs. 0
  misc_feature: MA Experiment 108463 PARAMETER Experiment Name: At_Germinating_Seeds_cDNA_P Parameter: Tissue Value: Germinating Seeds
  misc_feature: MA Experiment ID: 108464 Result: Down-regulated in Transcription
  misc_feature: MA Experiment 108464 PARAMETER Experiment Name: At_Germinating_Seeds_cDNA_P Parameter: Age (day) Value: 4 vs. 0
  misc_feature: MA Experiment 108464 PARAMETER Experiment Name: At_Germinating_Seeds_cDNA_P Parameter: Tissue Value: Germinating Seeds
  misc_feature: MA Experiment ID: 108572 Result: Up-regulated in Transcription
  misc_feature: MA Experiment 108572 PARAMETER Experiment Name: At_Drought_cDNA_P Parameter: Timepoint (hr) Value: 1
  misc_feature: MA Experiment 108572 PARAMETER Experiment Name: At_Drought_cDNA_P Parameter: Tissue Value: Aerial
  misc_feature: MA Experiment 108572 PARAMETER Experiment Name: At_Drought_cDNA_P Parameter: Treatment Value: Drought vs. No Drought
  misc_feature: MA Experiment ID: 108573 Result: Up-regulated in Transcription
  misc_feature: MA Experiment 108573 PARAMETER Experiment Name: At_Drought_cDNA_P Parameter: Timepoint (hr) Value: 6
  misc_feature: MA Experiment 108573 PARAMETER Experiment Name: At_Drought_cDNA_P Parameter: Tissue Value: Aerial
  misc_feature: MA Experiment 108573 PARAMETER Experiment Name: At_Drought_cDNA_P Parameter: Treatment Value: Drought vs. No Drought
  misc_feature: MA Experiment ID: 108574 Result: Up-regulated in Transcription
  misc_feature: MA Experiment 108574 PARAMETER Experiment Name: At_Wounding__cDNA_P Parameter: Timepoint (hr) Value: 1
  misc_feature: MA Experiment 108574 PARAMETER Experiment Name: At_Wounding__cDNA_P Parameter: Tissue Value: Aerial
  misc_feature: MA Experiment 108574 PARAMETER Experiment Name: At_Wounding__cDNA_P Parameter: Treatment Value: Wounding vs. No Wounding
  misc_feature: MA Experiment ID: 108576 Result: Down-regulated in Transcription
  misc_feature: MA Experiment 108576 PARAMETER Experiment Name: At_42deg_Heat_cDNA_P Parameter: Temperature (deg C) Value: 42 vs. 22
  misc_feature: MA Experiment 108576 PARAMETER Experiment Name: At_42deg_Heat_cDNA_P Parameter: Timepoint (hr) Value: 1
  misc_feature: MA Experiment 108576 PARAMETER Experiment Name: At_42deg_Heat_cDNA_P Parameter: Tissue Value: Aerial
  misc_feature: MA Experiment ID: 108585 Result: Up-regulated in Transcription
  misc_feature: MA Experiment 108585 PARAMETER Experiment Name: At_5mM_NaNP_cDNA_P Parameter: Timepoint (hr) Value: 6
  misc_feature: MA Experiment 108585 PARAMETER Experiment Name: At_5mM_NaNP_cDNA_P Parameter: Tissue Value: Aerial
  misc_feature: MA Experiment 108585 PARAMETER Experiment Name: At_5mM_NaNP_cDNA_P Parameter: Treatment Value: null
  misc_feature: MA Experiment ID: 108608 Result: Up-regulated in Transcription
  misc_feature: MA Experiment 108608 PARAMETER Experiment Name: At_100uM_ABA_cDNA_P Parameter: Timepoint (hr) Value: 1
  misc_feature: MA Experiment 108608 PARAMETER Experiment Name: At_100uM_ABA_cDNA_P Parameter: Tissue Value: Aerial
  misc_feature: MA Experiment 108608 PARAMETER Experiment Name: At_100uM_ABA_cDNA_P Parameter: Treatment Value: 100uM ABA vs. No Treatment
  misc_feature: MA Experiment ID: 108668 Result: Up-regulated in Transcription
  misc_feature: MA Experiment 108668 PARAMETER Experiment Name: At_2mM_SA_cDNA_P Parameter: Plant Line Value: WS
  misc_feature: MA Experiment 108668 PARAMETER Experiment Name: At_2mM_SA_cDNA_P Parameter: Timepoint (hr) Value: 6
  misc_feature: MA Experiment 108668 PARAMETER Experiment Name: At_2mM_SA_cDNA_P Parameter: Treatment Value: 2mM SA vs. No Treatment
  misc_feature: MA Experiment ID: 20000069 Result: Up-regulated in Transcription
  misc_feature: MA Experiment 20000069 PARAMETER Experiment Name: At_100uM_ABA_Mutants_cDNA_P Parameter: Plant Line Value: CS23
  misc_feature: MA Experiment 20000069 PARAMETER Experiment Name: At_100uM_ABA_Mutants_cDNA_P Parameter: Timepoint (hr) Value: 6
  misc_feature: MA Experiment 20000069 PARAMETER Experiment Name: At_100uM_ABA_Mutants_cDNA_P Parameter: Tissue Value: Aerial
  misc_feature: MA Experiment 20000069 PARAMETER Experiment Name: At_100uM_ABA_Mutants_cDNA_P Parameter: Treatment Value: 100uM ABA vs. No Treatment
  misc_feature: MA Experiment ID: 20000070 Result: Up-regulated in Transcription
  misc_feature: MA Experiment 20000070 PARAMETER Experiment Name: At_100uM_ABA_Mutants_cDNA_P Parameter: Plant Line Value: CS24
  misc_feature: MA Experiment 20000070 PARAMETER Experiment Name: At_100uM_ABA_Mutants_cDNA_P Parameter: Timepoint (hr) Value: 6
  misc_feature: MA Experiment 20000070 PARAMETER Experiment Name: At_100uM_ABA_Mutants_cDNA_P Parameter: Tissue Value: Aerial
  misc_feature: MA Experiment 20000070 PARAMETER Experiment Name: At_100uM_ABA_Mutants_cDNA_P Parameter: Treatment Value: 100uM ABA vs. No Treatment
  misc_feature: MA Experiment ID: 20000088 Result: Up-regulated in Transcription
  misc_feature: MA Experiment 20000088 PARAMETER Experiment Name: At_100uM_ABA_Mutants_cDNA_P Parameter: Plant Line Value: Landsberg
  misc_feature: MA Experiment 20000088 PARAMETER Experiment Name: At_100uM_ABA_Mutants_cDNA_P Parameter: Timepoint (hr) Value: 6
  misc_feature: MA Experiment 20000088 PARAMETER Experiment Name: At_100uM_ABA_Mutants_cDNA_P Parameter: Tissue Value: Aerial
  misc_feature: MA Experiment 20000088 PARAMETER Experiment Name: At_100uM_ABA_Mutants_cDNA_P Parameter: Treatment Value: 100uM ABA vs. No Treatment
  misc_feature: MA Experiment ID: 20000166 Result: Up-regulated in Transcription
  misc_feature: MA Experiment 20000166 PARAMETER Experiment Name: At_100uM_ABA_P Parameter: Age (day) Value: 14
  misc_feature: MA Experiment 20000166 PARAMETER Experiment Name: At_100uM_ABA_P Parameter: Organism Value: A. thaliana
  misc_feature: MA Experiment 20000166 PARAMETER Experiment Name: At_100uM_ABA_P Parameter: Plant Line Value: WS
  misc_feature: MA Experiment 20000166 PARAMETER Experiment Name: At_100uM_ABA_P Parameter: Timepoint (hr) Value: 1
  misc_feature: MA Experiment 20000166 PARAMETER Experiment Name: At_100uM_ABA_P Parameter: Tissue Value: Aerial
  misc_feature: MA Experiment 20000166 PARAMETER Experiment Name: At_100uM_ABA_P Parameter: Treatment Value: 100uM ABA vs. No Treatment
  misc_feature: MA Experiment ID: 20000182 Result: Up-regulated in Transcription
  misc_feature: MA Experiment 20000182 PARAMETER Experiment Name: At_2mM_SA_P Parameter: Age (day) Value: 14
  misc_feature: MA Experiment 20000182 PARAMETER Experiment Name: At_2mM_SA_P Parameter: Organism Value: A. thaliana
  misc_feature: MA Experiment 20000182 PARAMETER Experiment Name: At_2mM_SA_P Parameter: Plant Line Value: WS
  misc_feature: MA Experiment 20000182 PARAMETER Experiment Name: At_2mM_SA_P Parameter: Timepoint (hr) Value: 6
  misc_feature: MA Experiment 20000182 PARAMETER Experiment Name: At_2mM_SA_P Parameter: Tissue Value: Aerial
  misc_feature: MA Experiment 20000182 PARAMETER Experiment Name: At_2mM_SA_P Parameter: Treatment Value: 2mM SA vs. No Treatment
  misc_feature: MA Experiment ID: 20000436 Result: Up-regulated in Transcription
  misc_feature: MA Experiment 20000436 PARAMETER Experiment Name: At_Drought_P Parameter: Age (day) Value: 7
  misc_feature: MA Experiment 20000436 PARAMETER Experiment Name: At_Drought_P Parameter: Organism Value: A. thaliana
  misc_feature: MA Experiment 20000436 PARAMETER Experiment Name: At_Drought_P Parameter: Plant Line Value: WS
  misc_feature: MA Experiment 20000436 PARAMETER Experiment Name: At_Drought_P Parameter: Timepoint (hr) Value: 12
  misc_feature: MA Experiment 20000436 PARAMETER Experiment Name: At_Drought_P Parameter: Tissue Value: Whole Plant
  misc_feature: MA Experiment 20000436 PARAMETER Experiment Name: At_Drought_P Parameter: Treatment Value: Drought vs. No Drought
  misc_feature: MA Experiment ID: 20000437 Result: Up-regulated in Transcription
  misc_feature: MA Experiment 20000437 PARAMETER Experiment Name: At_Drought_P Parameter: Age (day) Value: 8
  misc_feature: MA Experiment 20000437 PARAMETER Experiment Name: At_Drought_P Parameter: Organism Value: A. thaliana
  misc_feature: MA Experiment 20000437 PARAMETER Experiment Name: At_Drought_P Parameter: Plant Line Value: WS
  misc_feature: MA Experiment 20000437 PARAMETER Experiment Name: At_Drought_P Parameter: Timepoint (hr) Value: 24
  misc_feature: MA Experiment 20000437 PARAMETER Experiment Name: At_Drought_P Parameter: Tissue Value: Whole Plant
  misc_feature: MA Experiment 20000437 PARAMETER Experiment Name: At_Drought_P Parameter: Treatment Value: Drought vs. No Drought
  misc_feature: MA Experiment ID: 20001557 Result: Up-regulated in Transcription
  misc_feature: MA Experiment 20001557 PARAMETER Experiment Name: At_Drought_Soil_Dry_P Parameter: Age (day) Value: 27
  misc_feature: MA Experiment 20001557 PARAMETER Experiment Name: At_Drought_Soil_Dry_P Parameter: Organism Value: A. thaliana
  misc_feature: MA Experiment 20001557 PARAMETER Experiment Name: At_Drought_Soil_Dry_P Parameter: Plant Line Value: WS
  misc_feature: MA Experiment 20001557 PARAMETER Experiment Name: At_Drought_Soil_Dry_P Parameter: Post Timepoint (hr) Value: 3
  misc_feature: MA Experiment 20001557 PARAMETER Experiment Name: At_Drought_Soil_Dry_P Parameter: Post-Treatment Value: Re-Water vs. No Drought
  misc_feature: MA Experiment 20001557 PARAMETER Experiment Name: At_Drought_Soil_Dry_P Parameter: Timepoint (day) Value: 13
  misc_feature: MA Experiment 20001557 PARAMETER Experiment Name: At_Drought_Soil_Dry_P Parameter: Treatment Value: Drought vs. No Drought
  misc_feature: MA Experiment ID: 20001560 Result: Up-regulated in Transcription
  misc_feature: MA Experiment 20001560 PARAMETER Experiment Name: At_Drought_Soil_Dry_P Parameter: Age (day) Value: 28
  misc_feature: MA Experiment 20001560 PARAMETER Experiment Name: At_Drought_Soil_Dry_P Parameter: Organism Value: A. thaliana
  misc_feature: MA Experiment 20001560 PARAMETER Experiment Name: At_Drought_Soil_Dry_P Parameter: Plant Line Value: WS
  misc_feature: MA Experiment 20001560 PARAMETER Experiment Name: At_Drought_Soil_Dry_P Parameter: Post Timepoint (hr) Value: None
  misc_feature: MA Experiment 20001560 PARAMETER Experiment Name: At_Drought_Soil_Dry_P Parameter: Post-Treatment Value: None
  misc_feature: MA Experiment 20001560 PARAMETER Experiment Name: At_Drought_Soil_Dry_P Parameter: Timepoint (day) Value: 14
  misc_feature: MA Experiment 20001560 PARAMETER Experiment Name: At_Drought_Soil_Dry_P Parameter: Treatment Value: Drought vs. No Drought
  misc_feature: MA Experiment ID: 20001905 Result: Up-regulated in Transcription
  misc_feature: MA Experiment 20001905 PARAMETER Experiment Name: At_Drought_Reproduction_P Parameter: Age (day) Value: 40
  misc_feature: MA Experiment 20001905 PARAMETER Experiment Name: At_Drought_Reproduction_P Parameter: Organism Value: A. thaliana
  misc_feature: MA Experiment 20001905 PARAMETER Experiment Name: At_Drought_Reproduction_P Parameter: Plant Line Value: WS
  misc_feature: MA Experiment 20001905 PARAMETER Experiment Name: At_Drought_Reproduction_P Parameter: Timepoint (day) Value: 10
  misc_feature: MA Experiment 20001905 PARAMETER Experiment Name: At_Drought_Reproduction_P Parameter: Tissue Value: Rosettes
  misc_feature: MA Experiment 20001905 PARAMETER Experiment Name: At_Drought_Reproduction_P Parameter: Treatment Value: Drought vs. No Drought
  misc_feature: MA Experiment ID: 20001911 Result: Up-regulated in Transcription
  misc_feature: MA Experiment 20001911 PARAMETER Experiment Name: At_Drought_Reproduction_P Parameter: Age (day) Value: 40
  misc_feature: MA Experiment 20001911 PARAMETER Experiment Name: At_Drought_Reproduction_P Parameter: Organism Value: A. thaliana
  misc_feature: MA Experiment 20001911 PARAMETER Experiment Name: At_Drought_Reproduction_P Parameter: Plant Line Value: WS
  misc_feature: MA Experiment 20001911 PARAMETER Experiment Name: At_Drought_Reproduction_P Parameter: Timepoint (day) Value: 10
  misc_feature: MA Experiment 20001911 PARAMETER Experiment Name: At_Drought_Reproduction_P Parameter: Tissue Value: Flowers
  misc_feature: MA Experiment 20001911 PARAMETER Experiment Name: At_Drought_Reproduction_P Parameter: Treatment Value: Drought vs. No Drought
agaaaccaccattaaccctaatttttgccgaactcgtcttctgctgaaaaccctagatctacagatctcccgaatctcccagggagataatttgaagatggtgtctgacgctagcaagaagaaggcagctcagaagaaagctgctgccgccgctaaaagaggtggtaaagctgctgctccatccaaatccgccgctacttcttccaacggtgttgatagcttgtcaagcggtgtcgatgctcttcaaatttctgatcggacttgtaccggagttctctgttctcatcctcaatctagagatatccgaatagaatctctgtctgtgacgtttcatggttatgaccttattgttgattcaatgttggagcttaactatggaaggcgttatggtctccttgggttgaatggttgtggaaagtccactcttttaactgcaatcggacgcagagagataccgattccggatcaaatggatatctaccatttgtctcacgagattgaagctactgacatgtcttccctggaggctgttgttagctgtgatgaggagaggttgaggttagagaaagaagttgaaattcttgtacagcaggatgatggaggcggagagcgtcttcaatctatctatgagaggttagacgccatggatgcagaaaccgctgagaaacgtgctgctgaaattctgtttggacttggtttcgacaaggaaatgcaggcgaagaagacaaaagatttctctggtggttggaggatgagaattgcattggcaagagcactcttcattatgccgacaatccttttgcttgatgagccgactaatcatttagatttggaagcttgtgtgtggctagaagagagcctgaagaattttgatcgcatccttgttgtggtatcccactcacaggatttcttgaatggagtgtgtacaaacatcatccacatgcagagcaaacagctcaagtactacactggtaactttgatcagtattgccagactcgttctgaacttgaagagaaccagatgaaacaatacagatgggagcaggagcagatttctcacatgaaggagtacattgctcggtttggtcacggttcagccaaacttgctcgtcaagcacagagtaaggagaaaacattggcaaagatggagagaggtgggctcactgaaaaggttgctagagacagtgttctcgttttccgttttgctgatgttgggaagcttccaccgccagtgcttcagtttgttgaagtgtcttttggttacacaccggactatcttatttacaagaacattgactttggtgtcgacttggactcgagggttgcccttgtgggacctaatggagctggaaagagtacacttttgaagctcatgactggtgaattgcacccaactgaaggaatggtgcgacgtcacaaccacttgaagattgctcagtaccatcagcatctggctgagaagctagacttggaattgcctgcacttctctacatgatgagggagttcccgggtactgaagaggagaaaatgagagctgcgattggtaggtttggtctaactggtaaggctcaagtgatgccaatgaagaatctatctgacggacaaaggagcagagtgatctttgcgtggttagcttataagcagcctaacatgcttcttcttgatgagcctactaaccatttggatatcgagacaatcgactcgcttgctgaggcattgaatgagtgggatggtggtttggttctggttagtcacgacttcaggttgatcaaccaagtggctcatgagatatgggtttgcgagaaacaatgcatcactaaatggaatggtgacattatggacttcaagaggcaccttaaggctaaagccggacttgaagattgaagatagagagtcgagtcttcttctcttgatggaaaatggaaaagactcagattggggtcacatgctaagagagagagagggaaggctttggtttttttgatgggtttgggaatggtttttaacgagttctaaagccacacacttgagagacagagaaaccatactcactaatctctgcatttccttaagaggtcagagattctttctatattagtattatcattatcatgtgcaccttctttttttttcgttattgttgttgaacgtttttttgaaggcgaaacagagagaaaagtaatattttttggtggtattgtaggattttttttttctgtttttttaaagactgagatgttgacgattatggtattatatttaatattaaagtgggaatattctcataattatattcgaatattctcataattatattcgaatattcgttggaaaggc

SEQ ID NO: 29543 - protein, 627 aa, Arabidopsis thaliana
  peptide (1)..(627): Ceres Seq. ID no. 13497307
  misc_feature (126)..(317): Pfam Name: ABC transporter Pfam Description: ABC transporter
  misc_feature (126)..(317): Pfam Name: ABC transporter Pfam Description: ABC transporter
  misc_feature (32)..(619): Homolog of NCBI NO: 6320874 NR Description: Hypothetical ORF; Yer036cp [Saccharomyces
  misc_feature (37)..(622): Homolog of NCBI NO: 27707592 NR Description: similar to ATP-binding cassette, sub-family F,
  misc_feature (34)..(627): Homolog of NCBI NO: 18859989 NR Description: CG9281-PB [Drosophila melanogaster]
  misc_feature (33)..(622): Homolog of NCBI NO: 27881506 NR Description: ATP-binding cassette, sub-family F, member 2
  misc_feature (33)..(622): Homolog of NCBI NO: 10947137 NR Description: ATP-binding cassette, sub-family F, member 2
  misc_feature (32)..(619): Homolog of NCBI NO: 6320874 NR Description: Hypothetical ORF; Yer036cp [Saccharomyces
  misc_feature (34)..(627): Homolog of NCBI NO: 18859989 NR Description: CG9281-PB [Drosophila melanogaster]
  misc_feature (33)..(622): Homolog of NCBI NO: 10947137 NR Description: ATP-binding cassette, sub-family F, member 2
  misc_feature (33)..(627): Homolog of NCBI NO: 28071305 NR Description: putative ABC transporter [Oryza sativa (japonica
  misc_feature (33)..(578): Homolog of NCBI NO: 7573600 NR Description: ABC transporter homolog [Populus nigra]
  misc_feature (33)..(624): Homolog of NCBI NO: 28436765 NR Description: Similar to ATP-binding cassette, sub-family F
  misc_feature (33)..(622): Homolog of NCBI NO: 28502799 NR Description: Similar to ATP-binding cassette, sub-family F
  misc_feature (33)..(622): Homolog of NCBI NO: 10179834 NR Description: iron inhibited ABC transporter 2 [Homo sapiens]
  misc_feature (33)..(622): Homolog of NCBI NO: 27881506 NR Description: ATP-binding cassette, sub-family F, member 2
  misc_feature (37)..(622): Homolog of NCBI NO: 27707592 NR Description: similar to ATP-binding cassette, sub-family F,
  misc_feature (33)..(622): Homolog of NCBI NO: 10179834 NR Description: iron inhibited ABC transporter 2 [Homo sapiens]
  misc_feature (33)..(622): Homolog of NCBI NO: 28502799 NR Description: Similar to ATP-binding cassette, sub-family F
  misc_feature (33)..(624): Homolog of NCBI NO: 28436765 NR Description: Similar to ATP-binding cassette, sub-family F
  misc_feature (33)..(578): Homolog of NCBI NO: 7573600 NR Description: ABC transporter homolog [Populus nigra]
  misc_feature (33)..(627): Homolog of NCBI NO: 28071305 NR Description: putative ABC transporter [Oryza sativa (japonica
ETTINPNFCRTRLLLKTLDLQISRISQGDNLKMVSDASKKKAAQKKAAAAAKRGGKAAAPSKSAATSSNGVDSLSSGVDALQISDRTCTGVLCSHPQSRDIRIESLSVTFHGYDLIVDSMLELNYGRRYGLLGLNGCGKSTLLTAIGRREIPIPDQMDIYHLSHEIEATDMSSLEAVVSCDEERLRLEKEVEILVQQDDGGGERLQSIYERLDAMDAETAEKRAAEILFGLGFDKEMQAKKTKDFSGGWRMRIALARALFIMPTILLLDEPTNHLDLEACVWLEESLKNFDRILVVVSHSQDFLNGVCTNIIHMQSKQLKYYTGNFDQYCQTRSELEENQMKQYRWEQEQISHMKEYIARFGHGSAKLARQAQSKEKTLAKMERGGLTEKVARDSVLVFRFADVGKLPPPVLQFVEVSFGYTPDYLIYKNIDFGVDLDSRVALVGPNGAGKSTLLKLMTGELHPTEGMVRRHNHLKIAQYHQHLAEKLDLELPALLYMMREFPGTEEEKMRAAIGRFGLTGKAQVMPMKNLSDGQRSRVIFAWLAYKQPNMLLLDEPTNHLDIETIDSLAEALNEWDGGLVLVSHDFRLINQVAHEIWVCEKQCITKWNGDIMDFKRHLKAKAGLED

SEQ ID NO: 29544 - protein, 595 aa, Arabidopsis thaliana
  peptide (1)..(595): Ceres Seq. ID no. 13497308
  misc_feature (94)..(285): Pfam Name: ABC transporter Pfam Description: ABC transporter
  misc_feature (94)..(285): Pfam Name: ABC transporter Pfam Description: ABC transporter
  misc_feature (1)..(587): Homolog of NCBI NO: 6320874 NR Description: Hypothetical ORF; Yer036cp [Saccharomyces
  misc_feature (5)..(590): Homolog of NCBI NO: 27707592 NR Description: similar to ATP-binding cassette, sub-family F,
  misc_feature (2)..(595): Homolog of NCBI NO: 18859989 NR Description: CG9281-PB [Drosophila melanogaster]
  misc_feature (1)..(590): Homolog of NCBI NO: 27881506 NR Description: ATP-binding cassette, sub-family F, member 2
  misc_feature (1)..(590): Homolog of NCBI NO: 10947137 NR Description: ATP-binding cassette, sub-family F, member 2
  misc_feature (1)..(587): Homolog of NCBI NO: 6320874 NR Description: Hypothetical ORF; Yer036cp [Saccharomyces
  misc_feature (2)..(595): Homolog of NCBI NO: 18859989 NR Description: CG9281-PB [Drosophila melanogaster]
  misc_feature (1)..(590): Homolog of NCBI NO: 10947137 NR Description: ATP-binding cassette, sub-family F, member 2
  misc_feature (1)..(595): Homolog of NCBI NO: 28071305 NR Description: putative ABC transporter [Oryza sativa (japonica
  misc_feature (1)..(546): Homolog of NCBI NO: 7573600 NR Description: ABC transporter homolog [Populus nigra]
  misc_feature (1)..(592): Homolog of NCBI NO: 28436765 NR Description: Similar to ATP-binding cassette, sub-family F
  misc_feature (1)..(590): Homolog of NCBI NO: 28502799 NR Description: Similar to ATP-binding cassette, sub-family F
  misc_feature (1)..(590): Homolog of NCBI NO: 10179834 NR Description: iron inhibited ABC transporter 2 [Homo sapiens]
  misc_feature (1)..(590): Homolog of NCBI NO: 27881506 NR Description: ATP-binding cassette, sub-family F, member 2
  misc_feature (5)..(590): Homolog of NCBI NO: 27707592 NR Description: similar to ATP-binding cassette, sub-family F,
  misc_feature (1)..(590): Homolog of NCBI NO: 10179834 NR Description: iron inhibited ABC transporter 2 [Homo sapiens]
  misc_feature (1)..(590): Homolog of NCBI NO: 28502799 NR Description: Similar to ATP-binding cassette, sub-family F
  misc_feature (1)..(592): Homolog of NCBI NO: 28436765 NR Description: Similar to ATP-binding cassette, sub-family F
  misc_feature (1)..(546): Homolog of NCBI NO: 7573600 NR Description: ABC transporter homolog [Populus nigra]
  misc_feature (1)..(595): Homolog of NCBI NO: 28071305 NR Description: putative ABC transporter [Oryza sativa (japonica
MVSDASKKKAAQKKAAAAAKRGGKAAAPSKSAATSSNGVDSLSSGVDALQISDRTCTGVLCSHPQSRDIRIESLSVTFHGYDLIVDSMLELNYGRRYGLLGLNGCGKSTLLTAIGRREIPIPDQMDIYHLSHEIEATDMSSLEAVVSCDEERLRLEKEVEILVQQDDGGGERLQSIYERLDAMDAETAEKRAAEILFGLGFDKEMQAKKTKDFSGGWRMRIALARALFIMPTILLLDEPTNHLDLEACVWLEESLKNFDRILVVVSHSQDFLNGVCTNIIHMQSKQLKYYTGNFDQYCQTRSELEENQMKQYRWEQEQISHMKEYIARFGHGSAKLARQAQSKEKTLAKMERGGLTEKVARDSVLVFRFADVGKLPPPVLQFVEVSFGYTPDYLIYKNIDFGVDLDSRVALVGPNGAGKSTLLKLMTGELHPTEGMVRRHNHLKIAQYHQHLAEKLDLELPALLYMMREFPGTEEEKMRAAIGRFGLTGKAQVMPMKNLSDGQRSRVIFAWLAYKQPNMLLLDEPTNHLDIETIDSLAEALNEWDGGLVLVSHDFRLINQVAHEIWVCEKQCITKWNGDIMDFKRHLKAKAGLED

SEQ ID NO: 29545 - protein, 508 aa, Arabidopsis thaliana
  peptide (1)..(508): Ceres Seq. ID no. 13497309
  misc_feature (7)..(198): Pfam Name: ABC transporter Pfam Description: ABC transporter
  misc_feature (7)..(198): Pfam Name: ABC transporter Pfam Description: ABC transporter
  misc_feature (1)..(500): Homolog of NCBI NO: 6320874 NR Description: Hypothetical ORF; Yer036cp [Saccharomyces
  misc_feature (1)..(503): Homolog of NCBI NO: 27707592 NR Description: similar to ATP-binding cassette, sub-family F,
  misc_feature (1)..(508): Homolog of NCBI NO: 18859989 NR Description: CG9281-PB [Drosophila melanogaster]
  misc_feature (1)..(503): Homolog of NCBI NO: 27881506 NR Description: ATP-binding cassette, sub-family F, member 2
  misc_feature (1)..(503): Homolog of NCBI NO: 10947137 NR Description: ATP-binding cassette, sub-family F, member 2
  misc_feature (1)..(500): Homolog of NCBI NO: 6320874 NR Description: Hypothetical ORF; Yer036cp [Saccharomyces
  misc_feature (1)..(508): Homolog of NCBI NO: 18859989 NR Description: CG9281-PB [Drosophila melanogaster]
  misc_feature (1)..(503): Homolog of NCBI NO: 10947137 NR Description: ATP-binding cassette, sub-family F, member 2
  misc_feature (1)..(508): Homolog of NCBI NO: 28071305 NR Description: putative ABC transporter [Oryza sativa (japonica
  misc_feature (1)..(459): Homolog of NCBI NO: 7573600 NR Description: ABC transporter homolog [Populus nigra]
  misc_feature (1)..(505): Homolog of NCBI NO: 28436765 NR Description: Similar to ATP-binding cassette, sub-family F
  misc_feature (1)..(503): Homolog of NCBI NO: 28502799 NR Description: Similar to ATP-binding cassette, sub-family F
  misc_feature (1)..(503): Homolog of NCBI NO: 10179834 NR Description: iron inhibited ABC transporter 2 [Homo sapiens]
  misc_feature (1)..(503): Homolog of NCBI NO: 27881506 NR Description: ATP-binding cassette, sub-family F, member 2
  misc_feature (1)..(503): Homolog of NCBI NO: 27707592 NR Description: similar to ATP-binding cassette, sub-family F,
  misc_feature (1)..(503): Homolog of NCBI NO: 10179834 NR Description: iron inhibited ABC transporter 2 [Homo sapiens]
  misc_feature (1)..(503): Homolog of NCBI NO: 28502799 NR Description: Similar to ATP-binding cassette, sub-family F
  misc_feature (1)..(505): Homolog of NCBI NO: 28436765 NR Description: Similar to ATP-binding cassette, sub-family F
  misc_feature (1)..(459): Homolog of NCBI NO: 7573600 NR Description: ABC transporter homolog [Populus nigra]
  misc_feature (1)..(508): Homolog of NCBI NO: 28071305 NR Description: putative ABC transporter [Oryza sativa (japonica
MLELNYGRRYGLLGLNGCGKSTLLTAIGRREIPIPDQMDIYHLSHEIEATDMSSLEAVVSCDEERLRLEKEVEILVQQDDGGGERLQSIYERLDAMDAETAEKRAAEILFGLGFDKEMQAKKTKDFSGGWRMRIALARALFIMPTILLLDEPTNHLDLEACVWLEESLKNFDRILVVVSHSQDFLNGVCTNIIHMQSKQLKYYTGNFDQYCQTRSELEENQMKQYRWEQEQISHMKEYIARFGHGSAKLARQAQSKEKTLAKMERGGLTEKVARDSVLVFRFADVGKLPPPVLQFVEVSFGYTPDYLIYKNIDFGVDLDSRVALVGPNGAGKSTLLKLMTGELHPTEGMVRRHNHLKIAQYHQHLAEKLDLELPALLYMMREFPGTEEEKMRAAIGRFGLTGKAQVMPMKNLSDGQRSRVIFAWLAYKQPNMLLLDEPTNHLDIETIDSLAEALNEWDGGLVLVSHDFRLINQVAHEIWVCEKQCITKWNGDIMDFKRHLKAKAGLED

SEQ ID NO: 29546 - DNA, 1129 bp, Arabidopsis thaliana
  misc_feature (1)..(1129): Ceres Seq. ID no. 12332178
  misc_feature: MA Experiment ID: 108434 Result: Down-regulated in Transcription
  misc_feature: MA Experiment 108434 PARAMETER Experiment Name: At_Root_Tips_cDNA_P Parameter: Tissue Value: Root Tips
  misc_feature: MA Experiment ID: 108461 Result: Up-regulated in Transcription
  misc_feature: MA Experiment 108461 PARAMETER Experiment Name: At_Germinating_Seeds_cDNA_P Parameter: Age (day) Value: 1 vs. 0
  misc_feature: MA Experiment 108461 PARAMETER Experiment Name: At_Germinating_Seeds_cDNA_P Parameter: Tissue Value: Germinating Seeds
  misc_feature: MA Experiment ID: 108462 Result: Up-regulated in Transcription
  misc_feature: MA Experiment 108462 PARAMETER Experiment Name: At_Germinating_Seeds_cDNA_P Parameter: Age (day) Value: 2 vs. 0
  misc_feature: MA Experiment 108462 PARAMETER Experiment Name: At_Germinating_Seeds_cDNA_P Parameter: Tissue Value: Germinating Seeds
  misc_feature: MA Experiment ID: 108464 Result: Up-regulated in Transcription
  misc_feature: MA Experiment 108464 PARAMETER Experiment Name: At_Germinating_Seeds_cDNA_P Parameter: Age (day) Value: 4 vs. 0
  misc_feature: MA Experiment 108464 PARAMETER Experiment Name: At_Germinating_Seeds_cDNA_P Parameter: Tissue Value: Germinating Seeds
  misc_feature: MA Experiment ID: 108573 Result: Up-regulated in Transcription
  misc_feature: MA Experiment 108573 PARAMETER Experiment Name: At_Drought_cDNA_P Parameter: Timepoint (hr) Value: 6
  misc_feature: MA Experiment 108573 PARAMETER Experiment Name: At_Drought_cDNA_P Parameter: Tissue Value: Aerial
  misc_feature: MA Experiment 108573 PARAMETER Experiment Name: At_Drought_cDNA_P Parameter: Treatment Value: Drought vs. No Drought
  misc_feature: MA Experiment ID: 108595 Result: Down-regulated in Transcription
  misc_feature: MA Experiment 108595 PARAMETER Experiment Name: At_Ler-pi_Ovule_cDNA_P Parameter: Plant Line Value: null
  misc_feature: MA Experiment ID: 20000180 Result: Up-regulated in Transcription
  misc_feature: MA Experiment 20000180 PARAMETER Experiment Name: At_Germinating_Seeds_P Parameter: Age (hr) Value: 24 vs. 0
  misc_feature: MA Experiment 20000180 PARAMETER Experiment Name: At_Germinating_Seeds_P Parameter: Tissue Value: Germinating Seeds
  misc_feature: MA Experiment ID: 20000264 Result: Down-regulated in Transcription
  misc_feature: MA Experiment 20000264 PARAMETER Experiment Name: At_Open_Flower_P Parameter: Age (day) Value: 21
  misc_feature: MA Experiment 20000264 PARAMETER Experiment Name: At_Open_Flower_P Parameter: Plant Line Value: WS
  misc_feature: MA Experiment 20000264 PARAMETER Experiment Name: At_Open_Flower_P Parameter: Tissue Value: Open Flower vs. Whole Plant
  misc_feature: MA Experiment ID: 20000265 Result: Down-regulated in Transcription
  misc_feature: MA Experiment 20000265 PARAMETER Experiment Name: At_Open_Flower_P Parameter: Age (day) Value: 21
  misc_feature: MA Experiment 20000265 PARAMETER Experiment Name: At_Open_Flower_P Parameter: Plant Line Value: WS
  misc_feature: MA Experiment 20000265 PARAMETER Experiment Name: At_Open_Flower_P Parameter: Tissue Value: Closed Flower vs. Whole Plant
  misc_feature: MA Experiment ID: 20000437 Result: Down-regulated in Transcription
  misc_feature: MA Experiment 20000437 PARAMETER Experiment Name: At_Drought_P Parameter: Age (day) Value: 8
  misc_feature: MA Experiment 20000437 PARAMETER Experiment Name: At_Drought_P Parameter: Organism Value: A. thaliana
  misc_feature: MA Experiment 20000437 PARAMETER Experiment Name: At_Drought_P Parameter: Plant Line Value: WS
  misc_feature: MA Experiment 20000437 PARAMETER Experiment Name: At_Drought_P Parameter: Timepoint (hr) Value: 24
  misc_feature: MA Experiment 20000437 PARAMETER Experiment Name: At_Drought_P Parameter: Tissue Value: Whole Plant
  misc_feature: MA Experiment 20000437 PARAMETER Experiment Name: At_Drought_P Parameter: Treatment Value: Drought vs. No Drought
  misc_feature: MA Experiment ID: 20000441 Result: Up-regulated in Transcription
  misc_feature: MA Experiment 20000441 PARAMETER Experiment Name: At_1uM_BR-BRZ__P Parameter: Tissue Value: Shoot Apices
  misc_feature: MA Experiment 20000441 PARAMETER Experiment Name: At_1uM_BR-BRZ__P Parameter: Treatment Value: 1uM BR vs. No Treatment
  misc_feature: MA Experiment ID: 20000445 Result: Down-regulated in Transcription
  misc_feature: MA Experiment 20000445 PARAMETER Experiment Name: At_100uM_NAA__P Parameter: Age (day) Value: 14
  misc_feature: MA Experiment 20000445 PARAMETER Experiment Name: At_100uM_NAA__P Parameter: Organism Value: A. thaliana
  misc_feature: MA Experiment 20000445 PARAMETER Experiment Name: At_100uM_NAA__P Parameter: Plant Line Value: WS
  misc_feature: MA Experiment 20000445 PARAMETER Experiment Name: At_100uM_NAA__P Parameter: Timepoint (hr) Value: 6
  misc_feature: MA Experiment 20000445 PARAMETER Experiment Name: At_100uM_NAA__P Parameter: Tissue Value: Aerial
  misc_feature: MA Experiment 20000445 PARAMETER Experiment Name: At_100uM_NAA__P Parameter: Treatment Value: 100uM NAA vs. No Treatment
  misc_feature: MA Experiment ID: 20001450 Result: Up-regulated in Transcription
  misc_feature: MA Experiment 20001450 PARAMETER Experiment Name: At_Far-red-induction_P Parameter: Age (day) Value: 7
  misc_feature: MA Experiment 20001450 PARAMETER Experiment Name: At_Far-red-induction_P Parameter: Light Value: Far-red vs. White
  misc_feature: MA Experiment 20001450 PARAMETER Experiment Name: At_Far-red-induction_P Parameter: Organism Value: A. thaliana
  misc_feature: MA Experiment 20001450 PARAMETER Experiment Name: At_Far-red-induction_P Parameter: Plant Line Value: Columbia
  misc_feature: MA Experiment 20001450 PARAMETER Experiment Name: At_Far-red-induction_P Parameter: Timepoint (hr) Value: 8
  misc_feature: MA Experiment 20001450 PARAMETER Experiment Name: At_Far-red-induction_P Parameter: Tissue Value: Whole Plant
  misc_feature: MA Experiment ID: 20001451 Result: Up-regulated in Transcription
  misc_feature: MA Experiment 20001451 PARAMETER Experiment Name: At_Far-red-induction_P Parameter: Age (day) Value: 7
  misc_feature: MA Experiment 20001451 PARAMETER Experiment Name: At_Far-red-induction_P Parameter: Light Value: Far-red vs. White
  misc_feature: MA Experiment 20001451 PARAMETER Experiment Name: At_Far-red-induction_P Parameter: Organism Value: A. thaliana
  misc_feature: MA Experiment 20001451 PARAMETER Experiment Name: At_Far-red-induction_P Parameter: Plant Line Value: Columbia
  misc_feature: MA Experiment 20001451 PARAMETER Experiment Name: At_Far-red-induction_P Parameter: Timepoint (hr) Value: 24
  misc_feature: MA Experiment 20001451 PARAMETER Experiment Name: At_Far-red-induction_P Parameter: Tissue Value: Whole Plant
  misc_feature: MA Experiment ID: 20001555 Result: Down-regulated in Transcription
  misc_feature: MA Experiment 20001555 PARAMETER Experiment Name: At_Drought_Soil_Dry_P Parameter: Age (day) Value: 24
  misc_feature: MA Experiment 20001555 PARAMETER Experiment Name: At_Drought_Soil_Dry_P Parameter: Organism Value: A. thaliana
  misc_feature: MA Experiment 20001555 PARAMETER Experiment Name: At_Drought_Soil_Dry_P Parameter: Plant Line Value: WS
  misc_feature: MA Experiment 20001555 PARAMETER Experiment Name: At_Drought_Soil_Dry_P Parameter: Post Timepoint (hr) Value: None
  misc_feature: MA Experiment 20001555 PARAMETER Experiment Name: At_Drought_Soil_Dry_P Parameter: Post-Treatment Value: None
  misc_feature: MA Experiment 20001555 PARAMETER Experiment Name: At_Drought_Soil_Dry_P Parameter: Timepoint (day) Value: 10
  misc_feature: MA Experiment 20001555 PARAMETER Experiment Name: At_Drought_Soil_Dry_P Parameter: Treatment Value: Drought vs. No Drought
  misc_feature: MA Experiment ID: 20001556 Result: Down-regulated in Transcription
  misc_feature: MA Experiment 20001556 PARAMETER Experiment Name: At_Drought_Soil_Dry_P Parameter: Age (day) Value: 26
  misc_feature: MA Experiment 20001556 PARAMETER Experiment Name: At_Drought_Soil_Dry_P Parameter: Organism Value: A. thaliana
  misc_feature: MA Experiment 20001556 PARAMETER Experiment Name: At_Drought_Soil_Dry_P Parameter: Plant Line Value: WS
  misc_feature: MA Experiment 20001556 PARAMETER Experiment Name: At_Drought_Soil_Dry_P Parameter: Post Timepoint (hr) Value: None
  misc_feature: MA Experiment 20001556 PARAMETER Experiment Name: At_Drought_Soil_Dry_P Parameter: Post-Treatment Value: None
  misc_feature: MA Experiment 20001556 PARAMETER Experiment Name: At_Drought_Soil_Dry_P Parameter: Timepoint (day) Value: 12
  misc_feature: MA Experiment 20001556 PARAMETER Experiment Name: At_Drought_Soil_Dry_P Parameter: Treatment Value: Drought vs. No Drought
  misc_feature: MA Experiment ID: 20001557 Result: Down-regulated in Transcription
  misc_feature: MA Experiment 20001557 PARAMETER Experiment Name: At_Drought_Soil_Dry_P Parameter: Age (day) Value: 27
  misc_feature: MA Experiment 20001557 PARAMETER Experiment Name: At_Drought_Soil_Dry_P Parameter: Organism Value: A. thaliana
  misc_feature: MA Experiment 20001557 PARAMETER Experiment Name: At_Drought_Soil_Dry_P Parameter: Plant Line Value: WS
  misc_feature: MA Experiment 20001557 PARAMETER Experiment Name: At_Drought_Soil_Dry_P Parameter: Post Timepoint (hr) Value: 3
  misc_feature: MA Experiment 20001557 PARAMETER Experiment Name: At_Drought_Soil_Dry_P Parameter: Post-Treatment Value: Re-Water vs. No Drought
  misc_feature: MA Experiment 20001557 PARAMETER Experiment Name: At_Drought_Soil_Dry_P Parameter: Timepoint (day) Value: 13
  misc_feature: MA Experiment 20001557 PARAMETER Experiment Name: At_Drought_Soil_Dry_P Parameter: Treatment Value: Drought vs. No Drought
  misc_feature: MA Experiment ID: 20001559 Result: Down-regulated in Transcription
  misc_feature: MA Experiment 20001559 PARAMETER Experiment Name: At_Drought_Soil_Dry_P Parameter: Age (day) Value: 28
  misc_feature: MA Experiment 20001559 PARAMETER Experiment Name: At_Drought_Soil_Dry_P Parameter: Organism Value: A. thaliana
  misc_feature: MA Experiment 20001559 PARAMETER Experiment Name: At_Drought_Soil_Dry_P Parameter: Plant Line Value: WS
  misc_feature: MA Experiment 20001559 PARAMETER Experiment Name: At_Drought_Soil_Dry_P Parameter: Post Timepoint (hr) Value: 29
  misc_feature: MA Experiment 20001559 PARAMETER Experiment Name: At_Drought_Soil_Dry_P Parameter: Post-Treatment Value: Re-Water vs. No Drought
  misc_feature: MA Experiment 20001559 PARAMETER Experiment Name: At_Drought_Soil_Dry_P Parameter: Timepoint (day) Value: 14
  misc_feature: MA Experiment 20001559 PARAMETER Experiment Name: At_Drought_Soil_Dry_P Parameter: Treatment Value: Drought vs. No Drought
  misc_feature: MA Experiment ID: 20001757 Result: Up-regulated in Transcription
  misc_feature: MA Experiment 20001757 PARAMETER Experiment Name: At_50mM_NH4NO3_L-to-H_P Parameter: Timepoint (hr) Value: 6
  misc_feature: MA Experiment 20001757 PARAMETER Experiment Name: At_50mM_NH4NO3_L-to-H_P Parameter: Tissue Value: Leaf
  misc_feature: MA Experiment 20001757 PARAMETER Experiment Name: At_50mM_NH4NO3_L-to-H_P Parameter: Treatment Value: 50mM NH4NO3 vs 100mM Mannitol
  misc_feature: MA Experiment ID: 20001905 Result: Down-regulated in Transcription
  misc_feature: MA Experiment 20001905 PARAMETER Experiment Name: At_Drought_Reproduction_P Parameter: Age (day) Value: 40
  misc_feature: MA Experiment 20001905 PARAMETER Experiment Name: At_Drought_Reproduction_P Parameter: Organism Value: A. thaliana
  misc_feature: MA Experiment 20001905 PARAMETER Experiment Name: At_Drought_Reproduction_P Parameter: Plant Line Value: WS
  misc_feature: MA Experiment 20001905 PARAMETER Experiment Name: At_Drought_Reproduction_P Parameter: Timepoint (day) Value: 10
  misc_feature: MA Experiment 20001905 PARAMETER Experiment Name: At_Drought_Reproduction_P Parameter: Tissue Value: Rosettes
  misc_feature: MA Experiment 20001905 PARAMETER Experiment Name: At_Drought_Reproduction_P Parameter: Treatment Value: Drought vs. No Drought
  misc_feature: MA Experiment ID: 20001907 Result: Down-regulated in Transcription
  misc_feature: MA Experiment 20001907 PARAMETER Experiment Name: At_Drought_Reproduction_P Parameter: Age (day) Value: 37
  misc_feature: MA Experiment 20001907 PARAMETER Experiment Name: At_Drought_Reproduction_P Parameter: Organism Value: A. thaliana
  misc_feature: MA Experiment 20001907 PARAMETER Experiment Name: At_Drought_Reproduction_P Parameter: Plant Line Value: WS
  misc_feature: MA Experiment 20001907 PARAMETER Experiment Name: At_Drought_Reproduction_P Parameter: Timepoint (day) Value: 7
  misc_feature: MA Experiment 20001907 PARAMETER Experiment Name: At_Drought_Reproduction_P Parameter: Tissue Value: Siliques
  misc_feature: MA Experiment 20001907 PARAMETER Experiment Name: At_Drought_Reproduction_P Parameter: Treatment Value: Drought vs. No Drought
  misc_feature: MA Experiment ID: 20001911 Result: Down-regulated in Transcription
  misc_feature: MA Experiment 20001911 PARAMETER Experiment Name: At_Drought_Reproduction_P Parameter: Age (day) Value: 40
  misc_feature: MA Experiment 20001911 PARAMETER Experiment Name: At_Drought_Reproduction_P Parameter: Organism Value: A. thaliana
  misc_feature: MA Experiment 20001911 PARAMETER Experiment Name: At_Drought_Reproduction_P Parameter: Plant Line Value: WS
  misc_feature: MA Experiment 20001911 PARAMETER Experiment Name: At_Drought_Reproduction_P Parameter: Timepoint (day) Value: 10
  misc_feature: MA Experiment 20001911 PARAMETER Experiment Name: At_Drought_Reproduction_P Parameter: Tissue Value: Flowers
  misc_feature: MA Experiment 20001911 PARAMETER Experiment Name: At_Drought_Reproduction_P Parameter: Treatment Value: Drought vs. No Drought
aactattaagaagaagaaaacactcgatcggctatatatatacgtacaacacataagaaaaccaaaccaatcacttcactctctctaatcaaaaagcttttaacctcagccgttaaatctttctccgatcatgccgaccagaaacatcgccattggtggagtccaagaagaggtctatcaccccaacgcacttagggcggcgctcgctgagtttatctcgactttgatcttcgtcttcgccggctcaggctccggaattgctttcaacaagatcactgacaatggagcaaccactccttccggcctcgtcgccgctgccttagctcatgctttcggtctctttgtcgctgtctctgttggcgctaacatttccggtggccacgttaaccctgccgttaccttcggtgtcttactcggtggtaacatcactctcctccgtggtattctctactggattgctcagcttcttggctccgtcgccgcttgtttcctccttagctttgccaccggtggcgagccaatcccagcgttcggtctctctgccggagtcagatcattaaacgctctcgtcttcgagatcgtgatgaccttcgggctcgtctacaccgtctacgccacagccgttgatcccaagaacggtagtctcggaacaatcgcaccaatcgccataggtttcatcgttagagataacatcctcgctggtggagctttcagcggagcttccatgaacccagccgttgctttcggaccagccgtcgtaagctggacgtggaccaaccactgggtttactgggctggtcctcttattggtggtggactcgccggaattatctacgactttgtcttcatcgatgaaaatgcccacgagcaattgcctaccaccgattactgaagacgtcaaattcaacgttgttaatctgatgaatttttcgtgatttgcttttttaatttgcatcgtaatgggtttctggccgttggatcatttttagatgaatctttgtctattgattgatcatttatgtgtctttgggtttgttgttggagttgtaatatctctggaaggcttttgtgcaattgtattgtacggtttaataactataattgagaaaaccagggaatgtgaattatg

SEQ ID NO: 29547 - protein, 253 aa, Arabidopsis thaliana
  peptide (1)..(253): Ceres Seq. ID no. 12332179
  misc_feature (1)..(241): Homolog of NCBI NO: 99747 NR Description: probable membrane channel protein RB7 -
  misc_feature (1)..(253): Homolog of NCBI NO: 21284370 NR Description: tonoplast intrinsic protein bobTIP26-1
  misc_feature (1)..(253): Homolog of NCBI NO: 22858917 NR Description: tonoplast intrinsic protein bobTIP26-2
  misc_feature (1)..(253): Homolog of NCBI NO: 15228041 NR Description: putative aquaporin (tonoplast intrinsic protein
  misc_feature (1)..(253): Homolog of NCBI NO: 475048 NR Description: tonoplast intrinsic protein gamma (gamma-TIP)
  misc_feature (1)..(253): Homolog of NCBI NO: 21593151 NR Description: putative aquaporin (tonoplast intrinsic protein
  misc_feature (1)..(253): Homolog of NCBI NO: 1514977 NR Description: VM23 [Raphanus sativus]
  misc_feature (1)..(253): Homolog of NCBI NO: 5081419 NR Description: tonoplast intrinsic protein [Brassica napus]
  misc_feature (1)..(253): Homolog of NCBI NO: 11357300 NR Description: gamma tonoplast intrinsic protein 2
  misc_feature (1)..(253): Homolog of NCBI NO: 15231569 NR Description: gamma tonoplast intrinsic protein
MPTRNIAIGGVQEEVYHPNALRAALAEFISTLIFVFAGSGSGIAFNKITDNGATTPSGLVAAALAHAFGLFVAVSVGANISGGHVNPAVTFGVLLGGNITLLRGILYWIAQLLGSVAACFLLSFATGGEPIPAFGLSAGVRSLNALVFEIVMTFGLVYTVYATAVDPKNGSLGTIAPIAIGFIVRDNILAGGAFSGASMNPAVAFGPAVVSWTWTNHWVYWAGPLIGGGLAGIIYDFVFIDENAHEQLPTTDY

SEQ ID NO: 29548 - DNA, 2121 bp, Arabidopsis thaliana; identical to SEQ ID NO: 24365
  misc_feature (1)..(2121): Ceres Seq. ID no. 12601883
  misc_feature: MA Experiment ID: 20000169 Result: Down-regulated in Transcription
  misc_feature: MA Experiment 20000169 PARAMETER Experiment Name: At_100uM_ABA_P Parameter: Age (day) Value: 14
  misc_feature: MA Experiment 20000169 PARAMETER Experiment Name: At_100uM_ABA_P Parameter: Organism Value: A. thaliana
  misc_feature: MA Experiment 20000169 PARAMETER Experiment Name: At_100uM_ABA_P Parameter: Plant Line Value: WS
  misc_feature: MA Experiment 20000169 PARAMETER Experiment Name: At_100uM_ABA_P Parameter: Timepoint (hr) Value: 6
  misc_feature: MA Experiment 20000169 PARAMETER Experiment Name: At_100uM_ABA_P Parameter: Tissue Value: Aerial
  misc_feature: MA Experiment 20000169 PARAMETER Experiment Name: At_100uM_ABA_P Parameter: Treatment Value: 100uM ABA vs. No Treatment
  misc_feature: MA Experiment ID: 20000180 Result: Up-regulated in Transcription
  misc_feature: MA Experiment 20000180 PARAMETER Experiment Name: At_Germinating_Seeds_P Parameter: Age (hr) Value: 24 vs. 0
  misc_feature: MA Experiment 20000180 PARAMETER Experiment Name: At_Germinating_Seeds_P Parameter: Tissue Value: Germinating Seeds
  misc_feature: MA Experiment ID: 20000214 Result: Up-regulated in Transcription
  misc_feature: MA Experiment 20000214 PARAMETER Experiment Name: At_4deg_Cold_P Parameter: Timepoint (hr) Value: 6
  misc_feature: MA Experiment ID: 20000234 Result: Up-regulated in Transcription
  misc_feature: MA Experiment 20000234 PARAMETER Experiment Name: At_Siliques_P Parameter: Age (day) Value: 21
  misc_feature: MA Experiment 20000234 PARAMETER Experiment Name: At_Siliques_P Parameter: Organism Value: A. thaliana
  misc_feature: MA Experiment 20000234 PARAMETER Experiment Name: At_Siliques_P Parameter: Plant Line Value: WS
  misc_feature: MA Experiment 20000234 PARAMETER Experiment Name: At_Siliques_P Parameter: Tissue Value: Less Than 5mm Siliques vs. Whole Plant
  misc_feature: MA Experiment ID: 20000436 Result: Down-regulated in Transcription
  misc_feature: MA Experiment 20000436 PARAMETER Experiment Name: At_Drought_P Parameter: Age (day) Value: 7
  misc_feature: MA Experiment 20000436 PARAMETER Experiment Name: At_Drought_P Parameter: Organism Value: A. thaliana
  misc_feature: MA Experiment 20000436 PARAMETER Experiment Name: At_Drought_P Parameter: Plant Line Value: WS
  misc_feature: MA Experiment 20000436 PARAMETER Experiment Name: At_Drought_P Parameter: Timepoint (hr) Value: 12
  misc_feature: MA Experiment 20000436 PARAMETER Experiment Name: At_Drought_P Parameter: Tissue Value: Whole Plant
  misc_feature: MA Experiment 20000436 PARAMETER Experiment Name: At_Drought_P Parameter: Treatment Value: Drought vs. No Drought
  misc_feature: MA Experiment ID: 20000437 Result: Down-regulated in Transcription
  misc_feature: MA Experiment 20000437 PARAMETER Experiment Name: At_Drought_P Parameter: Age (day) Value: 8
  misc_feature: MA Experiment 20000437 PARAMETER Experiment Name: At_Drought_P Parameter: Organism Value: A. thaliana
  misc_feature: MA Experiment 20000437 PARAMETER Experiment Name: At_Drought_P Parameter: Plant Line Value: WS
  misc_feature: MA Experiment 20000437 PARAMETER Experiment Name: At_Drought_P Parameter: Timepoint (hr) Value: 24
  misc_feature: MA Experiment 20000437 PARAMETER Experiment Name: At_Drought_P Parameter: Tissue Value: Whole Plant
  misc_feature: MA Experiment 20000437 PARAMETER Experiment Name: At_Drought_P Parameter: Treatment Value: Drought vs. No Drought
  misc_feature: MA Experiment ID: 20000438 Result: Up-regulated in Transcription
  misc_feature: MA Experiment 20000438 PARAMETER Experiment Name: At_Shoots__P Parameter: Age (day) Value: 14
  misc_feature: MA Experiment 20000438 PARAMETER Experiment Name: At_Shoots__P Parameter: Tissue Value: Shoots vs. Whole Plant
  misc_feature: MA Experiment ID: 20000439 Result: Down-regulated in Transcription
  misc_feature: MA Experiment 20000439 PARAMETER Experiment Name: At_Roots__P Parameter: Age (day) Value: 14 vs. 21
  misc_feature: MA Experiment 20000439 PARAMETER Experiment Name: At_Roots__P Parameter: Organism Value: A. thaliana
  misc_feature: MA Experiment 20000439 PARAMETER Experiment Name: At_Roots__P Parameter: Tissue Value: Roots vs. Whole Plant
  misc_feature: MA Experiment ID: 20000451 Result: Up-regulated in Transcription
  misc_feature: MA Experiment 20000451 PARAMETER Experiment Name: At_CS6879_Shoots-Roots_P Parameter: Age (day) Value: 14
  misc_feature: MA Experiment 20000451 PARAMETER Experiment Name: At_CS6879_Shoots-Roots_P Parameter: Organism Value: A. thaliana
  misc_feature: MA Experiment 20000451 PARAMETER Experiment Name: At_CS6879_Shoots-Roots_P Parameter: Plant Line Value: CS6879 vs. WS
  misc_feature: MA Experiment 20000451 PARAMETER Experiment Name: At_CS6879_Shoots-Roots_P Parameter: Tissue Value: Roots
  misc_feature: MA Experiment ID: 20000794 Result: Down-regulated in Transcription
  misc_feature: MA Experiment 20000794 PARAMETER Experiment Name: At_Petals_P Parameter: Age (day) Value: 23-25 days
  misc_feature: MA Experiment 20000794 PARAMETER Experiment Name: At_Petals_P Parameter: Plant Line Value: WS
  misc_feature: MA Experiment 20000794 PARAMETER Experiment Name: At_Petals_P Parameter: Tissue Value: Petals vs. Whole plant
  misc_feature: MA Experiment ID: 20001248 Result: Down-regulated in Transcription
  misc_feature: MA Experiment 20001248 PARAMETER Experiment Name: At_Far-red-induction_P Parameter: Age (day) Value: 7
  misc_feature: MA Experiment 20001248 PARAMETER Experiment Name: At_Far-red-induction_P Parameter: Light Value: Far-red vs. White
  misc_feature: MA Experiment 20001248 PARAMETER Experiment Name: At_Far-red-induction_P Parameter: Organism Value: A. thaliana
  misc_feature: MA Experiment 20001248 PARAMETER Experiment Name: At_Far-red-induction_P Parameter: Plant Line Value: Columbia
  misc_feature: MA Experiment 20001248 PARAMETER Experiment Name: At_Far-red-induction_P Parameter: Timepoint (hr) Value: 4
  misc_feature: MA Experiment 20001248 PARAMETER Experiment Name: At_Far-red-induction_P Parameter: Tissue Value: Whole Plant
  misc_feature: MA Experiment ID: 20001450 Result: Down-regulated in Transcription
  misc_feature: MA Experiment 20001450 PARAMETER Experiment Name: At_Far-red-induction_P Parameter: Age (day) Value: 7
  misc_feature: MA Experiment 20001450 PARAMETER Experiment Name: At_Far-red-induction_P Parameter: Light Value: Far-red vs. White
  misc_feature: MA Experiment 20001450 PARAMETER Experiment Name: At_Far-red-induction_P Parameter: Organism Value: A. thaliana
  misc_feature: MA Experiment 20001450 PARAMETER Experiment Name: At_Far-red-induction_P Parameter: Plant Line Value: Columbia
  misc_feature: MA Experiment 20001450 PARAMETER Experiment Name: At_Far-red-induction_P Parameter: Timepoint (hr) Value: 8
  misc_feature: MA Experiment 20001450 PARAMETER Experiment Name: At_Far-red-induction_P Parameter: Tissue Value: Whole Plant
  misc_feature: MA Experiment ID: 20001451 Result: Down-regulated in Transcription
  misc_feature: MA Experiment 20001451 PARAMETER Experiment Name: At_Far-red-induction_P Parameter: Age (day) Value: 7
  misc_feature: MA Experiment 20001451 PARAMETER Experiment Name: At_Far-red-induction_P Parameter: Light Value: Far-red vs. White
  misc_feature: MA Experiment 20001451 PARAMETER Experiment Name: At_Far-red-induction_P Parameter: Organism Value: A. thaliana
  misc_feature: MA Experiment 20001451 PARAMETER Experiment Name: At_Far-red-induction_P Parameter: Plant Line Value: Columbia
  misc_feature: MA Experiment 20001451 PARAMETER Experiment Name: At_Far-red-induction_P Parameter: Timepoint (hr) Value: 24
  misc_feature: MA Experiment 20001451 PARAMETER Experiment Name: At_Far-red-induction_P Parameter: Tissue Value: Whole Plant
  misc_feature: MA Experiment ID: 20001757 Result: Up-regulated in Transcription
  misc_feature: MA Experiment 20001757 PARAMETER Experiment Name: At_50mM_NH4NO3_L-to-H_P Parameter: Timepoint (hr) Value: 6
  misc_feature: MA Experiment 20001757 PARAMETER Experiment Name: At_50mM_NH4NO3_L-to-H_P Parameter: Tissue Value: Leaf
  misc_feature: MA Experiment 20001757 PARAMETER Experiment Name: At_50mM_NH4NO3_L-to-H_P Parameter: Treatment Value: 50mM NH4NO3 vs 100mM Mannitol
  misc_feature: MA Experiment ID: 20001904 Result: Down-regulated in Transcription
  misc_feature: MA Experiment 20001904 PARAMETER Experiment Name: At_Drought_Reproduction_P Parameter: Age (day) Value: 37
  misc_feature: MA Experiment 20001904 PARAMETER Experiment Name: At_Drought_Reproduction_P Parameter: Organism Value: A. thaliana
  misc_feature: MA Experiment 20001904 PARAMETER Experiment Name: At_Drought_Reproduction_P Parameter: Plant Line Value: WS
  misc_feature: MA Experiment 20001904 PARAMETER Experiment Name: At_Drought_Reproduction_P Parameter: Timepoint (day) Value: 7
  misc_feature: MA Experiment 20001904 PARAMETER Experiment Name: At_Drought_Reproduction_P Parameter: Tissue Value: Rosettes
  misc_feature: MA Experiment 20001904 PARAMETER Experiment Name: At_Drought_Reproduction_P Parameter: Treatment Value: Drought vs. No Drought
  misc_feature: MA Experiment ID: 20001906 Result: Down-regulated in Transcription
  misc_feature: MA Experiment 20001906 PARAMETER Experiment Name: At_Drought_Reproduction_P Parameter: Age (day) Value: 35
  misc_feature: MA Experiment 20001906 PARAMETER Experiment Name: At_Drought_Reproduction_P Parameter: Organism Value: A. thaliana
  misc_feature: MA Experiment 20001906 PARAMETER Experiment Name: At_Drought_Reproduction_P Parameter: Plant Line Value: WS
  misc_feature: MA Experiment 20001906 PARAMETER Experiment Name: At_Drought_Reproduction_P Parameter: Timepoint (day) Value: 5
  misc_feature: MA Experiment 20001906 PARAMETER Experiment Name: At_Drought_Reproduction_P Parameter: Tissue Value: Siliques
  misc_feature: MA Experiment 20001906 PARAMETER Experiment Name: At_Drought_Reproduction_P Parameter: Treatment Value: Drought vs. No Drought

SEQ ID NO: 29549 - protein, 181 aa, Arabidopsis thaliana; identical to SEQ ID NO: 24366
  peptide (1)..(181): Ceres Seq. ID no. 12601884
  misc_feature (56)..(175): Pfam Name: Ribulose bisphosphate carboxylase, small chain Pfam Description: Ribulose bisphosphate carboxylase, small chain
  misc_feature (56)..(175): Pfam Name: Ribulose bisphosphate carboxylase, small chain Pfam Description: Ribulose bisphosphate carboxylase, small chain
  misc_feature (56)..(175): Pfam Name: Ribulose bisphosphate carboxylase, small chain Pfam Description: Ribulose bisphosphate carboxylase, small chain
  misc_feature (56)..(175): Pfam Name: Ribulose bisphosphate carboxylase, small chain Pfam Description: Ribulose bisphosphate carboxylase, small chain
  misc_feature (1)..(179): Homolog of NCBI NO: 68063 NR Description: ribulose-bisphosphate carboxylase (EC 4.1.1.39)
  misc_feature (1)..(181): Homolog of NCBI NO: 132154 NR Description: Ribulose bisphosphate carboxylase small chain,
  misc_feature (1)..(179): Homolog of NCBI NO: 15219826 NR Description: ribulose-bisphosphate carboxylase small unit,
  misc_feature (1)..(181): Homolog of NCBI NO: 266891 NR Description: Ribulose bisphosphate carboxylase small chain,
  misc_feature (1)..(181): Homolog of NCBI NO: 132091 NR Description: Ribulose bisphosphate carboxylase small chain F1,
  misc_feature (1)..(179): Homolog of NCBI NO: 68063 NR Description: ribulose-bisphosphate carboxylase (EC 4.1.1.39)
  misc_feature (1)..(179): Homolog of NCBI NO: 15219826 NR Description: ribulose-bisphosphate carboxylase small unit,
  misc_feature (1)..(181): Homolog of NCBI NO: 132091 NR Description: Ribulose bisphosphate carboxylase small chain F1,
  misc_feature (1)..(181): Homolog of NCBI NO: 266891 NR Description: Ribulose bisphosphate carboxylase small chain,
  misc_feature (1)..(179): Homolog of NCBI NO: 15219826 NR Description: ribulose-bisphosphate carboxylase small unit,
  misc_feature (1)..(181): Homolog of NCBI NO: 132154 NR Description: Ribulose bisphosphate carboxylase small chain,
  misc_feature (1)..(179): Homolog of NCBI NO: 68063 NR Description: ribulose-bisphosphate carboxylase (EC 4.1.1.39)
  misc_feature (1)..(181): Homolog of NCBI NO: 15240912 NR Description: ribulose bisphosphate carboxylase small chain 1b
  misc_feature (1)..(181): Homolog of NCBI NO: 68061 NR Description: ribulose-bisphosphate carboxylase (EC 4.1.1.39)
  misc_feature (1)..(181): Homolog of NCBI NO: 15240903 NR Description: ribulose bisphosphate carboxylase small chain 2b
  misc_feature (1)..(181): Homolog of NCBI NO: 68060 NR Description: ribulose-bisphosphate carboxylase (EC 4.1.1.39)
  misc_feature (1)..(181): Homolog of NCBI NO: 15240901 NR Description: ribulose bisphosphate carboxylase small chain 3b
  misc_feature (1)..(181): Homolog of NCBI NO: 15240912 NR Description: ribulose bisphosphate carboxylase small chain 1b
  misc_feature (1)..(181): Homolog of NCBI NO: 68061 NR Description: ribulose-bisphosphate carboxylase (EC 4.1.1.39)
  misc_feature (1)..(181): Homolog of NCBI NO: 15240903 NR Description: ribulose bisphosphate carboxylase small chain 2b
  misc_feature (1)..(181): Homolog of NCBI NO: 68060 NR Description: ribulose-bisphosphate carboxylase (EC 4.1.1.39)
  misc_feature (1)..(181): Homolog of NCBI NO: 15240901 NR Description: ribulose bisphosphate carboxylase small chain 3b
  misc_feature (1)..(181): Homolog of NCBI NO: 132091 NR Description: Ribulose bisphosphate carboxylase small chain F1,
  misc_feature (1)..(181): Homolog of NCBI NO: 266891 NR Description: Ribulose bisphosphate carboxylase small chain,
  misc_feature (1)..(179): Homolog of NCBI NO: 15219826 NR Description: ribulose-bisphosphate carboxylase small unit,
  misc_feature (1)..(181): Homolog of NCBI NO: 132154 NR Description: Ribulose bisphosphate carboxylase small chain,
  misc_feature (1)..(179): Homolog of NCBI NO: 68063 NR Description: ribulose-bisphosphate carboxylase (EC 4.1.1.39)
  misc_feature (1)..(181): Homolog of NCBI NO: 15240912 NR Description: ribulose bisphosphate carboxylase small chain 1b
  misc_feature (1)..(181): Homolog of NCBI NO: 68061 NR Description: ribulose-bisphosphate carboxylase (EC 4.1.1.39)
  misc_feature (1)..(181): Homolog of NCBI NO: 15240903 NR Description: ribulose bisphosphate carboxylase small chain 2b
  misc_feature (1)..(181): Homolog of NCBI NO: 68060 NR Description: ribulose-bisphosphate carboxylase (EC 4.1.1.39)
  misc_feature (1)..(181): Homolog of NCBI NO: 15240901 NR Description: ribulose bisphosphate carboxylase small chain 3b
  misc_feature (1)..(181): Homolog of NCBI NO: 132091 NR Description: Ribulose bisphosphate carboxylase small chain F1,
  misc_feature (1)..(181): Homolog of NCBI NO: 266891 NR Description: Ribulose bisphosphate carboxylase small chain,
  misc_feature (1)..(181): Homolog of NCBI NO: 132154 NR Description: Ribulose bisphosphate carboxylase small chain,
  misc_feature (1)..(181): Homolog of NCBI NO: 15240901 NR Description: ribulose bisphosphate carboxylase small chain 3b
  misc_feature (1)..(181): Homolog of NCBI NO: 68060 NR Description: ribulose-bisphosphate carboxylase (EC 4.1.1.39)
  misc_feature (1)..(181): Homolog of NCBI NO: 15240903 NR Description: ribulose bisphosphate carboxylase small chain 2b
  misc_feature (1)..(181): Homolog of NCBI NO: 68061 NR Description: ribulose-bisphosphate carboxylase (EC 4.1.1.39)
  misc_feature (1)..(181): Homolog of NCBI NO: 15240912 NR Description: ribulose bisphosphate carboxylase small chain 1b

SEQ ID NO: 29550 - protein, 177 aa, Arabidopsis thaliana; identical to SEQ ID NO: 24367
  peptide (1)..(177): Ceres Seq. ID no. 12601885
  misc_feature (52)..(171): Pfam Name: Ribulose bisphosphate carboxylase, small chain Pfam Description: Ribulose bisphosphate carboxylase, small chain
  misc_feature (52)..(171): Pfam Name: Ribulose bisphosphate carboxylase, small chain Pfam Description: Ribulose bisphosphate carboxylase, small chain
  misc_feature (52)..(171): Pfam Name: Ribulose bisphosphate carboxylase, small chain Pfam Description: Ribulose bisphosphate carboxylase, small chain
  misc_feature (52)..(171): Pfam Name: Ribulose bisphosphate carboxylase, small chain Pfam Description: Ribulose bisphosphate carboxylase, small chain
  misc_feature (1)..(175): Homolog of NCBI NO: 68063 NR Description: ribulose-bisphosphate carboxylase (EC 4.1.1.39)
  misc_feature (1)..(177): Homolog of NCBI NO: 132154 NR Description: Ribulose bisphosphate carboxylase small chain,
  misc_feature (1)..(175): Homolog of NCBI NO: 15219826 NR Description: ribulose-bisphosphate carboxylase small unit,
  misc_feature (1)..(177): Homolog of NCBI NO: 266891 NR Description: Ribulose bisphosphate carboxylase small chain,
  misc_feature (1)..(177): Homolog of NCBI NO: 132091 NR Description: Ribulose bisphosphate carboxylase small chain F1,
  misc_feature (1)..(175): Homolog of NCBI NO: 68063 NR Description: ribulose-bisphosphate carboxylase (EC 4.1.1.39)
  misc_feature (1)..(175): Homolog of NCBI NO: 15219826 NR Description: ribulose-bisphosphate carboxylase small unit,
  misc_feature (1)..(177): Homolog of NCBI NO: 132091 NR Description: Ribulose bisphosphate carboxylase small chain F1,
  misc_feature (1)..(177): Homolog of NCBI NO: 266891 NR Description: Ribulose bisphosphate carboxylase small chain,
  misc_feature (1)..(175): Homolog of NCBI NO: 15219826 NR Description: ribulose-bisphosphate carboxylase small unit,
  misc_feature (1)..(177): Homolog of NCBI NO: 132154 NR Description: Ribulose bisphosphate carboxylase small chain,
  misc_feature (1)..(175): Homolog of NCBI NO: 68063 NR Description: ribulose-bisphosphate carboxylase (EC 4.1.1.39)
  misc_feature (1)..(177): Homolog of NCBI NO: 15240912 NR Description: ribulose bisphosphate carboxylase small chain 1b
  misc_feature (1)..(177): Homolog of NCBI NO: 68061 NR Description: ribulose-bisphosphate carboxylase (EC 4.1.1.39)
  misc_feature (1)..(177): Homolog of NCBI NO: 15240903 NR Description: ribulose bisphosphate carboxylase small chain 2b
  misc_feature (1)..(177): Homolog of NCBI NO: 68060 NR Description: ribulose-bisphosphate carboxylase (EC 4.1.1.39)
  misc_feature (1)..(177): Homolog of NCBI NO: 15240901 NR Description: ribulose bisphosphate carboxylase small chain 3b
  misc_feature (1)..(177): Homolog of NCBI NO: 15240901 NR Description: ribulose bisphosphate carboxylase small chain 3b
  misc_feature (1)..(177): Homolog of NCBI NO: 132091 NR Description: Ribulose bisphosphate carboxylase small chain F1,
  misc_feature (1)..(177): Homolog of NCBI NO: 266891 NR Description: Ribulose bisphosphate carboxylase small chain,
  misc_feature (1)..(175): Homolog of NCBI NO: 15219826 NR Description: ribulose-bisphosphate carboxylase small unit,
  misc_feature (1)..(177): Homolog of NCBI NO: 132154 NR Description: Ribulose bisphosphate carboxylase small chain,
  misc_feature (1)..(175): Homolog of NCBI NO: 68063 NR Description: ribulose-bisphosphate carboxylase (EC 4.1.1.39)
  misc_feature (1)..(177): Homolog of NCBI NO: 15240912 NR Description: ribulose bisphosphate carboxylase small chain 1b
  misc_feature (1)..(177): Homolog of NCBI NO: 68061 NR Description: ribulose-bisphosphate carboxylase (EC 4.1.1.39)
  misc_feature (1)..(177): Homolog of NCBI NO: 15240903 NR Description: ribulose bisphosphate carboxylase small chain 2b
  misc_feature (1)..(177): Homolog of NCBI NO: 68060 NR Description: ribulose-bisphosphate carboxylase (EC 4.1.1.39)
  misc_feature (1)..(177): Homolog of NCBI NO: 15240912 NR Description: ribulose bisphosphate carboxylase small chain 1b
  misc_feature (1)..(177): Homolog of NCBI NO: 68061 NR Description: ribulose-bisphosphate carboxylase (EC 4.1.1.39)
  misc_feature (1)..(177): Homolog of NCBI NO: 15240903 NR Description: ribulose bisphosphate carboxylase small chain 2b
  misc_feature (1)..(177): Homolog of NCBI NO: 68060 NR Description: ribulose-bisphosphate carboxylase (EC 4.1.1.39)
  misc_feature (1)..(177): Homolog of NCBI NO: 15240901 NR Description: ribulose bisphosphate carboxylase small chain 3b
  misc_feature (1)..(177): Homolog of NCBI NO: 132091 NR Description: Ribulose bisphosphate carboxylase small chain F1,
  misc_feature (1)..(177): Homolog of NCBI NO: 266891 NR Description: Ribulose bisphosphate carboxylase small chain,
  misc_feature (1)..(177): Homolog of NCBI NO: 132154 NR Description: Ribulose bisphosphate carboxylase small chain,
  misc_feature (1)..(177): Homolog of NCBI NO: 15240901 NR Description: ribulose bisphosphate carboxylase small chain 3b
  misc_feature (1)..(177): Homolog of NCBI NO: 68060 NR Description: ribulose-bisphosphate carboxylase (EC 4.1.1.39)
  misc_feature (1)..(177): Homolog of NCBI NO: 15240903 NR Description: ribulose bisphosphate carboxylase small chain 2b
  misc_feature (1)..(177): Homolog of NCBI NO: 68061 NR Description: ribulose-bisphosphate carboxylase (EC 4.1.1.39)
  misc_feature (1)..(177): Homolog of NCBI NO: 15240912 NR Description: ribulose bisphosphate carboxylase small chain 1b

SEQ ID NO: 29551 - protein, 162 aa, Arabidopsis thaliana; identical to SEQ ID NO: 24368
  peptide (1)..(162): Ceres Seq. ID no. 12601886
  misc_feature (37)..(156): Pfam Name: Ribulose bisphosphate carboxylase, small chain Pfam Description: Ribulose bisphosphate carboxylase, small chain
  misc_feature (37)..(156): Pfam Name: Ribulose bisphosphate carboxylase, small chain Pfam Description: Ribulose bisphosphate carboxylase, small chain
  misc_feature (37)..(156): Pfam Name: Ribulose bisphosphate carboxylase, small chain Pfam Description: Ribulose bisphosphate carboxylase, small chain
  misc_feature (37)..(156): Pfam Name: Ribulose bisphosphate carboxylase, small chain Pfam Description: Ribulose bisphosphate carboxylase, small chain
  misc_feature (1)..(160): Homolog of NCBI NO: 68063 NR Description: ribulose-bisphosphate carboxylase (EC 4.1.1.39)
  misc_feature (1)..(162): Homolog of NCBI NO: 132154 NR Description: Ribulose bisphosphate carboxylase small chain,
  misc_feature (1)..(160): Homolog of NCBI NO: 15219826 NR Description: ribulose-bisphosphate carboxylase small unit,
  misc_feature (1)..(162): Homolog of NCBI NO: 266891 NR Description: Ribulose bisphosphate carboxylase small chain,
  misc_feature (1)..(162): Homolog of NCBI NO: 132091 NR Description: Ribulose bisphosphate carboxylase small chain F1,
  misc_feature (1)..(160): Homolog of NCBI NO: 68063 NR Description: ribulose-bisphosphate carboxylase (EC 4.1.1.39)
  misc_feature (1)..(160): Homolog of NCBI NO: 15219826 NR Description: ribulose-bisphosphate carboxylase small unit,
  misc_feature (1)..(162): Homolog of NCBI NO: 132091 NR Description: Ribulose bisphosphate carboxylase small chain F1,
  misc_feature (1)..(162): Homolog of NCBI NO: 266891 NR Description: Ribulose bisphosphate carboxylase small chain,
  misc_feature (1)..(160): Homolog of NCBI NO: 15219826 NR Description: ribulose-bisphosphate carboxylase small unit,
  misc_feature (1)..(162): Homolog of NCBI NO: 132154 NR Description: Ribulose bisphosphate carboxylase small chain,
  misc_feature (1)..(160): Homolog of NCBI NO: 68063 NR Description: ribulose-bisphosphate carboxylase (EC 4.1.1.39)
  misc_feature (1)..(162): Homolog of NCBI NO: 15240912 NR Description: ribulose bisphosphate carboxylase small chain 1b
  misc_feature (1)..(162): Homolog of NCBI NO: 68061 NR Description: ribulose-bisphosphate carboxylase (EC 4.1.1.39)
  misc_feature (1)..(162): Homolog of NCBI NO: 15240903 NR Description: ribulose bisphosphate carboxylase small chain 2b
  misc_feature (1)..(162): Homolog of NCBI NO: 68060 NR Description: ribulose-bisphosphate carboxylase (EC 4.1.1.39)
  misc_feature (1)..(162): Homolog of NCBI NO: 15240901 NR Description: ribulose bisphosphate carboxylase small chain 3b
  misc_feature (1)..(162): Homolog of NCBI NO: 15240912 NR Description: ribulose bisphosphate carboxylase small chain 1b
  misc_feature (1)..(162): Homolog of NCBI NO: 68061 NR Description: ribulose-bisphosphate carboxylase (EC 4.1.1.39)
  misc_feature (1)..(162): Homolog of NCBI NO: 15240903 NR Description: ribulose bisphosphate carboxylase small chain 2b
  misc_feature (1)..(162): Homolog of NCBI NO: 68060 NR Description: ribulose-bisphosphate carboxylase (EC 4.1.1.39)
  misc_feature (1)..(162): Homolog of NCBI NO: 15240901 NR Description: ribulose bisphosphate carboxylase small chain 3b
  misc_feature (1)..(162): Homolog of NCBI NO: 132091 NR Description: Ribulose bisphosphate carboxylase small chain F1,
  misc_feature (1)..(162): Homolog of NCBI NO: 266891 NR Description: Ribulose bisphosphate carboxylase small chain,
  misc_feature (1)..(160): Homolog of NCBI NO: 15219826 NR Description: ribulose-bisphosphate carboxylase small unit,
  misc_feature (1)..(162): Homolog of NCBI NO: 132154 NR Description: Ribulose bisphosphate carboxylase small chain,
  misc_feature (1)..(160): Homolog of NCBI NO: 68063 NR Description: ribulose-bisphosphate carboxylase (EC 4.1.1.39)
  misc_feature (1)..(162): Homolog of NCBI NO: 15240912 NR Description: ribulose bisphosphate carboxylase small chain 1b
  misc_feature (1)..(162): Homolog of NCBI NO: 68061 NR Description: ribulose-bisphosphate carboxylase (EC 4.1.1.39)
  misc_feature (1)..(162): Homolog of NCBI NO: 15240903 NR Description: ribulose bisphosphate carboxylase small chain 2b
  misc_feature (1)..(162): Homolog of NCBI NO: 68060 NR Description: ribulose-bisphosphate carboxylase (EC 4.1.1.39)
  misc_feature (1)..(162): Homolog of NCBI NO: 15240901 NR Description: ribulose bisphosphate carboxylase small chain 3b
  misc_feature (1)..(162): Homolog of NCBI NO: 132091 NR Description: Ribulose bisphosphate carboxylase small chain F1,
  misc_feature (1)..(162): Homolog of NCBI NO: 266891 NR Description: Ribulose bisphosphate carboxylase small chain,
  misc_feature (1)..(162): Homolog of NCBI NO: 132154 NR Description: Ribulose bisphosphate carboxylase small chain,
  misc_feature (1)..(162): Homolog of NCBI NO: 15240901 NR Description: ribulose bisphosphate carboxylase small chain 3b
  misc_feature (1)..(162): Homolog of NCBI NO: 68060 NR Description: ribulose-bisphosphate carboxylase (EC 4.1.1.39)
  misc_feature (1)..(162): Homolog of NCBI NO: 15240903 NR Description: ribulose bisphosphate carboxylase small chain 2b
  misc_feature (1)..(162): Homolog of NCBI NO: 68061 NR Description: ribulose-bisphosphate carboxylase (EC 4.1.1.39)
  misc_feature (1)..(162): Homolog of NCBI NO: 15240912 NR Description: ribulose bisphosphate carboxylase small chain 1b

SEQ ID NO: 29552 - DNA, 607 bp, Arabidopsis thaliana
  misc_feature (1)..(607): Ceres Seq. ID no. 12332180
  misc_feature: MA Experiment ID: 108434 Result: Up-regulated in Transcription
  misc_feature: MA Experiment 108434 PARAMETER Experiment Name: At_Root_Tips_cDNA_P Parameter: Tissue Value: Root Tips
  misc_feature: MA Experiment ID: 108462 Result: Up-regulated in Transcription
  misc_feature: MA Experiment 108462 PARAMETER Experiment Name: At_Germinating_Seeds_cDNA_P Parameter: Age (day) Value: 2 vs. 0
  misc_feature: MA Experiment 108462 PARAMETER Experiment Name: At_Germinating_Seeds_cDNA_P Parameter: Tissue Value: Germinating Seeds
  misc_feature: MA Experiment ID: 108488 Result: Down-regulated in Transcription
  misc_feature: MA Experiment ID: 20000093 Result: Down-regulated in Transcription
  misc_feature: MA Experiment 20000093 PARAMETER Experiment Name: At_42deg_Heat_cDNA_P Parameter: Temperature (deg C) Value: 42 vs. 22
  misc_feature: MA Experiment 20000093 PARAMETER Experiment Name: At_42deg_Heat_cDNA_P Parameter: Timepoint (hr) Value: 0.5
  misc_feature: MA Experiment 20000093 PARAMETER Experiment Name: At_42deg_Heat_cDNA_P Parameter: Tissue Value: Aerial
  misc_feature: MA Experiment ID: 20000113 Result: Down-regulated in Transcription
  misc_feature: MA Experiment 20000113 PARAMETER Experiment Name: At_42deg_Heat_cDNA_P Parameter: Temperature (deg C) Value: 42 vs. 22
  misc_feature: MA Experiment 20000113 PARAMETER Experiment Name: At_42deg_Heat_cDNA_P Parameter: Timepoint (hr) Value: 8
  misc_feature: MA Experiment 20000113 PARAMETER Experiment Name: At_42deg_Heat_cDNA_P Parameter: Tissue Value: Aerial
  misc_feature: MA Experiment ID: 20000180 Result: Up-regulated in Transcription
  misc_feature: MA Experiment 20000180 PARAMETER Experiment Name: At_Germinating_Seeds_P Parameter: Age (hr) Value: 24 vs. 0
  misc_feature: MA Experiment 20000180 PARAMETER Experiment Name: At_Germinating_Seeds_P Parameter: Tissue Value: Germinating Seeds
  misc_feature: MA Experiment ID: 20000234 Result: Up-regulated in Transcription
  misc_feature: MA Experiment 20000234 PARAMETER Experiment Name: At_Siliques_P Parameter: Age (day) Value: 21
  misc_feature: MA Experiment 20000234 PARAMETER Experiment Name: At_Siliques_P Parameter: Organism Value: A. thaliana
  misc_feature: MA Experiment 20000234 PARAMETER Experiment Name: At_Siliques_P Parameter: Plant Line Value: WS
  misc_feature: MA Experiment 20000234 PARAMETER Experiment Name: At_Siliques_P Parameter: Tissue Value: Less Than 5mm Siliques vs. Whole Plant
  misc_feature: MA Experiment ID: 20000235 Result: Up-regulated in Transcription
  misc_feature: MA Experiment 20000235 PARAMETER Experiment Name: At_Siliques_P Parameter: Age (day) Value: 21
  misc_feature: MA Experiment 20000235 PARAMETER Experiment Name: At_Siliques_P Parameter: Organism Value: A. thaliana
  misc_feature: MA Experiment 20000235 PARAMETER Experiment Name: At_Siliques_P Parameter: Plant Line Value: WS
  misc_feature: MA Experiment 20000235 PARAMETER Experiment Name: At_Siliques_P Parameter: Tissue Value: 5-10mm Siliques vs. Whole Plant
  misc_feature: MA Experiment ID: 20000264 Result: Up-regulated in Transcription
  misc_feature: MA Experiment 20000264 PARAMETER Experiment Name: At_Open_Flower_P Parameter: Age (day) Value: 21
  misc_feature: MA Experiment 20000264 PARAMETER Experiment Name: At_Open_Flower_P Parameter: Plant Line Value: WS
  misc_feature: MA Experiment 20000264 PARAMETER Experiment Name: At_Open_Flower_P Parameter: Tissue Value: Open Flower vs. Whole Plant
  misc_feature: MA Experiment ID: 20000265 Result: Up-regulated in Transcription
  misc_feature: MA Experiment 20000265 PARAMETER Experiment Name: At_Open_Flower_P Parameter: Age (day) Value: 21
  misc_feature: MA Experiment 20000265 PARAMETER Experiment Name: At_Open_Flower_P Parameter: Plant Line Value: WS
  misc_feature: MA Experiment 20000265 PARAMETER Experiment Name: At_Open_Flower_P Parameter: Tissue Value: Closed Flower vs. Whole Plant
  misc_feature: MA Experiment ID: 20000286 Result: Up-regulated in Transcription
  misc_feature: MA Experiment 20000286 PARAMETER Experiment Name: At_Open_Flower_P Parameter: Age (day) Value: 21
  misc_feature: MA Experiment 20000286 PARAMETER Experiment Name: At_Open_Flower_P Parameter: Plant Line Value: WS
  misc_feature: MA Experiment 20000286 PARAMETER Experiment Name: At_Open_Flower_P Parameter: Tissue Value: Half Open vs. Whole Plant
  misc_feature: MA Experiment ID: 20001450 Result: Down-regulated in Transcription
  misc_feature: MA Experiment 20001450 PARAMETER Experiment Name: At_Far-red-induction_P Parameter: Age (day) Value: 7
  misc_feature: MA Experiment 20001450 PARAMETER Experiment Name: At_Far-red-induction_P Parameter: Light Value: Far-red vs. White
  misc_feature: MA Experiment 20001450 PARAMETER Experiment Name: At_Far-red-induction_P Parameter: Organism Value: A. thaliana
  misc_feature: MA Experiment 20001450 PARAMETER Experiment Name: At_Far-red-induction_P Parameter: Plant Line Value: Columbia
  misc_feature: MA Experiment 20001450 PARAMETER Experiment Name: At_Far-red-induction_P Parameter: Timepoint (hr) Value: 8
  misc_feature: MA Experiment 20001450 PARAMETER Experiment Name: At_Far-red-induction_P Parameter: Tissue Value: Whole Plant
  misc_feature: MA Experiment ID: 20001560 Result: Up-regulated in Transcription
  misc_feature: MA Experiment 20001560 PARAMETER Experiment Name: At_Drought_Soil_Dry_P Parameter: Age (day) Value: 28
  misc_feature: MA Experiment 20001560 PARAMETER Experiment Name: At_Drought_Soil_Dry_P Parameter: Organism Value: A. thaliana
  misc_feature: MA Experiment 20001560 PARAMETER Experiment Name: At_Drought_Soil_Dry_P Parameter: Plant Line Value: WS
  misc_feature: MA Experiment 20001560 PARAMETER Experiment Name: At_Drought_Soil_Dry_P Parameter: Post Timepoint (hr) Value: None
  misc_feature: MA Experiment 20001560 PARAMETER Experiment Name: At_Drought_Soil_Dry_P Parameter: Post-Treatment Value: None
  misc_feature: MA Experiment 20001560 PARAMETER Experiment Name: At_Drought_Soil_Dry_P Parameter: Timepoint (day) Value: 14
  misc_feature: MA Experiment 20001560 PARAMETER Experiment Name: At_Drought_Soil_Dry_P Parameter: Treatment Value: Drought vs. No Drought
  misc_feature: MA Experiment ID: 20001905 Result: Up-regulated in Transcription
  misc_feature: MA Experiment 20001905 PARAMETER Experiment Name: At_Drought_Reproduction_P Parameter: Age (day) Value: 40
  misc_feature: MA Experiment 20001905 PARAMETER Experiment Name: At_Drought_Reproduction_P Parameter: Organism Value: A. thaliana
  misc_feature: MA Experiment 20001905 PARAMETER Experiment Name: At_Drought_Reproduction_P Parameter: Plant Line Value: WS
  misc_feature: MA Experiment 20001905 PARAMETER Experiment Name: At_Drought_Reproduction_P Parameter: Timepoint (day) Value: 10
  misc_feature: MA Experiment 20001905 PARAMETER Experiment Name: At_Drought_Reproduction_P Parameter: Tissue Value: Rosettes
  misc_feature: MA Experiment 20001905 PARAMETER Experiment Name: At_Drought_Reproduction_P Parameter: Treatment Value: Drought vs. No Drought
atcttaatttccctcgcattgagaattttcaactttttctatctctcttcccaaatcacaaatggcgggtcgcggcaaaactctcggatctggcgttgctaagaaatcaacatcgagaagcagcaaagccggtctccaattccccgttggtcgtatcgctcgttttctaaagaacggcaagtacgcaacacgtgttggtgccggagctccggtttacttagccgccgttctcgaatacctcgccgctgaggtattggaattggctggaaacgcagctagggataacaagaagactaggattgtgccacgtcacattcagctcgcggtgagaaacgatgaggagctgagtaaactgcttggagatgtgacgattgctaatggaggtgtgatgcctaacattcacagtcttcttcttcccaagaaagctggtgcttcaaaaccttccgctgatgaagattagattagggatttgtgttgtggttgtttagctaattaatgtgtagcttagtctttcattagattagatctgaattagttttcattaatggtgttgtgtagtctctcttttgcttcaaaaacaagtattaaaatcttattattttgaatt

SEQ ID NO: 29553 - protein, 132 aa, Arabidopsis thaliana
  peptide (1)..(132): Ceres Seq. ID no. 12332181
  misc_feature (4)..(121): Pfam Name: Core histone H2A/H2B/H3/H4 Pfam Description: Core histone H2A/H2B/H3/H4
  misc_feature (1)..(132): Homolog of NCBI NO: 7439702 NR Description: histone H2A (clone TH254) - wheat
  misc_feature (1)..(132): Homolog of NCBI NO: 34393263 NR Description: histone H2A [Oryza sativa (japonica
  misc_feature (1)..(132): Homolog of NCBI NO: 34393264 NR Description: putative histone H2A [Oryza sativa (japonica
  misc_feature (1)..(132): Homolog of NCBI NO: 29837243 NR Description: putative histone H2A [Oryza sativa (japonica
  misc_feature (1)..(132): Homolog of NCBI NO: 2130105 NR Description: histone H2A.4 - wheat
  misc_feature (1)..(132): Homolog of NCBI NO: 21617982 NR Description: histone H2A-like protein [Arabidopsis thaliana]
  misc_feature (1)..(132): Homolog of NCBI NO: 15237024 NR Description: histone H2A- like protein
  misc_feature (1)..(130): Homolog of NCBI NO: 15239697 NR Description: histone H2A (gb|AAF64418.1)
  misc_feature (1)..(132): Homolog of NCBI NO: 15223708 NR Description: histone H2A, putative
  misc_feature (1)..(132): Homolog of NCBI NO: 15232330 NR Description: histone H2A, putative
MAGRGKTLGSGVAKKSTSRSSKAGLQFPVGRIARFLKNGKYATRVGAGAPVYLAAVLEYLAAEVLELAGNAARDNKKTRIVPRHIQLAVRNDEELSKLLGDVTIANGGVMPNIHSLLLPKKAGASKPSADED

SEQ ID NO: 29554 - DNA, 854 bp, Arabidopsis thaliana
  misc_feature (1)..(854): Ceres Seq. ID no. 12333072
  misc_feature: MA Experiment ID: 108434 Result: Up-regulated in Transcription
  misc_feature: MA Experiment 108434 PARAMETER Experiment Name: At_Root_Tips_cDNA_P Parameter: Tissue Value: Root Tips
  misc_feature: MA Experiment ID: 108462 Result: Down-regulated in Transcription
  misc_feature: MA Experiment 108462 PARAMETER Experiment Name: At_Germinating_Seeds_cDNA_P Parameter: Age (day) Value: 2 vs. 0
  misc_feature: MA Experiment 108462 PARAMETER Experiment Name: At_Germinating_Seeds_cDNA_P Parameter: Tissue Value: Germinating Seeds
  misc_feature: MA Experiment ID: 108463 Result: Down-regulated in Transcription
  misc_feature: MA Experiment 108463 PARAMETER Experiment Name: At_Germinating_Seeds_cDNA_P Parameter: Age (day) Value: 3 vs. 0
  misc_feature: MA Experiment 108463 PARAMETER Experiment Name: At_Germinating_Seeds_cDNA_P Parameter: Tissue Value: Germinating Seeds
  misc_feature: MA Experiment ID: 108464 Result: Down-regulated in Transcription
  misc_feature: MA Experiment 108464 PARAMETER Experiment Name: At_Germinating_Seeds_cDNA_P Parameter: Age (day) Value: 4 vs. 0
  misc_feature: MA Experiment 108464 PARAMETER Experiment Name: At_Germinating_Seeds_cDNA_P Parameter: Tissue Value: Germinating Seeds
  misc_feature: MA Experiment ID: 20000794 Result: Down-regulated in Transcription
  misc_feature: MA Experiment 20000794 PARAMETER Experiment Name: At_Petals_P Parameter: Age (day) Value: 23-25 days
  misc_feature: MA Experiment 20000794 PARAMETER Experiment Name: At_Petals_P Parameter: Plant Line Value: WS
  misc_feature: MA Experiment 20000794 PARAMETER Experiment Name: At_Petals_P Parameter: Tissue Value: Petals vs. Whole plant
  misc_feature: MA Experiment ID: 20001556 Result: Up-regulated in Transcription
  misc_feature: MA Experiment 20001556 PARAMETER Experiment Name: At_Drought_Soil_Dry_P Parameter: Age (day) Value: 26
  misc_feature: MA Experiment 20001556 PARAMETER Experiment Name: At_Drought_Soil_Dry_P Parameter: Organism Value: A. thaliana
  misc_feature: MA Experiment 20001556 PARAMETER Experiment Name: At_Drought_Soil_Dry_P Parameter: Plant Line Value: WS
  misc_feature: MA Experiment 20001556 PARAMETER Experiment Name: At_Drought_Soil_Dry_P Parameter: Post Timepoint (hr) Value: None
  misc_feature: MA Experiment 20001556 PARAMETER Experiment Name: At_Drought_Soil_Dry_P Parameter: Post-Treatment Value: None
  misc_feature: MA Experiment 20001556 PARAMETER Experiment Name: At_Drought_Soil_Dry_P Parameter: Timepoint (day) Value: 12
  misc_feature: MA Experiment 20001556 PARAMETER Experiment Name: At_Drought_Soil_Dry_P Parameter: Treatment Value: Drought vs. No Drought
  misc_feature: MA Experiment ID: 20001560 Result: Up-regulated in Transcription
  misc_feature: MA Experiment 20001560 PARAMETER Experiment Name: At_Drought_Soil_Dry_P Parameter: Age (day) Value: 28
  misc_feature: MA Experiment 20001560 PARAMETER Experiment Name: At_Drought_Soil_Dry_P Parameter: Organism Value: A. thaliana
  misc_feature: MA Experiment 20001560 PARAMETER Experiment Name: At_Drought_Soil_Dry_P Parameter: Plant Line Value: WS
  misc_feature: MA Experiment 20001560 PARAMETER Experiment Name: At_Drought_Soil_Dry_P Parameter: Post Timepoint (hr) Value: None
  misc_feature: MA Experiment 20001560 PARAMETER Experiment Name: At_Drought_Soil_Dry_P Parameter: Post-Treatment Value: None
  misc_feature: MA Experiment 20001560 PARAMETER Experiment Name: At_Drought_Soil_Dry_P Parameter: Timepoint (day) Value: 14
  misc_feature: MA Experiment 20001560 PARAMETER Experiment Name: At_Drought_Soil_Dry_P Parameter: Treatment Value: Drought vs. No Drought
  misc_feature: MA Experiment ID: 20001757 Result: Up-regulated in Transcription
  misc_feature: MA Experiment 20001757 PARAMETER Experiment Name: At_50mM_NH4NO3_L-to-H_P Parameter: Timepoint (hr) Value: 6
  misc_feature: MA Experiment 20001757 PARAMETER Experiment Name: At_50mM_NH4NO3_L-to-H_P Parameter: Tissue Value: Leaf
  misc_feature: MA Experiment 20001757 PARAMETER Experiment Name: At_50mM_NH4NO3_L-to-H_P Parameter: Treatment Value: 50mM NH4NO3 vs 100mM Mannitol
gttttcaagtctcgaactttgttggaatcggcgaagtgataatttcgaagcttgatcggtaaatccaggagcttttggatcggaatctgttcgctgatgctttggtgaaaatgggtttcggtgcaattagatcgattttgcgtccattgtcgagaaccttagtttcgcgtgccgtcgttaactactcgtctgcgccgttcaatgcgacgattccggctgcgaaaccccagttatgttccttcttcggtggatcgattactcatttgaggttaccatggattccaatggctaaccattttcatagcttaagcttgactgatactcggctcccgaagagacgacccatgactcatcccaagaggaaaagatccaaattgaaacctccagggccttatgcatacgttcaatatacacctggccagccaatttcttcaaacaatcctaatgagggaagtgtgaagagaagaaatgcgaagaagcgcatagggcagcgtcgtgcttttatactgtctgagaagaagaagaggcaagcgctggtgcaagaggcgaagaggaagaagagaattaagcaagtggaacgtaagatggctgctgtcgctagggaccgagcatgggctgaaagactgattgagcttcaacagctggaagaagagaagaagaaatcaatgtcttcttgagatcaaacatagaaataatcctaaatgacaatctcttttcttgtcttgagttagagaattactcttctttgttgtgtttggcatgttctcttgagagttaactcgctatgttgtctgaagaactgagagttacttgacgtttgtgttctttatatccagtcatgtgtttcttgtttc

SEQ ID NO: 29555 - protein, 188 aa, Arabidopsis thaliana
  peptide (1)..(188): Ceres Seq. ID no. 12333073
  misc_feature (1)..(188): Homolog of NCBI NO: 18409234 NR Description: expressed protein
  misc_feature (1)..(188): Homolog of NCBI NO: 21553452 NR Description: unknown [Arabidopsis thaliana]
MGFGAIRSILRPLSRTLVSRAVVNYSSAPFNATIPAAKPQLCSFFGGSITHLRLPWIPMANHFHSLSLTDTRLPKRRPMTHPKRKRSKLKPPGPYAYVQYTPGQPISSNNPNEGSVKRRNAKKRIGQRRAFILSEKKKRQALVQEAKRKKRIKQVERKMAAVARDRAWAERLIELQQLEEEKKKSMSS

SEQ ID NO: 29556 - protein, 130 aa, Arabidopsis thaliana
  peptide (1)..(130): Ceres Seq. ID no. 12333074
  misc_feature (1)..(130): Homolog of NCBI NO: 18409234 NR Description: expressed protein
  misc_feature (1)..(130): Homolog of NCBI NO: 21553452 NR Description: unknown [Arabidopsis thaliana]
MANHFHSLSLTDTRLPKRRPMTHPKRKRSKLKPPGPYAYVQYTPGQPISSNNPNEGSVKRRNAKKRIGQRRAFILSEKKKRQALVQEAKRKKRIKQVERKMAAVARDRAWAERLIELQQLEEEKKKSMSS

SEQ ID NO: 29557 - protein, 110 aa, Arabidopsis thaliana
  peptide (1)..(110): Ceres Seq. ID no. 12333075
  misc_feature (1)..(110): Homolog of NCBI NO: 18409234 NR Description: expressed protein
  misc_feature (1)..(110): Homolog of NCBI NO: 21553452 NR Description: unknown [Arabidopsis thaliana]
MTHPKRKRSKLKPPGPYAYVQYTPGQPISSNNPNEGSVKRRNAKKRIGQRRAFILSEKKKRQALVQEAKRKKRIKQVERKMAAVARDRAWAERLIELQQLEEEKKKSMSS

SEQ ID NO: 29558 - DNA, 943 bp, Arabidopsis thaliana
  misc_feature (1)..(943): Ceres Seq. ID no. 12332131
  misc_feature: MA Experiment ID: 108434 Result: Down-regulated in Transcription
  misc_feature: MA Experiment 108434 PARAMETER Experiment Name: At_Root_Tips_cDNA_P Parameter: Tissue Value: Root Tips
  misc_feature: MA Experiment ID: 108464 Result: Up-regulated in Transcription
  misc_feature: MA Experiment 108464 PARAMETER Experiment Name: At_Germinating_Seeds_cDNA_P Parameter: Age (day) Value: 4 vs. 0
  misc_feature: MA Experiment 108464 PARAMETER Experiment Name: At_Germinating_Seeds_cDNA_P Parameter: Tissue Value: Germinating Seeds
  misc_feature: MA Experiment ID: 108569 Result: Up-regulated in Transcription
  misc_feature: MA Experiment 108569 PARAMETER Experiment Name: At_0.001%_MeJA__cDNA_P Parameter: Timepoint (hr) Value: 6
  misc_feature: MA Experiment 108569 PARAMETER Experiment Name: At_0.001%_MeJA__cDNA_P Parameter: Tissue Value: Aerial
  misc_feature: MA Experiment 108569 PARAMETER Experiment Name: At_0.001%_MeJA__cDNA_P Parameter: Treatment Value: 0.001% MeJA vs. No Treatment
  misc_feature: MA Experiment ID: 108573 Result: Up-regulated in Transcription
  misc_feature: MA Experiment 108573 PARAMETER Experiment Name: At_Drought_cDNA_P Parameter: Timepoint (hr) Value: 6
  misc_feature: MA Experiment 108573 PARAMETER Experiment Name: At_Drought_cDNA_P Parameter: Tissue Value: Aerial
  misc_feature: MA Experiment 108573 PARAMETER Experiment Name: At_Drought_cDNA_P Parameter: Treatment Value: Drought vs. No Drought
  misc_feature: MA Experiment ID: 108585 Result: Up-regulated in Transcription
  misc_feature: MA Experiment 108585 PARAMETER Experiment Name: At_5mM_NaNP_cDNA_P Parameter: Timepoint (hr) Value: 6
  misc_feature: MA Experiment 108585 PARAMETER Experiment Name: At_5mM_NaNP_cDNA_P Parameter: Tissue Value: Aerial
  misc_feature: MA Experiment 108585 PARAMETER Experiment Name: At_5mM_NaNP_cDNA_P Parameter: Treatment Value: null
  misc_feature: MA Experiment ID: 20000072 Result: Up-regulated in Transcription
  misc_feature: MA Experiment 20000072 PARAMETER Experiment Name: At_100uM_ABA_Mutants_cDNA_P Parameter: Plant Line Value: CS8105
  misc_feature: MA Experiment 20000072 PARAMETER Experiment Name: At_100uM_ABA_Mutants_cDNA_P Parameter: Timepoint (hr) Value: 6
  misc_feature: MA Experiment 20000072 PARAMETER Experiment Name: At_100uM_ABA_Mutants_cDNA_P Parameter: Tissue Value: Aerial
  misc_feature: MA Experiment 20000072 PARAMETER Experiment Name: At_100uM_ABA_Mutants_cDNA_P Parameter: Treatment Value: 100uM ABA vs. No Treatment
  misc_feature: MA Experiment ID: 20000087 Result: Up-regulated in Transcription
  misc_feature: MA Experiment 20000087 PARAMETER Experiment Name: At_100uM_ABA_Mutants_cDNA_P Parameter: Plant Line Value: WS
  misc_feature: MA Experiment 20000087 PARAMETER Experiment Name: At_100uM_ABA_Mutants_cDNA_P Parameter: Timepoint (hr) Value: 6
  misc_feature: MA Experiment 20000087 PARAMETER Experiment Name: At_100uM_ABA_Mutants_cDNA_P Parameter: Tissue Value: Aerial
  misc_feature: MA Experiment 20000087 PARAMETER Experiment Name: At_100uM_ABA_Mutants_cDNA_P Parameter: Treatment Value: 100uM ABA vs. No Treatment
  misc_feature: MA Experiment ID: 20000090 Result: Up-regulated in Transcription
  misc_feature: MA Experiment ID: 20000234 Result: Down-regulated in Transcription
  misc_feature: MA Experiment 20000234 PARAMETER Experiment Name: At_Siliques_P Parameter: Age (day) Value: 21
  misc_feature: MA Experiment 20000234 PARAMETER Experiment Name: At_Siliques_P Parameter: Organism Value: A. thaliana
  misc_feature: MA Experiment 20000234 PARAMETER Experiment Name: At_Siliques_P Parameter: Plant Line Value: WS
  misc_feature: MA Experiment 20000234 PARAMETER Experiment Name: At_Siliques_P Parameter: Tissue Value: Less Than 5mm Siliques vs. Whole Plant
  misc_feature: MA Experiment ID: 20000235 Result: Down-regulated in Transcription
  misc_feature: MA Experiment 20000235 PARAMETER Experiment Name: At_Siliques_P Parameter: Age (day) Value: 21
  misc_feature: MA Experiment 20000235 PARAMETER Experiment Name: At_Siliques_P Parameter: Organism Value: A. thaliana
  misc_feature: MA Experiment 20000235 PARAMETER Experiment Name: At_Siliques_P Parameter: Plant Line Value: WS
  misc_feature: MA Experiment 20000235 PARAMETER Experiment Name: At_Siliques_P Parameter: Tissue Value: 5-10mm Siliques vs. Whole Plant
  misc_feature: MA Experiment ID: 20000264 Result: Down-regulated in Transcription
  misc_feature: MA Experiment 20000264 PARAMETER Experiment Name: At_Open_Flower_P Parameter: Age (day) Value: 21
  misc_feature: MA Experiment 20000264 PARAMETER Experiment Name: At_Open_Flower_P Parameter: Plant Line Value: WS
  misc_feature: MA Experiment 20000264 PARAMETER Experiment Name: At_Open_Flower_P Parameter: Tissue Value: Open Flower vs. Whole Plant
  misc_feature: MA Experiment ID: 20000265 Result: Down-regulated in Transcription
  misc_feature: MA Experiment 20000265 PARAMETER Experiment Name: At_Open_Flower_P Parameter: Age (day) Value: 21
  misc_feature: MA Experiment 20000265 PARAMETER Experiment Name: At_Open_Flower_P Parameter: Plant Line Value: WS
  misc_feature: MA Experiment 20000265 PARAMETER Experiment Name: At_Open_Flower_P Parameter: Tissue Value: Closed Flower vs. Whole Plant
  misc_feature: MA Experiment ID: 20000286 Result: Down-regulated in Transcription
  misc_feature: MA Experiment 20000286 PARAMETER Experiment Name: At_Open_Flower_P Parameter: Age (day) Value: 21
  misc_feature: MA Experiment 20000286 PARAMETER Experiment Name: At_Open_Flower_P Parameter: Plant Line Value: WS
  misc_feature: MA Experiment 20000286 PARAMETER Experiment Name: At_Open_Flower_P Parameter: Tissue Value: Half Open vs. Whole Plant
  misc_feature: MA Experiment ID: 20000438 Result: Down-regulated in Transcription
  misc_feature: MA Experiment 20000438 PARAMETER Experiment Name: At_Shoots__P Parameter: Age (day) Value: 14
  misc_feature: MA Experiment 20000438 PARAMETER Experiment Name: At_Shoots__P Parameter: Tissue Value: Shoots vs. Whole Plant
aaccactccatctctcgtgctgaccacgctccgattctccatttctttcccttttgacttttcacttccaatttttcggtatcagatctggacgatggcttcacaaatctctcagcttgcttgtttctcatccaccaatcgccaatttcacttccaaagccgatcgtttccatgccctatgattcgtccccagtcttttgtagttaaaagtgttgatgggaatagctctgaaacaccagcttctctaagctatacagctgaggtttcaaaacctgttgttgagaaaacatccaaaccgtattccactgttgatgaaactgctaccaataaagagagcatcacagagccagtagaggaagatgttgccacacaaccaataagagcagcaaagatccacgacttctgtttcggcattccttatggtggtctcgttgtgagtggagggcttcttggttttgcgttttcacgaaatcttacaagtttaagtactggtgtcctctatggtggtggccttctagcccttagtacactgagcttaaagatttggcgagagggaaaatctagtttcccttatatactaggacaagcagtgctttcagctgtcgtcttctggaagaacttcacagcttattcgatgactaagaagctgtttccggccggggtttttgctgtcatcagtgcttgcatgttgtgtttctattcatatgtggtgctctctggaggaaacccacctccaaagaaattgaaaccatctgcgactagtccttcatactgaagggactttacataggtttagatttaaaaaagtggagatcttctctcttttgataactctggtctgttggattactggtgtaattttatactctttacgaattgatacacttggttttgtttgtgacctgttctttccagtgtcataatctaaagttttgattttctc

SEQ ID NO: 29559 - protein, 257 aa, Arabidopsis thaliana
  peptide (1)..(257): Ceres Seq. ID no. 12332132
  misc_feature (134)..(237): Pfam Name: Uncharacterised protein family (UPF0136) Pfam Description: Uncharacterised protein family (UPF0136)
  misc_feature (92)..(235): Homolog of NCBI NO: 21554522 NR Description: putative non-green plastid inner envelope
  misc_feature (92)..(235): Homolog of NCBI NO: 18404784 NR Description: putative non-green plastid inner envelope
  misc_feature (92)..(235): Homolog of NCBI NO: 25365973 NR Description: hypothetical protein At2g38550 [imported] -
  misc_feature (113)..(247): Homolog of NCBI NO: 7488560 NR Description: inner envelope membrane protein precursor,
  misc_feature (131)..(247): Homolog of NCBI NO: 34896628 NR Description: hypothetical protein [Oryza sativa]
  misc_feature (131)..(246): Homolog of NCBI NO: 18403201 NR Description: expressed protein
  misc_feature (131)..(247): Homolog of NCBI NO: 15232290 NR Description: unknown protein; protein id: At3g20510.1
  misc_feature (88)..(256): Homolog of NCBI NO: 38344745 NR Description: OSJNBa0089K21.3 [Oryza sativa (japonica
  misc_feature (32)..(257): Homolog of NCBI NO: 11290570 NR Description: hypothetical protein F28O9.130 - Arabidopsis
  misc_feature (32)..(257): Homolog of NCBI NO: 18410685 NR Description: expressed protein
TTPSLVLTTLRFSISFPFDFSLPIFRYQIWTMASQISQLACFSSTNRQFHFQSRSFPCPMIRPQSFVVKSVDGNSSETPASLSYTAEVSKPVVEKTSKPYSTVDETATNKESITEPVEEDVATQPIRAAKIHDFCFGIPYGGLVVSGGLLGFAFSRNLTSLSTGVLYGGGLLALSTLSLKIWREGKSSFPYILGQAVLSAVVFWKNFTAYSMTKKLFPAGVFAVISACMLCFYSYVVLSGGNPPPKKLKPSATSPSY

SEQ ID NO: 29560 - protein, 226 aa, Arabidopsis thaliana
  peptide (1)..(226): Ceres Seq. ID no. 12332133
  misc_feature (103)..(206): Pfam Name: Uncharacterised protein family (UPF0136) Pfam Description: Uncharacterised protein family (UPF0136)
  misc_feature (61)..(204): Homolog of NCBI NO: 21554522 NR Description: putative non-green plastid inner envelope
  misc_feature (61)..(204): Homolog of NCBI NO: 18404784 NR Description: putative non-green plastid inner envelope
  misc_feature (61)..(204): Homolog of NCBI NO: 25365973 NR Description: hypothetical protein At2g38550 [imported] -
  misc_feature (82)..(216): Homolog of NCBI NO: 7488560 NR Description: inner envelope membrane protein precursor,
  misc_feature (100)..(216): Homolog of NCBI NO: 34896628 NR Description: hypothetical protein [Oryza sativa]
  misc_feature (100)..(215): Homolog of NCBI NO: 18403201 NR Description: expressed protein
  misc_feature (100)..(216): Homolog of NCBI NO: 15232290 NR Description: unknown protein; protein id: At3g20510.1
  misc_feature (57)..(225): Homolog of NCBI NO: 38344745 NR Description: OSJNBa0089K21.3 [Oryza sativa (japonica
  misc_feature (1)..(226): Homolog of NCBI NO: 11290570 NR Description: hypothetical protein F28O9.130 - Arabidopsis
  misc_feature (1)..(226): Homolog of NCBI NO: 18410685 NR Description: expressed protein
MASQISQLACFSSTNRQFHFQSRSFPCPMIRPQSFVVKSVDGNSSETPASLSYTAEVSKPVVEKTSKPYSTVDETATNKESITEPVEEDVATQPIRAAKIHDFCFGIPYGGLVVSGGLLGFAFSRNLTSLSTGVLYGGGLLALSTLSLKIWREGKSSFPYILGQAVLSAVVFWKNFTAYSMTKKLFPAGVFAVISACMLCFYSYVVLSGGNPPPKKLKPSATSPSY

SEQ ID NO: 29561 - protein, 198 aa, Arabidopsis thaliana
  peptide (1)..(198): Ceres Seq. ID no. 12332134
  misc_feature (75)..(178): Pfam Name: Uncharacterised protein family (UPF0136) Pfam Description: Uncharacterised protein family (UPF0136)
  misc_feature (33)..(176): Homolog of NCBI NO: 21554522 NR Description: putative non-green plastid inner envelope
  misc_feature (33)..(176): Homolog of NCBI NO: 18404784 NR Description: putative non-green plastid inner envelope
  misc_feature (33)..(176): Homolog of NCBI NO: 25365973 NR Description: hypothetical protein At2g38550 [imported] -
  misc_feature (54)..(188): Homolog of NCBI NO: 7488560 NR Description: inner envelope membrane protein precursor,
  misc_feature (72)..(188): Homolog of NCBI NO: 34896628 NR Description: hypothetical protein [Oryza sativa]
  misc_feature (72)..(187): Homolog of NCBI NO: 18403201 NR Description: expressed protein
  misc_feature (72)..(188): Homolog of NCBI NO: 15232290 NR Description: unknown protein; protein id: At3g20510.1
  misc_feature (29)..(197): Homolog of NCBI NO: 38344745 NR Description: OSJNBa0089K21.3 [Oryza sativa (japonica
  misc_feature (1)..(198): Homolog of NCBI NO: 11290570 NR Description: hypothetical protein F28O9.130 - Arabidopsis
  misc_feature (1)..(198): Homolog of NCBI NO: 18410685 NR Description: expressed protein
MIRPQSFVVKSVDGNSSETPASLSYTAEVSKPVVEKTSKPYSTVDETATNKESITEPVEEDVATQPIRAAKIHDFCFGIPYGGLVVSGGLLGFAFSRNLTSLSTGVLYGGGLLALSTLSLKIWREGKSSFPYILGQAVLSAVVFWKNFTAYSMTKKLFPAGVFAVISACMLCFYSYVVLSGGNPPPKKLKPSATSPSY

SEQ ID NO: 29562 - DNA, 864 bp, Arabidopsis thaliana
  misc_feature (1)..(864): Ceres Seq. ID no. 12332127
  misc_feature: MA Experiment ID: 108435 Result: Up-regulated in Transcription
  misc_feature: MA Experiment 108435 PARAMETER Experiment Name: At_stm_Mutants_cDNA_P Parameter: Plant Line Value: wt Landsburg vs stm
  misc_feature: MA Experiment 108435 PARAMETER Experiment Name: At_stm_Mutants_cDNA_P Parameter: Tissue Value: Shoot Apical Meristem Region
  misc_feature: MA Experiment ID: 108462 Result: Up-regulated in Transcription
  misc_feature: MA Experiment 108462 PARAMETER Experiment Name: At_Germinating_Seeds_cDNA_P Parameter: Age (day) Value: 2 vs. 0
  misc_feature: MA Experiment 108462 PARAMETER Experiment Name: At_Germinating_Seeds_cDNA_P Parameter: Tissue Value: Germinating Seeds
  misc_feature: MA Experiment ID: 108463 Result: Up-regulated in Transcription
  misc_feature: MA Experiment 108463 PARAMETER Experiment Name: At_Germinating_Seeds_cDNA_P Parameter: Age (day) Value: 3 vs. 0
  misc_feature: MA Experiment 108463 PARAMETER Experiment Name: At_Germinating_Seeds_cDNA_P Parameter: Tissue Value: Germinating Seeds
  misc_feature: MA Experiment ID: 108464 Result: Up-regulated in Transcription
  misc_feature: MA Experiment 108464 PARAMETER Experiment Name: At_Germinating_Seeds_cDNA_P Parameter: Age (day) Value: 4 vs. 0
  misc_feature: MA Experiment 108464 PARAMETER Experiment Name: At_Germinating_Seeds_cDNA_P Parameter: Tissue Value: Germinating Seeds
  misc_feature: MA Experiment ID: 108474 Result: Down-regulated in Transcription
  misc_feature: MA Experiment 108474 PARAMETER Experiment Name: At_Drought_Flowers_cDNA_P Parameter: Timepoint (hr) Value: null
  misc_feature: MA Experiment 108474 PARAMETER Experiment Name: At_Drought_Flowers_cDNA_P Parameter: Treatment Value: Drought vs. No Drought
  misc_feature: MA Experiment ID: 108501 Result: Up-regulated in Transcription
  misc_feature: MA Experiment 108501 PARAMETER Experiment Name: At_ap2_floral_buds_cDNA_P Parameter: Plant Line Value: ap2 (Ler.)
  misc_feature: MA Experiment 108501 PARAMETER Experiment Name: At_ap2_floral_buds_cDNA_P Parameter: Tissue Value: Closed Flower
  misc_feature: MA Experiment ID: 20000069 Result: Down-regulated in Transcription
  misc_feature: MA Experiment 20000069 PARAMETER Experiment Name: At_100uM_ABA_Mutants_cDNA_P Parameter: Plant Line Value: CS23
  misc_feature: MA Experiment 20000069 PARAMETER Experiment Name: At_100uM_ABA_Mutants_cDNA_P Parameter: Timepoint (hr) Value: 6
  misc_feature: MA Experiment 20000069 PARAMETER Experiment Name: At_100uM_ABA_Mutants_cDNA_P Parameter: Tissue Value: Aerial
  misc_feature: MA Experiment 20000069 PARAMETER Experiment Name: At_100uM_ABA_Mutants_cDNA_P Parameter: Treatment Value: 100uM ABA vs. No Treatment
  misc_feature: MA Experiment ID: 20000070 Result: Down-regulated in Transcription
  misc_feature: MA Experiment 20000070 PARAMETER Experiment Name: At_100uM_ABA_Mutants_cDNA_P Parameter: Plant Line Value: CS24
  misc_feature: MA Experiment 20000070 PARAMETER Experiment Name: At_100uM_ABA_Mutants_cDNA_P Parameter: Timepoint (hr) Value: 6
  misc_feature: MA Experiment 20000070 PARAMETER Experiment Name: At_100uM_ABA_Mutants_cDNA_P Parameter: Tissue Value: Aerial
  misc_feature: MA Experiment 20000070 PARAMETER Experiment Name: At_100uM_ABA_Mutants_cDNA_P Parameter: Treatment Value: 100uM ABA vs. No Treatment
  misc_feature: MA Experiment ID: 20000071 Result: Down-regulated in Transcription
  misc_feature: MA Experiment 20000071 PARAMETER Experiment Name: At_100uM_ABA_Mutants_cDNA_P Parameter: Plant Line Value: CS8104
  misc_feature: MA Experiment 20000071 PARAMETER Experiment Name: At_100uM_ABA_Mutants_cDNA_P Parameter: Timepoint (hr) Value: 6
  misc_feature: MA Experiment 20000071 PARAMETER Experiment Name: At_100uM_ABA_Mutants_cDNA_P Parameter: Tissue Value: Aerial
  misc_feature: MA Experiment 20000071 PARAMETER Experiment Name: At_100uM_ABA_Mutants_cDNA_P Parameter: Treatment Value: 100uM ABA vs. No Treatment
  misc_feature: MA Experiment ID: 20000086 Result: Down-regulated in Transcription
  misc_feature: MA Experiment 20000086 PARAMETER Experiment Name: At_100uM_ABA_Mutants_cDNA_P Parameter: Plant Line Value: CS22
  misc_feature: MA Experiment 20000086 PARAMETER Experiment Name: At_100uM_ABA_Mutants_cDNA_P Parameter: Timepoint (hr) Value: 6
  misc_feature: MA Experiment 20000086 PARAMETER Experiment Name: At_100uM_ABA_Mutants_cDNA_P Parameter: Tissue Value: Aerial
  misc_feature: MA Experiment 20000086 PARAMETER Experiment Name: At_100uM_ABA_Mutants_cDNA_P Parameter: Treatment Value: 100uM ABA vs. No Treatment
  misc_feature: MA Experiment ID: 20000087 Result: Down-regulated in Transcription
  misc_feature: MA Experiment 20000087 PARAMETER Experiment Name: At_100uM_ABA_Mutants_cDNA_P Parameter: Plant Line Value: WS
  misc_feature: MA Experiment 20000087 PARAMETER Experiment Name: At_100uM_ABA_Mutants_cDNA_P Parameter: Timepoint (hr) Value: 6
  misc_feature: MA Experiment 20000087 PARAMETER Experiment Name: At_100uM_ABA_Mutants_cDNA_P Parameter: Tissue Value: Aerial
  misc_feature: MA Experiment 20000087 PARAMETER Experiment Name: At_100uM_ABA_Mutants_cDNA_P Parameter: Treatment Value: 100uM ABA vs. No Treatment
  misc_feature: MA Experiment ID: 20000088 Result: Down-regulated in Transcription
  misc_feature: MA Experiment 20000088 PARAMETER Experiment Name: At_100uM_ABA_Mutants_cDNA_P Parameter: Plant Line Value: Landsberg
  misc_feature: MA Experiment 20000088 PARAMETER Experiment Name: At_100uM_ABA_Mutants_cDNA_P Parameter: Timepoint (hr) Value: 6
  misc_feature: MA Experiment 20000088 PARAMETER Experiment Name: At_100uM_ABA_Mutants_cDNA_P Parameter: Tissue Value: Aerial
  misc_feature: MA Experiment 20000088 PARAMETER Experiment Name: At_100uM_ABA_Mutants_cDNA_P Parameter: Treatment Value: 100uM ABA vs. No Treatment
  misc_feature: MA Experiment ID: 20000089 Result: Down-regulated in Transcription
  misc_feature: MA Experiment ID: 20000090 Result: Down-regulated in Transcription
  misc_feature: MA Experiment ID: 20000113 Result: Up-regulated in Transcription
  misc_feature: MA Experiment 20000113 PARAMETER Experiment Name: At_42deg_Heat_cDNA_P Parameter: Temperature (deg C) Value: 42 vs. 22
  misc_feature: MA Experiment 20000113 PARAMETER Experiment Name: At_42deg_Heat_cDNA_P Parameter: Timepoint (hr) Value: 8
  misc_feature: MA Experiment 20000113 PARAMETER Experiment Name: At_42deg_Heat_cDNA_P Parameter: Tissue Value: Aerial
  misc_feature: MA Experiment ID: 20000117 Result: Down-regulated in Transcription
  misc_feature: MA Experiment 20000117 PARAMETER Experiment Name: At_100uM_ABA_Mutants_cDNA_P Parameter: Plant Line Value: Columbia
  misc_feature: MA Experiment 20000117 PARAMETER Experiment Name: At_100uM_ABA_Mutants_cDNA_P Parameter: Timepoint (hr) Value: 6
  misc_feature: MA Experiment 20000117 PARAMETER Experiment Name: At_100uM_ABA_Mutants_cDNA_P Parameter: Tissue Value: Aerial
  misc_feature: MA Experiment 20000117 PARAMETER Experiment Name: At_100uM_ABA_Mutants_cDNA_P Parameter: Treatment Value: 100uM ABA vs. No Treatment
  misc_feature: MA Experiment ID: 20000144 Result: Up-regulated in Transcription
  misc_feature: MA Experiment 20000144 PARAMETER Experiment Name: At_42deg_Heat_cDNA_P Parameter: Temperature (deg C) Value: 42 vs. 22
  misc_feature: MA Experiment 20000144 PARAMETER Experiment Name: At_42deg_Heat_cDNA_P Parameter: Timepoint (hr) Value: 1
  misc_feature: MA Experiment 20000144 PARAMETER Experiment Name: At_42deg_Heat_cDNA_P Parameter: Tissue Value: Aerial
  misc_feature: MA Experiment ID: 20000171 Result: Up-regulated in Transcription
  misc_feature: MA Experiment 20000171 PARAMETER Experiment Name: At_42deg_Heat_P Parameter: Age (day) Value: 14
  misc_feature: MA Experiment 20000171 PARAMETER Experiment Name: At_42deg_Heat_P Parameter: Organism Value: A. thaliana
  misc_feature: MA Experiment 20000171 PARAMETER Experiment Name: At_42deg_Heat_P Parameter: Plant Line Value: WS
  misc_feature: MA Experiment 20000171 PARAMETER Experiment Name: At_42deg_Heat_P Parameter: Temperature (deg C) Value: 42 vs. 22
  misc_feature: MA Experiment 20000171 PARAMETER Experiment Name: At_42deg_Heat_P Parameter: Timepoint (hr) Value: 1
  misc_feature: MA Experiment 20000171 PARAMETER Experiment Name: At_42deg_Heat_P Parameter: Tissue Value: Aerial
  misc_feature: MA Experiment ID: 20000173 Result: Up-regulated in Transcription
  misc_feature: MA Experiment 20000173 PARAMETER Experiment Name: At_42deg_Heat_P Parameter: Age (day) Value: 14
  misc_feature: MA Experiment 20000173 PARAMETER Experiment Name: At_42deg_Heat_P Parameter: Organism Value: A. thaliana
  misc_feature: MA Experiment 20000173 PARAMETER Experiment Name: At_42deg_Heat_P Parameter: Plant Line Value: WS
  misc_feature: MA Experiment 20000173 PARAMETER Experiment Name: At_42deg_Heat_P Parameter: Temperature (deg C) Value: 42 vs. 22
  misc_feature: MA Experiment 20000173 PARAMETER Experiment Name: At_42deg_Heat_P Parameter: Timepoint (hr) Value: 6
  misc_feature: MA Experiment 20000173 PARAMETER Experiment Name: At_42deg_Heat_P Parameter: Tissue Value: Aerial
  misc_feature: MA Experiment ID: 20000179 Result: Up-regulated in Transcription
  misc_feature: MA Experiment 20000179 PARAMETER Experiment Name: At_Germinating_Seeds_P Parameter: Age (hr) Value: 6 vs. 0
  misc_feature: MA Experiment 20000179 PARAMETER Experiment Name: At_Germinating_Seeds_P Parameter: Tissue Value: Germinating Seeds
  misc_feature: MA Experiment ID: 20000182 Result: Up-regulated in Transcription
  misc_feature: MA Experiment 20000182 PARAMETER Experiment Name: At_2mM_SA_P Parameter: Age (day) Value: 14
  misc_feature: MA Experiment 20000182 PARAMETER Experiment Name: At_2mM_SA_P Parameter: Organism Value: A. thaliana
  misc_feature: MA Experiment 20000182 PARAMETER Experiment Name: At_2mM_SA_P Parameter: Plant Line Value: WS
  misc_feature: MA Experiment 20000182 PARAMETER Experiment Name: At_2mM_SA_P Parameter: Timepoint (hr) Value: 6
  misc_feature: MA Experiment 20000182 PARAMETER Experiment Name: At_2mM_SA_P Parameter: Tissue Value: Aerial
  misc_feature: MA Experiment 20000182 PARAMETER Experiment Name: At_2mM_SA_P Parameter: Treatment Value: 2mM SA vs. No Treatment
  misc_feature: MA Experiment ID: 20000184 Result: Up-regulated in Transcription
  misc_feature: MA Experiment 20000184 PARAMETER Experiment Name: At_Shoots__P Parameter: Age (day) Value: 7
  misc_feature: MA Experiment 20000184 PARAMETER Experiment Name: At_Shoots__P Parameter: Tissue Value: Shoots vs. Whole Plant
  misc_feature: MA Experiment ID: 20000185 Result: Up-regulated in Transcription
  misc_feature: MA Experiment 20000185 PARAMETER Experiment Name: At_Roots__P Parameter: Age (day) Value: 7 vs. 21
  misc_feature: MA Experiment 20000185 PARAMETER Experiment Name: At_Roots__P Parameter: Organism Value: A. thaliana
  misc_feature: MA Experiment 20000185 PARAMETER Experiment Name: At_Roots__P Parameter: Tissue Value: Roots vs. Whole Plant
  misc_feature: MA Experiment ID: 20000227 Result: Up-regulated in Transcription
  misc_feature: MA Experiment 20000227 PARAMETER Experiment Name: At_Root-Tips-vs-Tops_P Parameter: Tissue Value: Root Tips vs. Root Tops
  misc_feature: MA Experiment ID: 20000234 Result: Up-regulated in Transcription
  misc_feature: MA Experiment 20000234 PARAMETER Experiment Name: At_Siliques_P Parameter: Age (day) Value: 21
  misc_feature: MA Experiment 20000234 PARAMETER Experiment Name: At_Siliques_P Parameter: Organism Value: A. thaliana
  misc_feature: MA Experiment 20000234 PARAMETER Experiment Name: At_Siliques_P Parameter: Plant Line Value: WS
  misc_feature: MA Experiment 20000234 PARAMETER Experiment Name: At_Siliques_P Parameter: Tissue Value: Less Than 5mm Siliques vs. Whole Plant
  misc_feature: MA Experiment ID: 20000264 Result: Up-regulated in Transcription
  misc_feature: MA Experiment 20000264 PARAMETER Experiment Name: At_Open_Flower_P Parameter: Age (day) Value: 21
  misc_feature: MA Experiment 20000264 PARAMETER Experiment Name: At_Open_Flower_P Parameter: Plant Line Value: WS
  misc_feature: MA Experiment 20000264 PARAMETER Experiment Name: At_Open_Flower_P Parameter: Tissue Value: Open Flower vs. Whole Plant
  misc_feature: MA Experiment ID: 20000265 Result: Up-regulated in Transcription
  misc_feature: MA Experiment 20000265 PARAMETER Experiment Name: At_Open_Flower_P Parameter: Age (day) Value: 21
  misc_feature: MA Experiment 20000265 PARAMETER Experiment Name: At_Open_Flower_P Parameter: Plant Line Value: WS
  misc_feature: MA Experiment 20000265 PARAMETER Experiment Name: At_Open_Flower_P Parameter: Tissue Value: Closed Flower vs. Whole Plant
  misc_feature: MA Experiment ID: 20000267 Result: Up-regulated in Transcription
  misc_feature: MA Experiment 20000267 PARAMETER Experiment Name: At_Drought_P Parameter: Age (day) Value: 7
  misc_feature: MA Experiment 20000267 PARAMETER Experiment Name: At_Drought_P Parameter: Organism Value: A. thaliana
  misc_feature: MA Experiment 20000267 PARAMETER Experiment Name: At_Drought_P Parameter: Plant Line Value: WS
  misc_feature: MA Experiment 20000267 PARAMETER Experiment Name: At_Drought_P Parameter: Timepoint (hr) Value: 6
  misc_feature: MA Experiment 20000267 PARAMETER Experiment Name: At_Drought_P Parameter: Tissue Value: Whole Plant
  misc_feature: MA Experiment 20000267 PARAMETER Experiment Name: At_Drought_P Parameter: Treatment Value: Drought vs. No Drought
  misc_feature: MA Experiment ID: 20000268 Result: Up-regulated in Transcription
  misc_feature: MA Experiment 20000268 PARAMETER Experiment Name: At_100mM_NaCl__P Parameter: Age (day) Value: 14
  misc_feature: MA Experiment 20000268 PARAMETER Experiment Name: At_100mM_NaCl__P Parameter: Organism Value: A. thaliana
  misc_feature: MA Experiment 20000268 PARAMETER Experiment Name: At_100mM_NaCl__P Parameter: Plant Line Value: WS
  misc_feature: MA Experiment 20000268 PARAMETER Experiment Name: At_100mM_NaCl__P Parameter: Timepoint (hr) Value: 6
  misc_feature: MA Experiment 20000268 PARAMETER Experiment Name: At_100mM_NaCl__P Parameter: Tissue Value: Whole Plant
  misc_feature: MA Experiment 20000268 PARAMETER Experiment Name: At_100mM_NaCl__P Parameter: Treatment Value: 100mM NaCl vs. No Treatment
  misc_feature: MA Experiment ID: 20000286 Result: Up-regulated in Transcription
  misc_feature: MA Experiment 20000286 PARAMETER Experiment Name: At_Open_Flower_P Parameter: Age (day) Value: 21
  misc_feature: MA Experiment 20000286 PARAMETER Experiment Name: At_Open_Flower_P Parameter: Plant Line Value: WS
  misc_feature: MA Experiment 20000286 PARAMETER Experiment Name: At_Open_Flower_P Parameter: Tissue Value: Half Open vs. Whole Plant
  misc_feature: MA Experiment ID: 20000308 Result: Up-regulated in Transcription
  misc_feature: MA Experiment 20000308 PARAMETER Experiment Name: At_100mM_NaCl__P Parameter: Age (day) Value: 17
  misc_feature: MA Experiment 20000308 PARAMETER Experiment Name: At_100mM_NaCl__P Parameter: Organism Value: A. thaliana
  misc_feature: MA Experiment 20000308 PARAMETER Experiment Name: At_100mM_NaCl__P Parameter: Plant Line Value: WS
  misc_feature: MA Experiment 20000308 PARAMETER Experiment Name: At_100mM_NaCl__P Parameter: Timepoint (hr) Value: 72
  misc_feature: MA Experiment 20000308 PARAMETER Experiment Name: At_100mM_NaCl__P Parameter: Tissue Value: Whole Plant
  misc_feature: MA Experiment 20000308 PARAMETER Experiment Name: At_100mM_NaCl__P Parameter: Treatment Value: 100mM NaCl vs. No Treatment
  misc_feature: MA Experiment ID: 20000436 Result: Up-regulated in Transcription
  misc_feature: MA Experiment 20000436 PARAMETER Experiment Name: At_Drought_P Parameter: Age (day) Value: 7
  misc_feature: MA Experiment 20000436 PARAMETER Experiment Name: At_Drought_P Parameter: Organism Value: A. thaliana
  misc_feature: MA Experiment 20000436 PARAMETER Experiment Name: At_Drought_P Parameter: Plant Line Value: WS
  misc_feature: MA Experiment 20000436 PARAMETER Experiment Name: At_Drought_P Parameter: Timepoint (hr) Value: 12
  misc_feature: MA Experiment 20000436 PARAMETER Experiment Name: At_Drought_P Parameter: Tissue Value: Whole Plant
  misc_feature: MA Experiment 20000436 PARAMETER Experiment Name: At_Drought_P Parameter: Treatment Value: Drought vs. No Drought
  misc_feature: MA Experiment ID: 20000437 Result: Up-regulated in Transcription
  misc_feature: MA Experiment 20000437 PARAMETER Experiment Name: At_Drought_P Parameter: Age (day) Value: 8
  misc_feature: MA Experiment 20000437 PARAMETER Experiment Name: At_Drought_P Parameter: Organism Value: A. thaliana
  misc_feature: MA Experiment 20000437 PARAMETER Experiment Name: At_Drought_P Parameter: Plant Line Value: WS
  misc_feature: MA Experiment 20000437 PARAMETER Experiment Name: At_Drought_P Parameter: Timepoint (hr) Value: 24
  misc_feature: MA Experiment 20000437 PARAMETER Experiment Name: At_Drought_P Parameter: Tissue Value: Whole Plant
  misc_feature: MA Experiment 20000437 PARAMETER Experiment Name: At_Drought_P Parameter: Treatment Value: Drought vs. No Drought
  misc_feature: MA Experiment ID: 20000439 Result: Up-regulated in Transcription
  misc_feature: MA Experiment 20000439 PARAMETER Experiment Name: At_Roots__P Parameter: Age (day) Value: 14 vs. 21
  misc_feature: MA Experiment 20000439 PARAMETER Experiment Name: At_Roots__P Parameter: Organism Value: A. thaliana
  misc_feature: MA Experiment 20000439 PARAMETER Experiment Name: At_Roots__P Parameter: Tissue Value: Roots vs. Whole Plant
  misc_feature: MA Experiment ID: 20000441 Result: Down-regulated in Transcription
  misc_feature: MA Experiment 20000441 PARAMETER Experiment Name: At_1uM_BR-BRZ__P Parameter: Tissue Value: Shoot Apices
  misc_feature: MA Experiment 20000441 PARAMETER Experiment Name: At_1uM_BR-BRZ__P Parameter: Treatment Value: 1uM BR vs. No Treatment
  misc_feature: MA Experiment ID: 20000451 Result: Up-regulated in Transcription
  misc_feature: MA Experiment 20000451 PARAMETER Experiment Name: At_CS6879_Shoots-Roots_P Parameter: Age (day) Value: 14
  misc_feature: MA Experiment 20000451 PARAMETER Experiment Name: At_CS6879_Shoots-Roots_P Parameter: Organism Value: A. thaliana
  misc_feature: MA Experiment 20000451 PARAMETER Experiment Name: At_CS6879_Shoots-Roots_P Parameter: Plant Line Value: CS6879 vs. WS
  misc_feature: MA Experiment 20000451 PARAMETER Experiment Name: At_CS6879_Shoots-Roots_P Parameter: Tissue Value: Roots
  misc_feature: MA Experiment ID: 20000456 Result: Up-regulated in Transcription
  misc_feature: MA Experiment 20000456 PARAMETER Experiment Name: At_100uM_BA_P Parameter: Age (day) Value: 14
  misc_feature: MA Experiment 20000456 PARAMETER Experiment Name: At_100uM_BA_P Parameter: Organism Value: A. thaliana
  misc_feature: MA Experiment 20000456 PARAMETER Experiment Name: At_100uM_BA_P Parameter: Plant Line Value: WS
  misc_feature: MA Experiment 20000456 PARAMETER Experiment Name: At_100uM_BA_P Parameter: Timepoint (hr) Value: 6
  misc_feature: MA Experiment 20000456 PARAMETER Experiment Name: At_100uM_BA_P Parameter: Tissue Value: Aerial
  misc_feature: MA Experiment 20000456 PARAMETER Experiment Name: At_100uM_BA_P Parameter: Treatment Value: 100uM BA vs. No Treatment
  misc_feature: MA Experiment ID: 20000495 Result: Down-regulated in Transcription
  misc_feature: MA Experiment 20000495 PARAMETER Experiment Name: At_Guard_Cells_P Parameter: Harvest Date Value: 8/2/2002
  misc_feature: MA Experiment 20000495 PARAMETER Experiment Name: At_Guard_Cells_P Parameter: Organism Value: A. thaliana
  misc_feature: MA Experiment 20000495 PARAMETER Experiment Name: At_Guard_Cells_P Parameter: Tissue Value: Guard Cells vs. Leaves
  misc_feature: MA Experiment ID: 20000506 Result: Up-regulated in Transcription
  misc_feature: MA Experiment 20000506 PARAMETER Experiment Name: At_Wounding_P Parameter: Organism Value: A. thaliana
  misc_feature: MA Experiment 20000506 PARAMETER Experiment Name: At_Wounding_P Parameter: Plant Line Value: WS
  misc_feature: MA Experiment 20000506 PARAMETER Experiment Name: At_Wounding_P Parameter: Timepoint (hr) Value: 6
  misc_feature: MA Experiment 20000506 PARAMETER Experiment Name: At_Wounding_P Parameter: Tissue Value: Aerial
  misc_feature: MA Experiment 20000506 PARAMETER Experiment Name: At_Wounding_P Parameter: Treatment Value: Wounding vs. No Wounding
  misc_feature: MA Experiment ID: 20000794 Result: Up-regulated in Transcription
  misc_feature: MA Experiment 20000794 PARAMETER Experiment Name: At_Petals_P Parameter: Age (day) Value: 23-25 days
  misc_feature: MA Experiment 20000794 PARAMETER Experiment Name: At_Petals_P Parameter: Plant Line Value: WS
  misc_feature: MA Experiment 20000794 PARAMETER Experiment Name: At_Petals_P Parameter: Tissue Value: Petals vs. Whole plant
  misc_feature: MA Experiment ID: 20001247 Result: Down-regulated in Transcription
  misc_feature: MA Experiment 20001247 PARAMETER Experiment Name: At_Far-red-induction_P Parameter: Age (day) Value: 7
  misc_feature: MA Experiment 20001247 PARAMETER Experiment Name: At_Far-red-induction_P Parameter: Light Value: Far-red vs. White
  misc_feature: MA Experiment 20001247 PARAMETER Experiment Name: At_Far-red-induction_P Parameter: Organism Value: A. thaliana
  misc_feature: MA Experiment 20001247 PARAMETER Experiment Name: At_Far-red-induction_P Parameter: Plant Line Value: Columbia
  misc_feature: MA Experiment 20001247 PARAMETER Experiment Name: At_Far-red-induction_P Parameter: Timepoint (hr) Value: 1
  misc_feature: MA Experiment 20001247 PARAMETER Experiment Name: At_Far-red-induction_P Parameter: Tissue Value: Whole Plant
  misc_feature: MA Experiment ID: 20001458 Result: Down-regulated in Transcription
  misc_feature: MA Experiment 20001458 PARAMETER Experiment Name: At_50mM_NH4NO3_L-to-H_P Parameter: Age (day) Value: Undefined
  misc_feature: MA Experiment 20001458 PARAMETER Experiment Name: At_50mM_NH4NO3_L-to-H_P Parameter: Organism Value: Undefined
  misc_feature: MA Experiment 20001458 PARAMETER Experiment Name: At_50mM_NH4NO3_L-to-H_P Parameter: Plant Line Value: Undefined
  misc_feature: MA Experiment 20001458 PARAMETER Experiment Name: At_50mM_NH4NO3_L-to-H_P Parameter: Timepoint (hr) Value: 2
  misc_feature: MA Experiment 20001458 PARAMETER Experiment Name: At_50mM_NH4NO3_L-to-H_P Parameter: Tissue Value: Siliques
  misc_feature: MA Experiment 20001458 PARAMETER Experiment Name: At_50mM_NH4NO3_L-to-H_P Parameter: Treatment Value: 50mM NH4NO3 vs. 100mM Manitol
  misc_feature: MA Experiment ID: 20001504 Result: Up-regulated in Transcription
  misc_feature: MA Experiment 20001504 PARAMETER Experiment Name: At_Far-red-enriched_P Parameter: Age (day) Value: 10
  misc_feature: MA Experiment 20001504 PARAMETER Experiment Name: At_Far-red-enriched_P Parameter: Light Value: Far-red enriched vs. White
  misc_feature: MA Experiment 20001504 PARAMETER Experiment Name: At_Far-red-enriched_P Parameter: Organism Value: A. thaliana
  misc_feature: MA Experiment 20001504 PARAMETER Experiment Name: At_Far-red-enriched_P Parameter: Plant Line Value: Columbia
  misc_feature: MA Experiment 20001504 PARAMETER Experiment Name: At_Far-red-enriched_P Parameter: Timepoint (day) Value: 6
  misc_feature: MA Experiment 20001504 PARAMETER Experiment Name: At_Far-red-enriched_P Parameter: Tissue Value: Whole Plant
  misc_feature: MA Experiment ID: 20001554 Result: Up-regulated in Transcription
  misc_feature: MA Experiment 20001554 PARAMETER Experiment Name: At_Drought_Soil_Dry_P Parameter: Age (day) Value: 21
  misc_feature: MA Experiment 20001554 PARAMETER Experiment Name: At_Drought_Soil_Dry_P Parameter: Organism Value: A. thaliana
  misc_feature: MA Experiment 20001554 PARAMETER Experiment Name: At_Drought_Soil_Dry_P Parameter: Plant Line Value: WS
  misc_feature: MA Experiment 20001554 PARAMETER Experiment Name: At_Drought_Soil_Dry_P Parameter: Post Timepoint (hr) Value: None
  misc_feature: MA Experiment 20001554 PARAMETER Experiment Name: At_Drought_Soil_Dry_P Parameter: Post-Treatment Value: None
  misc_feature: MA Experiment 20001554 PARAMETER Experiment Name: At_Drought_Soil_Dry_P Parameter: Timepoint (day) Value: 7
  misc_feature: MA Experiment 20001554 PARAMETER Experiment Name: At_Drought_Soil_Dry_P Parameter: Treatment Value: Drought vs. No Drought
  misc_feature: MA Experiment ID: 20001555 Result: Up-regulated in Transcription
  misc_feature: MA Experiment 20001555 PARAMETER Experiment Name: At_Drought_Soil_Dry_P Parameter: Age (day) Value: 24
  misc_feature: MA Experiment 20001555 PARAMETER Experiment Name: At_Drought_Soil_Dry_P Parameter: Organism Value: A. thaliana
  misc_feature: MA Experiment 20001555 PARAMETER Experiment Name: At_Drought_Soil_Dry_P Parameter: Plant Line Value: WS
  misc_feature: MA Experiment 20001555 PARAMETER Experiment Name: At_Drought_Soil_Dry_P Parameter: Post Timepoint (hr) Value: None
  misc_feature: MA Experiment 20001555 PARAMETER Experiment Name: At_Drought_Soil_Dry_P Parameter: Post-Treatment Value: None
  misc_feature: MA Experiment 20001555 PARAMETER Experiment Name: At_Drought_Soil_Dry_P Parameter: Timepoint (day) Value: 10
  misc_feature: MA Experiment 20001555 PARAMETER Experiment Name: At_Drought_Soil_Dry_P Parameter: Treatment Value: Drought vs. No Drought
  misc_feature: MA Experiment ID: 20001556 Result: Up-regulated in Transcription
  misc_feature: MA Experiment 20001556 PARAMETER Experiment Name: At_Drought_Soil_Dry_P Parameter: Age (day) Value: 26
  misc_feature: MA Experiment 20001556 PARAMETER Experiment Name: At_Drought_Soil_Dry_P Parameter: Organism Value: A. thaliana
  misc_feature: MA Experiment 20001556 PARAMETER Experiment Name: At_Drought_Soil_Dry_P Parameter: Plant Line Value: WS
  misc_feature: MA Experiment 20001556 PARAMETER Experiment Name: At_Drought_Soil_Dry_P Parameter: Post Timepoint (hr) Value: None
  misc_feature: MA Experiment 20001556 PARAMETER Experiment Name: At_Drought_Soil_Dry_P Parameter: Post-Treatment Value: None
  misc_feature: MA Experiment 20001556 PARAMETER Experiment Name: At_Drought_Soil_Dry_P Parameter: Timepoint (day) Value: 12
  misc_feature: MA Experiment 20001556 PARAMETER Experiment Name: At_Drought_Soil_Dry_P Parameter: Treatment Value: Drought vs. No Drought
  misc_feature: MA Experiment ID: 20001557 Result: Up-regulated in Transcription
  misc_feature: MA Experiment 20001557 PARAMETER Experiment Name: At_Drought_Soil_Dry_P Parameter: Age (day) Value: 27
  misc_feature: MA Experiment 20001557 PARAMETER Experiment Name: At_Drought_Soil_Dry_P Parameter: Organism Value: A. thaliana
  misc_feature: MA Experiment 20001557 PARAMETER Experiment Name: At_Drought_Soil_Dry_P Parameter: Plant Line Value: WS
  misc_feature: MA Experiment 20001557 PARAMETER Experiment Name: At_Drought_Soil_Dry_P Parameter: Post Timepoint (hr) Value: 3
  misc_feature: MA Experiment 20001557 PARAMETER Experiment Name: At_Drought_Soil_Dry_P Parameter: Post-Treatment Value: Re-Water vs. No Drought
  misc_feature: MA Experiment 20001557 PARAMETER Experiment Name: At_Drought_Soil_Dry_P Parameter: Timepoint (day) Value: 13
  misc_feature: MA Experiment 20001557 PARAMETER Experiment Name: At_Drought_Soil_Dry_P Parameter: Treatment Value: Drought vs. No Drought
  misc_feature: MA Experiment ID: 20001559 Result: Up-regulated in Transcription
  misc_feature: MA Experiment 20001559 PARAMETER Experiment Name: At_Drought_Soil_Dry_P Parameter: Age (day) Value: 28
  misc_feature: MA Experiment 20001559 PARAMETER Experiment Name: At_Drought_Soil_Dry_P Parameter: Organism Value: A. thaliana
  misc_feature: MA Experiment 20001559 PARAMETER Experiment Name: At_Drought_Soil_Dry_P Parameter: Plant Line Value: WS
  misc_feature: MA Experiment 20001559 PARAMETER Experiment Name: At_Drought_Soil_Dry_P Parameter: Post Timepoint (hr) Value: 29
  misc_feature: MA Experiment 20001559 PARAMETER Experiment Name: At_Drought_Soil_Dry_P Parameter: Post-Treatment Value: Re-Water vs. No Drought
  misc_feature: MA Experiment 20001559 PARAMETER Experiment Name: At_Drought_Soil_Dry_P Parameter: Timepoint (day) Value: 14
  misc_feature: MA Experiment 20001559 PARAMETER Experiment Name: At_Drought_Soil_Dry_P Parameter: Treatment Value: Drought vs. No Drought
  misc_feature: MA Experiment ID: 20001757 Result: Down-regulated in Transcription
  misc_feature: MA Experiment 20001757 PARAMETER Experiment Name: At_50mM_NH4NO3_L-to-H_P Parameter: Timepoint (hr) Value: 6
  misc_feature: MA Experiment 20001757 PARAMETER Experiment Name: At_50mM_NH4NO3_L-to-H_P Parameter: Tissue Value: Leaf
  misc_feature: MA Experiment 20001757 PARAMETER Experiment Name: At_50mM_NH4NO3_L-to-H_P Parameter: Treatment Value: 50mM NH4NO3 vs 100mM Mannitol
  misc_feature: MA Experiment ID: 20001771 Result: Up-regulated in Transcription
  misc_feature: MA Experiment 20001771 PARAMETER Experiment Name: At_Far-red-enriched-adult_P Parameter: Age (day) Value: 28
  misc_feature: MA Experiment 20001771 PARAMETER Experiment Name: At_Far-red-enriched-adult_P Parameter: Light Value: Far-red enriched vs. White
  misc_feature: MA Experiment 20001771 PARAMETER Experiment Name: At_Far-red-enriched-adult_P Parameter: Organism Value: A. thaliana
  misc_feature: MA Experiment 20001771 PARAMETER Experiment Name: At_Far-red-enriched-adult_P Parameter: Plant Line Value: Columbia
  misc_feature: MA Experiment 20001771 PARAMETER Experiment Name: At_Far-red-enriched-adult_P Parameter: Timepoint (hr) Value: 16
  misc_feature: MA Experiment 20001771 PARAMETER Experiment Name: At_Far-red-enriched-adult_P Parameter: Tissue Value: Aerial
  misc_feature: MA Experiment ID: 20001904 Result: Up-regulated in Transcription
  misc_feature: MA Experiment 20001904 PARAMETER Experiment Name: At_Drought_Reproduction_P Parameter: Age (day) Value: 37
  misc_feature: MA Experiment 20001904 PARAMETER Experiment Name: At_Drought_Reproduction_P Parameter: Organism Value: A. thaliana
  misc_feature: MA Experiment 20001904 PARAMETER Experiment Name: At_Drought_Reproduction_P Parameter: Plant Line Value: WS
  misc_feature: MA Experiment 20001904 PARAMETER Experiment Name: At_Drought_Reproduction_P Parameter: Timepoint (day) Value: 7
  misc_feature: MA Experiment 20001904 PARAMETER Experiment Name: At_Drought_Reproduction_P Parameter: Tissue Value: Rosettes
  misc_feature: MA Experiment 20001904 PARAMETER Experiment Name: At_Drought_Reproduction_P Parameter: Treatment Value: Drought vs. No Drought
  misc_feature: MA Experiment ID: 20001905 Result: Up-regulated in Transcription
  misc_feature: MA Experiment 20001905 PARAMETER Experiment Name: At_Drought_Reproduction_P Parameter: Age (day) Value: 40
  misc_feature: MA Experiment 20001905 PARAMETER Experiment Name: At_Drought_Reproduction_P Parameter: Organism Value: A. thaliana
  misc_feature: MA Experiment 20001905 PARAMETER Experiment Name: At_Drought_Reproduction_P Parameter: Plant Line Value: WS
  misc_feature: MA Experiment 20001905 PARAMETER Experiment Name: At_Drought_Reproduction_P Parameter: Timepoint (day) Value: 10
  misc_feature: MA Experiment 20001905 PARAMETER Experiment Name: At_Drought_Reproduction_P Parameter: Tissue Value: Rosettes
  misc_feature: MA Experiment 20001905 PARAMETER Experiment Name: At_Drought_Reproduction_P Parameter: Treatment Value: Drought vs. No Drought
  misc_feature: MA Experiment ID: 20001906 Result: Up-regulated in Transcription
  misc_feature: MA Experiment 20001906 PARAMETER Experiment Name: At_Drought_Reproduction_P Parameter: Age (day) Value: 35
  misc_feature: MA Experiment 20001906 PARAMETER Experiment Name: At_Drought_Reproduction_P Parameter: Organism Value: A. thaliana
  misc_feature: MA Experiment 20001906 PARAMETER Experiment Name: At_Drought_Reproduction_P Parameter: Plant Line Value: WS
  misc_feature: MA Experiment 20001906 PARAMETER Experiment Name: At_Drought_Reproduction_P Parameter: Timepoint (day) Value: 5
  misc_feature: MA Experiment 20001906 PARAMETER Experiment Name: At_Drought_Reproduction_P Parameter: Tissue Value: Siliques
  misc_feature: MA Experiment 20001906 PARAMETER Experiment Name: At_Drought_Reproduction_P Parameter: Treatment Value: Drought vs. No Drought
  misc_feature: MA Experiment ID: 20001908 Result: Up-regulated in Transcription
  misc_feature: MA Experiment 20001908 PARAMETER Experiment Name: At_Drought_Reproduction_P Parameter: Age (day) Value: 40
  misc_feature: MA Experiment 20001908 PARAMETER Experiment Name: At_Drought_Reproduction_P Parameter: Organism Value: A. thaliana
  misc_feature: MA Experiment 20001908 PARAMETER Experiment Name: At_Drought_Reproduction_P Parameter: Plant Line Value: WS
  misc_feature: MA Experiment 20001908 PARAMETER Experiment Name: At_Drought_Reproduction_P Parameter: Timepoint (day) Value: 10
  misc_feature: MA Experiment 20001908 PARAMETER Experiment Name: At_Drought_Reproduction_P Parameter: Tissue Value: Siliques
  misc_feature: MA Experiment 20001908 PARAMETER Experiment Name: At_Drought_Reproduction_P Parameter: Treatment Value: Drought vs. No Drought
atatcaagcttctacacacgatctagcttaaagttctgtaacctaagcgataatcacttagctactccaagtttcttcttaatttctctcacactagtagttctaagctttagaaatggcaacagcatcgttcaacatgcaatcagtcttcgccggtggattaaccactcgcaagatcaacaccaacaagcttttctccgccggtagcttccctaacctcaagaggaattatccggtgggagtgagatgcatggctgagggaggacccacgaatgaagactcttcaccagcaccatctacctcggccgctcagccgttgccgaagtcaccatctcctcctcctcctatgaaacctaaggtgagcacaaagtttagcgacttgctagcgtttagcggtccagcaccagagaggattaacggacgtttagcgatggttggattcgttgcggcgttggctgtcgagctatccaagggtgaaaacgttttagctcagatctccgacggtggcgtctcatggttcctcggtacaacagcgatcttgacacttgcgtcgcttgtgccgcttttcaagggcataagcgttgagtccaagtccaaaggtatcatgacgtcagacgctgagctttggaacggacgtttcgcgatgctcggtttggtcgcgttggcgttcactgagttcgtcaaaggtgggacactcgtctaaggaaaagagagcacgttatggggaggatgttttaatacgattttgcccatgtaatttctctgtaaagtaatctgtgttaggcctactgtgtgttttatacatgtgtactaagtgacattttgaaacttcgggttaaaaacactttaaaattagtggtgttc

SEQ ID NO: 29563 - protein, 195 aa, Arabidopsis thaliana
  peptide (1)..(195): Ceres Seq. ID no. 12332128
  misc_feature (1)..(192): Homolog of NCBI NO: 28194659 NR Description: putative early light induced protein [Arachis
  misc_feature (8)..(195): Homolog of NCBI NO: 25315849 NR Description: early light-inducable protein [imported] -
  misc_feature (1)..(194): Homolog of NCBI NO: 7488128 NR Description: probable light induced protein - Arabidopsis
  misc_feature (1)..(195): Homolog of NCBI NO: 18414282 NR Description: Expressed protein
  misc_feature (1)..(195): Homolog of NCBI NO: 21618071 NR Description: light-induced protein-like protein [Arabidopsis
  misc_feature (1)..(195): Homolog of NCBI NO: 38123375 NR Description: ELIP [Brassica rapa subsp. pekinensis]
  misc_feature (1)..(195): Homolog of NCBI NO: 15228866 NR Description: early light-induced protein
MATASFNMQSVFAGGLTTRKINTNKLFSAGSFPNLKRNYPVGVRCMAEGGPTNEDSSPAPSTSAAQPLPKSPSPPPPMKPKVSTKFSDLLAFSGPAPERINGRLAMVGFVAALAVELSKGENVLAQISDGGVSWFLGTTAILTLASLVPLFKGISVESKSKGIMTSDAELWNGRFAMLGLVALAFTEFVKGGTLV

SEQ ID NO: 29564 - protein, 188 aa, Arabidopsis thaliana
  peptide (1)..(188): Ceres Seq. ID no. 12332129
  misc_feature (1)..(185): Homolog of NCBI NO: 28194659 NR Description: putative early light induced protein [Arachis
  misc_feature (1)..(188): Homolog of NCBI NO: 25315849 NR Description: early light-inducable protein [imported] -
  misc_feature (1)..(187): Homolog of NCBI NO: 7488128 NR Description: probable light induced protein - Arabidopsis
  misc_feature (1)..(188): Homolog of NCBI NO: 18414282 NR Description: Expressed protein
  misc_feature (1)..(188): Homolog of NCBI NO: 21618071 NR Description: light-induced protein-like protein [Arabidopsis
  misc_feature (1)..(188): Homolog of NCBI NO: 38123375 NR Description: ELIP [Brassica rapa subsp. pekinensis]
  misc_feature (1)..(188): Homolog of NCBI NO: 15228866 NR Description: early light-induced protein
MQSVFAGGLTTRKINTNKLFSAGSFPNLKRNYPVGVRCMAEGGPTNEDSSPAPSTSAAQPLPKSPSPPPPMKPKVSTKFSDLLAFSGPAPERINGRLAMVGFVAALAVELSKGENVLAQISDGGVSWFLGTTAILTLASLVPLFKGISVESKSKGIMTSDAELWNGRFAMLGLVALAFTEFVKGGTLV

SEQ ID NO: 29565 - protein, 150 aa, Arabidopsis thaliana
  peptide (1)..(150): Ceres Seq. ID no. 12332130
  misc_feature (1)..(147): Homolog of NCBI NO: 28194659 NR Description: putative early light induced protein [Arachis
  misc_feature (1)..(150): Homolog of NCBI NO: 25315849 NR Description: early light-inducable protein [imported] -
  misc_feature (1)..(149): Homolog of NCBI NO: 7488128 NR Description: probable light induced protein - Arabidopsis
  misc_feature (1)..(150): Homolog of NCBI NO: 18414282 NR Description: Expressed protein
  misc_feature (1)..(150): Homolog of NCBI NO: 21618071 NR Description: light-induced protein-like protein [Arabidopsis
  misc_feature (1)..(150): Homolog of NCBI NO: 38123375 NR Description: ELIP [Brassica rapa subsp. pekinensis]
  misc_feature (1)..(150): Homolog of NCBI NO: 15228866 NR Description: early light-induced protein
MAEGGPTNEDSSPAPSTSAAQPLPKSPSPPPPMKPKVSTKFSDLLAFSGPAPERINGRLAMVGFVAALAVELSKGENVLAQISDGGVSWFLGTTAILTLASLVPLFKGISVESKSKGIMTSDAELWNGRFAMLGLVALAFTEFVKGGTLV

SEQ ID NO: 29566 - DNA, 854 bp, Arabidopsis thaliana
  misc_feature (1)..(854): Ceres Seq. ID no. 12369952
  misc_feature: MA Experiment ID: 108434 Result: Up-regulated in Transcription
  misc_feature: MA Experiment 108434 PARAMETER Experiment Name: At_Root_Tips_cDNA_P Parameter: Tissue Value: Root Tips
  misc_feature: MA Experiment ID: 108462 Result: Down-regulated in Transcription
  misc_feature: MA Experiment 108462 PARAMETER Experiment Name: At_Germinating_Seeds_cDNA_P Parameter: Age (day) Value: 2 vs. 0
  misc_feature: MA Experiment 108462 PARAMETER Experiment Name: At_Germinating_Seeds_cDNA_P Parameter: Tissue Value: Germinating Seeds
  misc_feature: MA Experiment ID: 108463 Result: Down-regulated in Transcription
  misc_feature: MA Experiment 108463 PARAMETER Experiment Name: At_Germinating_Seeds_cDNA_P Parameter: Age (day) Value: 3 vs. 0
  misc_feature: MA Experiment 108463 PARAMETER Experiment Name: At_Germinating_Seeds_cDNA_P Parameter: Tissue Value: Germinating Seeds
  misc_feature: MA Experiment ID: 108464 Result: Down-regulated in Transcription
  misc_feature: MA Experiment 108464 PARAMETER Experiment Name: At_Germinating_Seeds_cDNA_P Parameter: Age (day) Value: 4 vs. 0
  misc_feature: MA Experiment 108464 PARAMETER Experiment Name: At_Germinating_Seeds_cDNA_P Parameter: Tissue Value: Germinating Seeds
  misc_feature: MA Experiment ID: 108595 Result: Up-regulated in Transcription
  misc_feature: MA Experiment 108595 PARAMETER Experiment Name: At_Ler-pi_Ovule_cDNA_P Parameter: Plant Line Value: null
  misc_feature: MA Experiment ID: 20000224 Result: Down-regulated in Transcription
gaacaaggcttgttctccaagacgctttttaataagctctctctcacaacgccggatctgtagacggaagatggagtgtgtattcggtcttgttgggaatggattcgccatcgttgctgctgatacatcggcggttcatagtatccttcttcacaaaaacaacgaagacaagatcatggtacttgactcacacaagcttgttgctgctagtggcgagcctggtgaccgggttcagtttacggagtacgttcagaagaatgtgtccttgtacaaattcagaaatggaatcccgttgactaccgccgctgctgccaatttcactcgcggagagctcgctactgctttgaggaagaatccgtattcggtgaatatcctgatggctggctatgacgatgagtctggtgcatcactttactacatcgactacattgcaactcttcacaaagtcgacaagggagcttttggttacggctcctacttctccctctccacgatggacaggcattaccgcagtgacatgtctgtagaagaagccattgaactagttgacaaatgcatacttgagatccggtcaagactcgttgttgcaccaccaaactttgtgatcaagattgttgacaaagatggagctcgtgattacgcttggcgtcagtccgtaaaggatgtcacaactgctgttgtctgagttggttttgtgtttggttttcagatgttatgtgtctgtgacatttgcttttgattttaagtcgggagttagtgttttgacactttttaatcgttgagcatcaatagtgtttgcgattccataaaaatgatgatgtattacttcaacaacacaaaataaatctcactcg

SEQ ID NO: 29567 - protein, 227 aa, Arabidopsis thaliana
  peptide (1)..(227): Ceres Seq. ID no. 12369953
  misc_feature (24)..(205): Pfam Name: Proteasome A-type and B-type Pfam Description: Proteasome A-type and B-type
  misc_feature (24)..(211): Homolog of NCBI NO: 33302636 NR Description: Probable proteasome subunit beta type 2
  misc_feature (24)..(209): Homolog of NCBI NO: 8394079 NR Description: proteasome (prosome, macropain) subunit, beta
  misc_feature (24)..(212): Homolog of NCBI NO: 30585195 NR Description: Homo sapiens proteasome (prosome, macropain)
  misc_feature (24)..(212): Homolog of NCBI NO: 4506195 NR Description: proteasome beta 2 subunit
  misc_feature (24)..(212): Homolog of NCBI NO: 29841035 NR Description: similar to NM_017284 proteasome (prosome,
  misc_feature (24)..(157): Homolog of NCBI NO: 14594929 NR Description: putative beta4 proteasome subunit [Nicotiana
  misc_feature (24)..(216): Homolog of NCBI NO: 17380213 NR Description: Proteasome subunit beta type 2 (20S proteasome
  misc_feature (24)..(216): Homolog of NCBI NO: 27552546 NR Description: 20S proteasome beta 4 subunit
  misc_feature (24)..(221): Homolog of NCBI NO: 15233580 NR Description: 20S proteasome beta subunit D2 (PBD2)
  misc_feature (24)..(227): Homolog of NCBI NO: 15228805 NR Description: 20S proteasome beta subunit D (PBD1)
NKACSPRRFLISSLSQRRICRRKMECVFGLVGNGFAIVAADTSAVHSILLHKNNEDKIMVLDSHKLVAASGEPGDRVQFTEYVQKNVSLYKFRNGIPLTTAAAANFTRGELATALRKNPYSVNILMAGYDDESGASLYYIDYIATLHKVDKGAFGYGSYFSLSTMDRHYRSDMSVEEAIELVDKCILEIRSRLVVAPPNFVIKIVDKDGARDYAWRQSVKDVTTAVV

SEQ ID NO: 29568 - protein, 204 aa, Arabidopsis thaliana
  peptide (1)..(204): Ceres Seq. ID no. 12369954
  misc_feature (1)..(182): Pfam Name: Proteasome A-type and B-type Pfam Description: Proteasome A-type and B-type
  misc_feature (1)..(188): Homolog of NCBI NO: 33302636 NR Description: Probable proteasome subunit beta type 2
  misc_feature (1)..(186): Homolog of NCBI NO: 8394079 NR Description: proteasome (prosome, macropain) subunit, beta
  misc_feature (1)..(189): Homolog of NCBI NO: 30585195 NR Description: Homo sapiens proteasome (prosome, macropain)
  misc_feature (1)..(189): Homolog of NCBI NO: 4506195 NR Description: proteasome beta 2 subunit
  misc_feature (1)..(189): Homolog of NCBI NO: 29841035 NR Description: similar to NM_017284 proteasome (prosome,
  misc_feature (1)..(134): Homolog of NCBI NO: 14594929 NR Description: putative beta4 proteasome subunit [Nicotiana
  misc_feature (1)..(193): Homolog of NCBI NO: 17380213 NR Description: Proteasome subunit beta type 2 (20S proteasome
  misc_feature (1)..(193): Homolog of NCBI NO: 27552546 NR Description: 20S proteasome beta 4 subunit
  misc_feature (1)..(198): Homolog of NCBI NO: 15233580 NR Description: 20S proteasome beta subunit D2 (PBD2)
  misc_feature (1)..(204): Homolog of NCBI NO: 15228805 NR Description: 20S proteasome beta subunit D (PBD1)
MECVFGLVGNGFAIVAADTSAVHSILLHKNNEDKIMVLDSHKLVAASGEPGDRVQFTEYVQKNVSLYKFRNGIPLTTAAAANFTRGELATALRKNPYSVNILMAGYDDESGASLYYIDYIATLHKVDKGAFGYGSYFSLSTMDRHYRSDMSVEEAIELVDKCILEIRSRLVVAPPNFVIKIVDKDGARDYAWRQSVKDVTTAVV

SEQ ID NO: 29569 - protein, 169 aa, Arabidopsis thaliana
  peptide (1)..(169): Ceres Seq. ID no. 12369955
  misc_feature (1)..(147): Pfam Name: Proteasome A-type and B-type Pfam Description: Proteasome A-type and B-type
  misc_feature (1)..(153): Homolog of NCBI NO: 33302636 NR Description: Probable proteasome subunit beta type 2
  misc_feature (1)..(151): Homolog of NCBI NO: 8394079 NR Description: proteasome (prosome, macropain) subunit, beta
  misc_feature (1)..(154): Homolog of NCBI NO: 30585195 NR Description: Homo sapiens proteasome (prosome, macropain)
  misc_feature (1)..(154): Homolog of NCBI NO: 4506195 NR Description: proteasome beta 2 subunit
  misc_feature (1)..(154): Homolog of NCBI NO: 29841035 NR Description: similar to NM_017284 proteasome (prosome,
  misc_feature (1)..(99): Homolog of NCBI NO: 14594929 NR Description: putative beta4 proteasome subunit [Nicotiana
  misc_feature (1)..(158): Homolog of NCBI NO: 17380213 NR Description: Proteasome subunit beta type 2 (20S proteasome
  misc_feature (1)..(158): Homolog of NCBI NO: 27552546 NR Description: 20S proteasome beta 4 subunit
  misc_feature (1)..(163): Homolog of NCBI NO: 15233580 NR Description: 20S proteasome beta subunit D2 (PBD2)
  misc_feature (1)..(169): Homolog of NCBI NO: 15228805 NR Description: 20S proteasome beta subunit D (PBD1)
MVLDSHKLVAASGEPGDRVQFTEYVQKNVSLYKFRNGIPLTTAAAANFTRGELATALRKNPYSVNILMAGYDDESGASLYYIDYIATLHKVDKGAFGYGSYFSLSTMDRHYRSDMSVEEAIELVDKCILEIRSRLVVAPPNFVIKIVDKDGARDYAWRQSVKDVTTAVV

SEQ ID NO: 29570 - DNA, 979 bp, Arabidopsis thaliana
  misc_feature (1)..(979): Ceres Seq. ID no. 12333275
  misc_feature: MA Experiment ID: 108474 Result: Down-regulated in Transcription
  misc_feature: MA Experiment 108474 PARAMETER Experiment Name: At_Drought_Flowers_cDNA_P Parameter: Timepoint (hr) Value: null
  misc_feature: MA Experiment 108474 PARAMETER Experiment Name: At_Drought_Flowers_cDNA_P Parameter: Treatment Value: Drought vs. No Drought
  misc_feature: MA Experiment ID: 20000180 Result: Down-regulated in Transcription
  misc_feature: MA Experiment 20000180 PARAMETER Experiment Name: At_Germinating_Seeds_P Parameter: Age (hr) Value: 24 vs. 0
  misc_feature: MA Experiment 20000180 PARAMETER Experiment Name: At_Germinating_Seeds_P Parameter: Tissue Value: Germinating Seeds
aaagaacaagaaaaaagggtgttgttacgatggcatcgagtgataaggttccggtggcgtgtccggcaagcagtggagatggaaaggagccaatgggaaatccgacgaaaaccactacggcgatgctagagaaaggaacggctatgatgcaatcgatgaaaccgatcaggcaaatgagcctccacgtgtgttcattcgcttgctatagccatgatcccggtcgtcagatcgaagttcatatttacggccaccgtgtaaaccaggatttcctccaatgtgctgtctacgattccaattcctctaaggctcatctcatagggatcgaatatatagtgtcggaaaagttattcgaaagtctctcaccggaggaacaaaagctttggcactcgcatgattacgaggttcatgattttcgatacattgtccgatatgtttattatttatctgaaaaacgaaaatgatcgaatgagagttgtttttagatccaaatggctcttctagtaactccaagggtccctgagctcgttgcgaaaccggagcttaaaaatcttgccaaatcttacgggaaattttggtgtacatggcagattgaccgaggggataaattaccactaggtgtaccatcactaatggtatcgccacaagacgtgaatctcgggagaatcaaaccggagttggtgaaaaagagagatgaagaacatggaaactcgactgaatcgttgaagccgtcaagagatgggatctgtggaccagagaagaagaacctggttgctgattattgggttaggtttaggaaaggctttgcgcttgatgttgttgaaacagatatgaagagaacagctcccttcccctaacttttgtgtgtgctttttttctcagacattaattatataagttttcgtaagcttacactagatgggttgtgtacttattatgttatggagtatgataatgtcataaacatgagaattttttcgcc

SEQ ID NO: 29571 - protein, 152 aa, Arabidopsis thaliana
  peptide (1)..(152): Ceres Seq. ID no. 12333276
  misc_feature (126)..(152): Homolog of NCBI NO: 18415199 NR Description: expressed protein
  misc_feature (126)..(152): Homolog of NCBI NO: 21617913 NR Description: unknown [Arabidopsis thaliana]
  misc_feature (10)..(134): Homolog of NCBI NO: 21617913 NR Description: unknown [Arabidopsis thaliana]
  misc_feature (10)..(134): Homolog of NCBI NO: 18415199 NR Description: expressed protein
  misc_feature (10)..(134): Homolog of NCBI NO: 34910820 NR Description: P0456A01.15 [Oryza sativa (japonica
  misc_feature (139)..(152): Homolog of NCBI NO: 34910820 NR Description: P0456A01.15 [Oryza sativa (japonica
  misc_feature (10)..(150): Homolog of NCBI NO: 34909516 NR Description: P0481E12.28 [Oryza sativa (japonica
  misc_feature (10)..(134): Homolog of NCBI NO: 15242474 NR Description: putative protein
  misc_feature (10)..(142): Homolog of NCBI NO: 9758672 NR Description: gene_id:MRA19.8~pir||T05029~strong similarity to
  misc_feature (10)..(142): Homolog of NCBI NO: 7452426 NR Description: hypothetical protein F13C5.90 - Arabidopsis
RTRKKGVVTMASSDKVPVACPASSGDGKEPMGNPTKTTTAMLEKGTAMMQSMKPIRQMSLHVCSFACYSHDPGRQIEVHIYGHRVNQDFLQCAVYDSNSSKAHLIGIEYIVSEKLFESLSPEEQKLWHSHDYEVHDFRYIVRYVYYLSEKRK

SEQ ID NO: 29572 - protein, 143 aa, Arabidopsis thaliana
  peptide (1)..(143): Ceres Seq. ID no. 12333277
  misc_feature (117)..(143): Homolog of NCBI NO: 18415199 NR Description: expressed protein
  misc_feature (117)..(143): Homolog of NCBI NO: 21617913 NR Description: unknown [Arabidopsis thaliana]
  misc_feature (1)..(125): Homolog of NCBI NO: 21617913 NR Description: unknown [Arabidopsis thaliana]
  misc_feature (1)..(125): Homolog of NCBI NO: 18415199 NR Description: expressed protein
  misc_feature (1)..(125): Homolog of NCBI NO: 34910820 NR Description: P0456A01.15 [Oryza sativa (japonica
  misc_feature (130)..(143): Homolog of NCBI NO: 34910820 NR Description: P0456A01.15 [Oryza sativa (japonica
  misc_feature (1)..(141): Homolog of NCBI NO: 34909516 NR Description: P0481E12.28 [Oryza sativa (japonica
  misc_feature (1)..(125): Homolog of NCBI NO: 15242474 NR Description: putative protein
  misc_feature (1)..(133): Homolog of NCBI NO: 9758672 NR Description: gene_id:MRA19.8~pir||T05029~strong similarity to
  misc_feature (1)..(133): Homolog of NCBI NO: 7452426 NR Description: hypothetical protein F13C5.90 - Arabidopsis
MASSDKVPVACPASSGDGKEPMGNPTKTTTAMLEKGTAMMQSMKPIRQMSLHVCSFACYSHDPGRQIEVHIYGHRVNQDFLQCAVYDSNSSKAHLIGIEYIVSEKLFESLSPEEQKLWHSHDYEVHDFRYIVRYVYYLSEKRK

SEQ ID NO: 29573 - protein, 122 aa, Arabidopsis thaliana
  peptide (1)..(122): Ceres Seq. ID no. 12333278
  misc_feature (96)..(122): Homolog of NCBI NO: 18415199 NR Description: expressed protein
  misc_feature (96)..(122): Homolog of NCBI NO: 21617913 NR Description: unknown [Arabidopsis thaliana]
  misc_feature (1)..(104): Homolog of NCBI NO: 21617913 NR Description: unknown [Arabidopsis thaliana]
  misc_feature (1)..(104): Homolog of NCBI NO: 18415199 NR Description: expressed protein
  misc_feature (1)..(104): Homolog of NCBI NO: 34910820 NR Description: P0456A01.15 [Oryza sativa (japonica
  misc_feature (109)..(122): Homolog of NCBI NO: 34910820 NR Description: P0456A01.15 [Oryza sativa (japonica
  misc_feature (1)..(120): Homolog of NCBI NO: 34909516 NR Description: P0481E12.28 [Oryza sativa (japonica
  misc_feature (1)..(104): Homolog of NCBI NO: 15242474 NR Description: putative protein
  misc_feature (1)..(112): Homolog of NCBI NO: 9758672 NR Description: gene_id:MRA19.8~pir||T05029~strong similarity to
  misc_feature (1)..(112): Homolog of NCBI NO: 7452426 NR Description: hypothetical protein F13C5.90 - Arabidopsis
MGNPTKTTTAMLEKGTAMMQSMKPIRQMSLHVCSFACYSHDPGRQIEVHIYGHRVNQDFLQCAVYDSNSSKAHLIGIEYIVSEKLFESLSPEEQKLWHSHDYEVHDFRYIVRYVYYLSEKRK

SEQ ID NO: 29574 - DNA, 930 bp, Arabidopsis thaliana
  misc_feature (1)..(930): Ceres Seq. ID no. 12370141
  misc_feature: MA Experiment ID: 108595 Result: Down-regulated in Transcription
  misc_feature: MA Experiment 108595 PARAMETER Experiment Name: At_Ler-pi_Ovule_cDNA_P Parameter: Plant Line Value: null
gcgaccactagaaggagaaacaaatcttcattccagcaatggcgattcgttgtgtagcgagtagaaaaaccctagccggcttgaaggagacatcatcgaggctattgaggatcagagggattcagacttttacgcttcctgatcttccttacgattatggcgcattggaaccggccattagtggagagatcatgcagattcatcaccagaagcatcaccaggcttatgttactaattacaataatgctcttgagcagcttgatcaagctgtgaacaagggagatgcttccactgttgttaagttgcagagcgccatcaaattcaacggcggaggtcatgtcaaccattcgattttctggaagaaccttgctccttccagtgaaggtggtggagagccaccaaaaggatctcttggtagtgccattgacgctcactttggctcccttgaaggtctggtgaaaaagatgagtgctgagggtgctgcagtgcaaggctcaggatgggtgtggctcggactagacaaagaactgaagaagctagttgttgacacaactgccaatcaggatccattagtgacaaaaggaggaagcttggtacctctggtgggtatagatgtttgggagcacgcctactacttgcagtacaaaaatgtgaggcctgagtatctgaagaatgtatggaaagtgatcaactggaaatatgcaagcgaggtttatgagaaggaaaacaactgaatcgtttacacgatgacataaggagatgaaccagttccagctcagcttttgttttaaggttgtctgaaacaaacttacagtgtctctttggtttttaagatttgctcaactcagctgtgtggtacgttgttttacaatgaaagttttcaagaataaaaatttgctattattgtcagaaagcgctattgtttattct

SEQ ID NO: 29575 - protein, 231 aa, Arabidopsis thaliana
  peptide (1)..(231): Ceres Seq. ID no. 12370142
  misc_feature (18)..(226): Homolog of NCBI NO: 30584207 NR Description: Homo sapiens superoxide dismutase 2,
  misc_feature (1)..(229): Homolog of NCBI NO: 464775 NR Description: Superoxide dismutase [Mn], mitochondrial
  misc_feature (2)..(229): Homolog of NCBI NO: 9929159 NR Description: manganese superoxide dismutase [Digitalis lanata]
  misc_feature (1)..(229): Homolog of NCBI NO: 3915002 NR Description: Superoxide dismutase [Mn], mitochondrial
  misc_feature (1)..(229): Homolog of NCBI NO: 134672 NR Description: Superoxide dismutase [Mn], mitochondrial
  misc_feature (1)..(229): Homolog of NCBI NO: 7433350 NR Description: superoxide dismutase (EC 1.15.1.1) (Mn) - radish
  misc_feature (1)..(229): Homolog of NCBI NO: 15778185 NR Description: superoxide dismutase [Raphanus sativus]
  misc_feature (1)..(231): Homolog of NCBI NO: 21553457 NR Description: putative (Mn) superoxide dismutase [Arabidopsis
  misc_feature (1)..(231): Homolog of NCBI NO: 11256334 NR Description: superoxide dismutase (EC 1.15.1.1) (Mn)
  misc_feature (1)..(231): Homolog of NCBI NO: 15228407 NR Description: manganese superoxide dismutase (MSD1)
MAIRCVASRKTLAGLKETSSRLLRIRGIQTFTLPDLPYDYGALEPAISGEIMQIHHQKHHQAYVTNYNNALEQLDQAVNKGDASTVVKLQSAIKFNGGGHVNHSIFWKNLAPSSEGGGEPPKGSLGSAIDAHFGSLEGLVKKMSAEGAAVQGSGWVWLGLDKELKKLVVDTTANQDPLVTKGGSLVPLVGIDVWEHAYYLQYKNVRPEYLKNVWKVINWKYASEVYEKENN

SEQ ID NO: 29576 - protein, 180 aa, Arabidopsis thaliana
  peptide (1)..(180): Ceres Seq. ID no. 12370143
  misc_feature (1)..(175): Homolog of NCBI NO: 30584207 NR Description: Homo sapiens superoxide dismutase 2,
  misc_feature (1)..(178): Homolog of NCBI NO: 464775 NR Description: Superoxide dismutase [Mn], mitochondrial
  misc_feature (1)..(178): Homolog of NCBI NO: 9929159 NR Description: manganese superoxide dismutase [Digitalis lanata]
  misc_feature (1)..(178): Homolog of NCBI NO: 3915002 NR Description: Superoxide dismutase [Mn], mitochondrial
  misc_feature (1)..(178): Homolog of NCBI NO: 134672 NR Description: Superoxide dismutase [Mn], mitochondrial
  misc_feature (1)..(178): Homolog of NCBI NO: 7433350 NR Description: superoxide dismutase (EC 1.15.1.1) (Mn) - radish
  misc_feature (1)..(178): Homolog of NCBI NO: 15778185 NR Description: superoxide dismutase [Raphanus sativus]
  misc_feature (1)..(180): Homolog of NCBI NO: 21553457 NR Description: putative (Mn) superoxide dismutase [Arabidopsis
  misc_feature (1)..(180): Homolog of NCBI NO: 11256334 NR Description: superoxide dismutase (EC 1.15.1.1) (Mn)
  misc_feature (1)..(180): Homolog of NCBI NO: 15228407 NR Description: manganese superoxide dismutase (MSD1)
MQIHHQKHHQAYVTNYNNALEQLDQAVNKGDASTVVKLQSAIKFNGGGHVNHSIFWKNLAPSSEGGGEPPKGSLGSAIDAHFGSLEGLVKKMSAEGAAVQGSGWVWLGLDKELKKLVVDTTANQDPLVTKGGSLVPLVGIDVWEHAYYLQYKNVRPEYLKNVWKVINWKYASEVYEKENN

SEQ ID NO: 29577 - DNA, 1440 bp, Arabidopsis thaliana
  misc_feature (1)..(1440): Ceres Seq. ID no. 12370638
  misc_feature: MA Experiment ID: 108434 Result: Up-regulated in Transcription
  misc_feature: MA Experiment 108434 PARAMETER Experiment Name: At_Root_Tips_cDNA_P Parameter: Tissue Value: Root Tips
  misc_feature: MA Experiment ID: 108462 Result: Down-regulated in Transcription
  misc_feature: MA Experiment 108462 PARAMETER Experiment Name: At_Germinating_Seeds_cDNA_P Parameter: Age (day) Value: 2 vs. 0
  misc_feature: MA Experiment 108462 PARAMETER Experiment Name: At_Germinating_Seeds_cDNA_P Parameter: Tissue Value: Germinating Seeds
  misc_feature: MA Experiment ID: 108463 Result: Down-regulated in Transcription
  misc_feature: MA Experiment 108463 PARAMETER Experiment Name: At_Germinating_Seeds_cDNA_P Parameter: Age (day) Value: 3 vs. 0
  misc_feature: MA Experiment 108463 PARAMETER Experiment Name: At_Germinating_Seeds_cDNA_P Parameter: Tissue Value: Germinating Seeds
  misc_feature: MA Experiment ID: 108464 Result: Down-regulated in Transcription
  misc_feature: MA Experiment 108464 PARAMETER Experiment Name: At_Germinating_Seeds_cDNA_P Parameter: Age (day) Value: 4 vs. 0
  misc_feature: MA Experiment 108464 PARAMETER Experiment Name: At_Germinating_Seeds_cDNA_P Parameter: Tissue Value: Germinating Seeds
  misc_feature: MA Experiment ID: 20000173 Result: Up-regulated in Transcription
  misc_feature: MA Experiment 20000173 PARAMETER Experiment Name: At_42deg_Heat_P Parameter: Age (day) Value: 14
  misc_feature: MA Experiment 20000173 PARAMETER Experiment Name: At_42deg_Heat_P Parameter: Organism Value: A. thaliana
  misc_feature: MA Experiment 20000173 PARAMETER Experiment Name: At_42deg_Heat_P Parameter: Plant Line Value: WS
  misc_feature: MA Experiment 20000173 PARAMETER Experiment Name: At_42deg_Heat_P Parameter: Temperature (deg C) Value: 42 vs. 22
  misc_feature: MA Experiment 20000173 PARAMETER Experiment Name: At_42deg_Heat_P Parameter: Timepoint (hr) Value: 6
  misc_feature: MA Experiment 20000173 PARAMETER Experiment Name: At_42deg_Heat_P Parameter: Tissue Value: Aerial
  misc_feature: MA Experiment ID: 20000224 Result: Down-regulated in Transcription
  misc_feature: MA Experiment ID: 20000227 Result: Up-regulated in Transcription
  misc_feature: MA Experiment 20000227 PARAMETER Experiment Name: At_Root-Tips-vs-Tops_P Parameter: Tissue Value: Root Tips vs. Root Tops
  misc_feature: MA Experiment ID: 20000437 Result: Down-regulated in Transcription
  misc_feature: MA Experiment 20000437 PARAMETER Experiment Name: At_Drought_P Parameter: Age (day) Value: 8
  misc_feature: MA Experiment 20000437 PARAMETER Experiment Name: At_Drought_P Parameter: Organism Value: A. thaliana
  misc_feature: MA Experiment 20000437 PARAMETER Experiment Name: At_Drought_P Parameter: Plant Line Value: WS
  misc_feature: MA Experiment 20000437 PARAMETER Experiment Name: At_Drought_P Parameter: Timepoint (hr) Value: 24
  misc_feature: MA Experiment 20000437 PARAMETER Experiment Name: At_Drought_P Parameter: Tissue Value: Whole Plant
  misc_feature: MA Experiment 20000437 PARAMETER Experiment Name: At_Drought_P Parameter: Treatment Value: Drought vs. No Drought
  misc_feature: MA Experiment ID: 20000794 Result: Down-regulated in Transcription
  misc_feature: MA Experiment 20000794 PARAMETER Experiment Name: At_Petals_P Parameter: Age (day) Value: 23-25 days
  misc_feature: MA Experiment 20000794 PARAMETER Experiment Name: At_Petals_P Parameter: Plant Line Value: WS
  misc_feature: MA Experiment 20000794 PARAMETER Experiment Name: At_Petals_P Parameter: Tissue Value: Petals vs. Whole plant
  misc_feature: MA Experiment ID: 20001557 Result: Up-regulated in Transcription
  misc_feature: MA Experiment 20001557 PARAMETER Experiment Name: At_Drought_Soil_Dry_P Parameter: Age (day) Value: 27
  misc_feature: MA Experiment 20001557 PARAMETER Experiment Name: At_Drought_Soil_Dry_P Parameter: Organism Value: A. thaliana
  misc_feature: MA Experiment 20001557 PARAMETER Experiment Name: At_Drought_Soil_Dry_P Parameter: Plant Line Value: WS
  misc_feature: MA Experiment 20001557 PARAMETER Experiment Name: At_Drought_Soil_Dry_P Parameter: Post Timepoint (hr) Value: 3
  misc_feature: MA Experiment 20001557 PARAMETER Experiment Name: At_Drought_Soil_Dry_P Parameter: Post-Treatment Value: Re-Water vs. No Drought
  misc_feature: MA Experiment 20001557 PARAMETER Experiment Name: At_Drought_Soil_Dry_P Parameter: Timepoint (day) Value: 13
  misc_feature: MA Experiment 20001557 PARAMETER Experiment Name: At_Drought_Soil_Dry_P Parameter: Treatment Value: Drought vs. No Drought
  misc_feature: MA Experiment ID: 20001558 Result: Up-regulated in Transcription
  misc_feature: MA Experiment 20001558 PARAMETER Experiment Name: At_Drought_Soil_Dry_P Parameter: Age (day) Value: 27
  misc_feature: MA Experiment 20001558 PARAMETER Experiment Name: At_Drought_Soil_Dry_P Parameter: Organism Value: A. thaliana
  misc_feature: MA Experiment 20001558 PARAMETER Experiment Name: At_Drought_Soil_Dry_P Parameter: Plant Line Value: WS
  misc_feature: MA Experiment 20001558 PARAMETER Experiment Name: At_Drought_Soil_Dry_P Parameter: Post Timepoint (hr) Value: 6
  misc_feature: MA Experiment 20001558 PARAMETER Experiment Name: At_Drought_Soil_Dry_P Parameter: Post-Treatment Value: Re-Water vs. No Drought
  misc_feature: MA Experiment 20001558 PARAMETER Experiment Name: At_Drought_Soil_Dry_P Parameter: Timepoint (day) Value: 13
  misc_feature: MA Experiment 20001558 PARAMETER Experiment Name: At_Drought_Soil_Dry_P Parameter: Treatment Value: Drought vs. No Drought
  misc_feature: MA Experiment ID: 20001757 Result: Up-regulated in Transcription
  misc_feature: MA Experiment 20001757 PARAMETER Experiment Name: At_50mM_NH4NO3_L-to-H_P Parameter: Timepoint (hr) Value: 6
  misc_feature: MA Experiment 20001757 PARAMETER Experiment Name: At_50mM_NH4NO3_L-to-H_P Parameter: Tissue Value: Leaf
  misc_feature: MA Experiment 20001757 PARAMETER Experiment Name: At_50mM_NH4NO3_L-to-H_P Parameter: Treatment Value: 50mM NH4NO3 vs 100mM Mannitol
ctctcttgcagtcctcatcgttggagcttagaagccgtcggcacaagaagaagaagaagaagaatgtctcacaggaagtttgagcacccaagacatggttctcttggtttccttccaaggaagagagctaaccgtcacagaggaaaggtgaaggcgttccctaaggatgaccaaaccaagccttgcaagttcacagctttcatgggttacaaagctggtatgactcacattgtcagagaagtggagaaacctggatccaagcttcacaagaaggagacatgtgaggctgttaccatcattgagacacctgctatggtggttgttggagttgttgcctatgtgaagactcctagaggtttgaggtctttgaacactgtctgggcacagcatttgagtgaggaggtcaggagaaggttctacaagaactgggctaagtctaagaagaaggctttcactgggtacgctaagcagtatgacagtgaggatggcaagaagggtattcaggctcagcttgagaagatgaagaagtacgctactgtcatccgtgttttggctcacactcagatcaggaagatgaagggattgaagcagaagaaggctcacatgatggagatccagatcaatggtggtaccattgcccagaaggttgactttgcctacagtttctttgagaagcagatcccaattgaagctgtcttccagaaggatgaaatgattgatatcattggtgtgaccaagggtaagggttatgaaggtgttgttactcgttggggtgttacccgtcttcctcgtaagactcacagaggtctgcgtaaggttgcttgtattggtgcgtggcatcctgctagagtgtcctacactgttgctagggctggtcagaacggttaccatcaccgtactgagcttaacaagaagatttacaggttgggtaaggttggtactgaggcacacacagccatgactgaatatgacaggactgagaaggatgtgactccaatgggaggcttcccacactacggtattgtgaaggatgactacttgatgattaaggggtgctgtgttggtcccaagaagagagttgtaactctcagacagtcacttctcactcagacttcccgtcttgccttggaggagatcaaactcaagtttattgacaccgcctccatttttggacatggtcgcttccagacctcccttgagaagatgaggttttacaaccgtgtcacgaagtaagagttgttttatcacaattcttcttagaaagtttcatgtttggttatctgttgctacttatctcagagatgttatcctttaaacaatgttatggagttttcttttgcttttagtttgttacttttttggaagttaaaacgatttgcttctcaagttttgagactttgatgtgttctttatcatttatgaaaaaccaacctggagcat

SEQ ID NO: 29578 - protein, 410 aa, Arabidopsis thaliana
  peptide (1)..(410): Ceres Seq. ID no. 12370639
  misc_feature (71)..(364): Pfam Name: Ribosomal protein L3 Pfam Description: Ribosomal protein L3
  misc_feature (22)..(410): Homolog of NCBI NO: 4506649 NR Description: ribosomal protein L3
  misc_feature (22)..(410): Homolog of NCBI NO: 27769202 NR Description: Similar to ribosomal protein L3 [Xenopus laevis]
  misc_feature (22)..(410): Homolog of NCBI NO: 1350745 NR Description: 60S RIBOSOMAL PROTEIN L3
  misc_feature (22)..(405): Homolog of NCBI NO: 6688812 NR Description: L3 Ribosomal protein [Medicago sativa subsp. x
  misc_feature (22)..(408): Homolog of NCBI NO: 548770 NR Description: 60S RIBOSOMAL PROTEIN L3
  misc_feature (22)..(410): Homolog of NCBI NO: 81658 NR Description: ribosomal protein L3.e (clone ARP2), cytosolic -
  misc_feature (22)..(410): Homolog of NCBI NO: 15220533 NR Description: ribosomal protein; protein id: At1g61580.1
  misc_feature (22)..(410): Homolog of NCBI NO: 81657 NR Description: ribosomal protein L3.e (clone ARP1), cytosolic -
  misc_feature (22)..(410): Homolog of NCBI NO: 23397228 NR Description: putative ribosomal protein [Arabidopsis thaliana]
  misc_feature (22)..(410): Homolog of NCBI NO: 15218306 NR Description: ribosomal protein
LSCSPHRWSLEAVGTRRRRRRMSHRKFEHPRHGSLGFLPRKRANRHRGKVKAFPKDDQTKPCKFTAFMGYKAGMTHIVREVEKPGSKLHKKETCEAVTIIETPAMVVVGVVAYVKTPRGLRSLNTVWAQHLSEEVRRRFYKNWAKSKKKAFTGYAKQYDSEDGKKGIQAQLEKMKKYATVIRVLAHTQIRKMKGLKQKKAHMMEIQINGGTIAQKVDFAYSFFEKQIPIEAVFQKDEMIDIIGVTKGKGYEGVVTRWGVTRLPRKTHRGLRKVACIGAWHPARVSYTVARAGQNGYHHRTELNKKIYRLGKVGTEAHTAMTEYDRTEKDVTPMGGFPHYGIVKDDYLMIKGCCVGPKKRVVTLRQSLLTQTSRLALEEIKLKFIDTASIFGHGRFQTSLEKMRFYNRVTK

SEQ ID NO: 29579 - protein, 389 aa, Arabidopsis thaliana
  peptide (1)..(389): Ceres Seq. ID no. 12370640
  misc_feature (50)..(343): Pfam Name: Ribosomal protein L3 Pfam Description: Ribosomal protein L3
  misc_feature (1)..(389): Homolog of NCBI NO: 4506649 NR Description: ribosomal protein L3
  misc_feature (1)..(389): Homolog of NCBI NO: 27769202 NR Description: Similar to ribosomal protein L3 [Xenopus laevis]
  misc_feature (1)..(389): Homolog of NCBI NO: 1350745 NR Description: 60S RIBOSOMAL PROTEIN L3
  misc_feature (1)..(384): Homolog of NCBI NO: 6688812 NR Description: L3 Ribosomal protein [Medicago sativa subsp. x
  misc_feature (1)..(387): Homolog of NCBI NO: 548770 NR Description: 60S RIBOSOMAL PROTEIN L3
  misc_feature (1)..(389): Homolog of NCBI NO: 81658 NR Description: ribosomal protein L3.e (clone ARP2), cytosolic -
  misc_feature (1)..(389): Homolog of NCBI NO: 15220533 NR Description: ribosomal protein; protein id: At1g61580.1
  misc_feature (1)..(389): Homolog of NCBI NO: 81657 NR Description: ribosomal protein L3.e (clone ARP1), cytosolic -
  misc_feature (1)..(389): Homolog of NCBI NO: 23397228 NR Description: putative ribosomal protein [Arabidopsis thaliana]
  misc_feature (1)..(389): Homolog of NCBI NO: 15218306 NR Description: ribosomal protein
MSHRKFEHPRHGSLGFLPRKRANRHRGKVKAFPKDDQTKPCKFTAFMGYKAGMTHIVREVEKPGSKLHKKETCEAVTIIETPAMVVVGVVAYVKTPRGLRSLNTVWAQHLSEEVRRRFYKNWAKSKKKAFTGYAKQYDSEDGKKGIQAQLEKMKKYATVIRVLAHTQIRKMKGLKQKKAHMMEIQINGGTIAQKVDFAYSFFEKQIPIEAVFQKDEMIDIIGVTKGKGYEGVVTRWGVTRLPRKTHRGLRKVACIGAWHPARVSYTVARAGQNGYHHRTELNKKIYRLGKVGTEAHTAMTEYDRTEKDVTPMGGFPHYGIVKDDYLMIKGCCVGPKKRVVTLRQSLLTQTSRLALEEIKLKFIDTASIFGHGRFQTSLEKMRFYNRVTK

SEQ ID NO: 29580 - protein, 343 aa, Arabidopsis thaliana
  peptide (1)..(343): Ceres Seq. ID no. 12370641
  misc_feature (4)..(297): Pfam Name: Ribosomal protein L3 Pfam Description: Ribosomal protein L3
  misc_feature (1)..(343): Homolog of NCBI NO: 4506649 NR Description: ribosomal protein L3
  misc_feature (1)..(343): Homolog of NCBI NO: 27769202 NR Description: Similar to ribosomal protein L3 [Xenopus laevis]
  misc_feature (1)..(343): Homolog of NCBI NO: 1350745 NR Description: 60S RIBOSOMAL PROTEIN L3
  misc_feature (1)..(338): Homolog of NCBI NO: 6688812 NR Description: L3 Ribosomal protein [Medicago sativa subsp. x
  misc_feature (1)..(341): Homolog of NCBI NO: 548770 NR Description: 60S RIBOSOMAL PROTEIN L3
  misc_feature (1)..(343): Homolog of NCBI NO: 81658 NR Description: ribosomal protein L3.e (clone ARP2), cytosolic -
  misc_feature (1)..(343): Homolog of NCBI NO: 15220533 NR Description: ribosomal protein; protein id: At1g61580.1
  misc_feature (1)..(343): Homolog of NCBI NO: 81657 NR Description: ribosomal protein L3.e (clone ARP1), cytosolic -
  misc_feature (1)..(343): Homolog of NCBI NO: 23397228 NR Description: putative ribosomal protein [Arabidopsis thaliana]
  misc_feature (1)..(343): Homolog of NCBI NO: 15218306 NR Description: ribosomal protein
MGYKAGMTHIVREVEKPGSKLHKKETCEAVTIIETPAMVVVGVVAYVKTPRGLRSLNTVWAQHLSEEVRRRFYKNWAKSKKKAFTGYAKQYDSEDGKKGIQAQLEKMKKYATVIRVLAHTQIRKMKGLKQKKAHMMEIQINGGTIAQKVDFAYSFFEKQIPIEAVFQKDEMIDIIGVTKGKGYEGVVTRWGVTRLPRKTHRGLRKVACIGAWHPARVSYTVARAGQNGYHHRTELNKKIYRLGKVGTEAHTAMTEYDRTEKDVTPMGGFPHYGIVKDDYLMIKGCCVGPKKRVVTLRQSLLTQTSRLALEEIKLKFIDTASIFGHGRFQTSLEKMRFYNRVTK

SEQ ID NO: 29581 - DNA, 1188 bp, Arabidopsis thaliana; identical to SEQ ID NO: 25989
  misc_feature (1)..(1188): Ceres Seq. ID no. 12396278
  misc_feature: MA Experiment ID: 108434 Result: Down-regulated in Transcription
  misc_feature: MA Experiment 108434 PARAMETER Experiment Name: At_Root_Tips_cDNA_P Parameter: Tissue Value: Root Tips
  misc_feature: MA Experiment ID: 108435 Result: Down-regulated in Transcription
  misc_feature: MA Experiment 108435 PARAMETER Experiment Name: At_stm_Mutants_cDNA_P Parameter: Plant Line Value: wt Landsburg vs stm
  misc_feature: MA Experiment 108435 PARAMETER Experiment Name: At_stm_Mutants_cDNA_P Parameter: Tissue Value: Shoot Apical Meristem Region
  misc_feature: MA Experiment ID: 108461 Result: Up-regulated in Transcription
  misc_feature: MA Experiment 108461 PARAMETER Experiment Name: At_Germinating_Seeds_cDNA_P Parameter: Age (day) Value: 1 vs. 0
  misc_feature: MA Experiment 108461 PARAMETER Experiment Name: At_Germinating_Seeds_cDNA_P Parameter: Tissue Value: Germinating Seeds
  misc_feature: MA Experiment ID: 108462 Result: Up-regulated in Transcription
  misc_feature: MA Experiment 108462 PARAMETER Experiment Name: At_Germinating_Seeds_cDNA_P Parameter: Age (day) Value: 2 vs. 0
  misc_feature: MA Experiment 108462 PARAMETER Experiment Name: At_Germinating_Seeds_cDNA_P Parameter: Tissue Value: Germinating Seeds
  misc_feature: MA Experiment ID: 108463 Result: Up-regulated in Transcription
  misc_feature: MA Experiment 108463 PARAMETER Experiment Name: At_Germinating_Seeds_cDNA_P Parameter: Age (day) Value: 3 vs. 0
  misc_feature: MA Experiment 108463 PARAMETER Experiment Name: At_Germinating_Seeds_cDNA_P Parameter: Tissue Value: Germinating Seeds
  misc_feature: MA Experiment ID: 108464 Result: Up-regulated in Transcription
  misc_feature: MA Experiment 108464 PARAMETER Experiment Name: At_Germinating_Seeds_cDNA_P Parameter: Age (day) Value: 4 vs. 0
  misc_feature: MA Experiment 108464 PARAMETER Experiment Name: At_Germinating_Seeds_cDNA_P Parameter: Tissue Value: Germinating Seeds
  misc_feature: MA Experiment ID: 108469 Result: Up-regulated in Transcription
  misc_feature: MA Experiment ID: 108488 Result: Down-regulated in Transcription
  misc_feature: MA Experiment ID: 108573 Result: Down-regulated in Transcription
  misc_feature: MA Experiment 108573 PARAMETER Experiment Name: At_Drought_cDNA_P Parameter: Timepoint (hr) Value: 6
  misc_feature: MA Experiment 108573 PARAMETER Experiment Name: At_Drought_cDNA_P Parameter: Tissue Value: Aerial
  misc_feature: MA Experiment 108573 PARAMETER Experiment Name: At_Drought_cDNA_P Parameter: Treatment Value: Drought vs. No Drought
  misc_feature: MA Experiment ID: 108577 Result: Down-regulated in Transcription
  misc_feature: MA Experiment 108577 PARAMETER Experiment Name: At_42deg_Heat_cDNA_P Parameter: Temperature (deg C) Value: 42 vs. 22
  misc_feature: MA Experiment 108577 PARAMETER Experiment Name: At_42deg_Heat_cDNA_P Parameter: Timepoint (hr) Value: 6
  misc_feature: MA Experiment 108577 PARAMETER Experiment Name: At_42deg_Heat_cDNA_P Parameter: Tissue Value: Aerial
  misc_feature: MA Experiment ID: 108594 Result: Down-regulated in Transcription
  misc_feature: MA Experiment 108594 PARAMETER Experiment Name: At_Ler-rhl_Root_cDNA_P Parameter: Plant Line Value: null
  misc_feature: MA Experiment ID: 108595 Result: Down-regulated in Transcription
  misc_feature: MA Experiment 108595 PARAMETER Experiment Name: At_Ler-pi_Ovule_cDNA_P Parameter: Plant Line Value: null
  misc_feature: MA Experiment ID: 108668 Result: Up-regulated in Transcription
  misc_feature: MA Experiment 108668 PARAMETER Experiment Name: At_2mM_SA_cDNA_P Parameter: Plant Line Value: WS
  misc_feature: MA Experiment 108668 PARAMETER Experiment Name: At_2mM_SA_cDNA_P Parameter: Timepoint (hr) Value: 6
  misc_feature: MA Experiment 108668 PARAMETER Experiment Name: At_2mM_SA_cDNA_P Parameter: Treatment Value: 2mM SA vs. No Treatment
  misc_feature: MA Experiment ID: 20000088 Result: Up-regulated in Transcription
  misc_feature: MA Experiment 20000088 PARAMETER Experiment Name: At_100uM_ABA_Mutants_cDNA_P Parameter: Plant Line Value: Landsberg
  misc_feature: MA Experiment 20000088 PARAMETER Experiment Name: At_100uM_ABA_Mutants_cDNA_P Parameter: Timepoint (hr) Value: 6
  misc_feature: MA Experiment 20000088 PARAMETER Experiment Name: At_100uM_ABA_Mutants_cDNA_P Parameter: Tissue Value: Aerial
  misc_feature: MA Experiment 20000088 PARAMETER Experiment Name: At_100uM_ABA_Mutants_cDNA_P Parameter: Treatment Value: 100uM ABA vs. No Treatment
  misc_feature: MA Experiment ID: 20000113 Result: Down-regulated in Transcription
  misc_feature: MA Experiment 20000113 PARAMETER Experiment Name: At_42deg_Heat_cDNA_P Parameter: Temperature (deg C) Value: 42 vs. 22
  misc_feature: MA Experiment 20000113 PARAMETER Experiment Name: At_42deg_Heat_cDNA_P Parameter: Timepoint (hr) Value: 8
  misc_feature: MA Experiment 20000113 PARAMETER Experiment Name: At_42deg_Heat_cDNA_P Parameter: Tissue Value: Aerial
  misc_feature: MA Experiment ID: 20000173 Result: Down-regulated in Transcription
  misc_feature: MA Experiment 20000173 PARAMETER Experiment Name: At_42deg_Heat_P Parameter: Age (day) Value: 14
  misc_feature: MA Experiment 20000173 PARAMETER Experiment Name: At_42deg_Heat_P Parameter: Organism Value: A. thaliana
  misc_feature: MA Experiment 20000173 PARAMETER Experiment Name: At_42deg_Heat_P Parameter: Plant Line Value: WS
  misc_feature: MA Experiment 20000173 PARAMETER Experiment Name: At_42deg_Heat_P Parameter: Temperature (deg C) Value: 42 vs. 22
  misc_feature: MA Experiment 20000173 PARAMETER Experiment Name: At_42deg_Heat_P Parameter: Timepoint (hr) Value: 6
  misc_feature: MA Experiment 20000173 PARAMETER Experiment Name: At_42deg_Heat_P Parameter: Tissue Value: Aerial
  misc_feature: MA Experiment ID: 20000179 Result: Down-regulated in Transcription
  misc_feature: MA Experiment 20000179 PARAMETER Experiment Name: At_Germinating_Seeds_P Parameter: Age (hr) Value: 6 vs. 0
  misc_feature: MA Experiment 20000179 PARAMETER Experiment Name: At_Germinating_Seeds_P Parameter: Tissue Value: Germinating Seeds
  misc_feature: MA Experiment ID: 20000180 Result: Up-regulated in Transcription
  misc_feature: MA Experiment 20000180 PARAMETER Experiment Name: At_Germinating_Seeds_P Parameter: Age (hr) Value: 24 vs. 0
  misc_feature: MA Experiment 20000180 PARAMETER Experiment Name: At_Germinating_Seeds_P Parameter: Tissue Value: Germinating Seeds
  misc_feature: MA Experiment ID: 20000182 Result: Up-regulated in Transcription
  misc_feature: MA Experiment 20000182 PARAMETER Experiment Name: At_2mM_SA_P Parameter: Age (day) Value: 14
  misc_feature: MA Experiment 20000182 PARAMETER Experiment Name: At_2mM_SA_P Parameter: Organism Value: A. thaliana
  misc_feature: MA Experiment 20000182 PARAMETER Experiment Name: At_2mM_SA_P Parameter: Plant Line Value: WS
  misc_feature: MA Experiment 20000182 PARAMETER Experiment Name: At_2mM_SA_P Parameter: Timepoint (hr) Value: 6
  misc_feature: MA Experiment 20000182 PARAMETER Experiment Name: At_2mM_SA_P Parameter: Tissue Value: Aerial
  misc_feature: MA Experiment 20000182 PARAMETER Experiment Name: At_2mM_SA_P Parameter: Treatment Value: 2mM SA vs. No Treatment
  misc_feature: MA Experiment ID: 20000184 Result: Up-regulated in Transcription
  misc_feature: MA Experiment 20000184 PARAMETER Experiment Name: At_Shoots__P Parameter: Age (day) Value: 7
  misc_feature: MA Experiment 20000184 PARAMETER Experiment Name: At_Shoots__P Parameter: Tissue Value: Shoots vs. Whole Plant
  misc_feature: MA Experiment ID: 20000234 Result: Down-regulated in Transcription
  misc_feature: MA Experiment 20000234 PARAMETER Experiment Name: At_Siliques_P Parameter: Age (day) Value: 21
  misc_feature: MA Experiment 20000234 PARAMETER Experiment Name: At_Siliques_P Parameter: Organism Value: A. thaliana
  misc_feature: MA Experiment 20000234 PARAMETER Experiment Name: At_Siliques_P Parameter: Plant Line Value: WS
  misc_feature: MA Experiment 20000234 PARAMETER Experiment Name: At_Siliques_P Parameter: Tissue Value: Less Than 5mm Siliques vs. Whole Plant
  misc_feature: MA Experiment ID: 20000264 Result: Down-regulated in Transcription
  misc_feature: MA Experiment 20000264 PARAMETER Experiment Name: At_Open_Flower_P Parameter: Age (day) Value: 21
  misc_feature: MA Experiment 20000264 PARAMETER Experiment Name: At_Open_Flower_P Parameter: Plant Line Value: WS
  misc_feature: MA Experiment 20000264 PARAMETER Experiment Name: At_Open_Flower_P Parameter: Tissue Value: Open Flower vs. Whole Plant
  misc_feature: MA Experiment ID: 20000265 Result: Down-regulated in Transcription
  misc_feature: MA Experiment 20000265 PARAMETER Experiment Name: At_Open_Flower_P Parameter: Age (day) Value: 21
  misc_feature: MA Experiment 20000265 PARAMETER Experiment Name: At_Open_Flower_P Parameter: Plant Line Value: WS
  misc_feature: MA Experiment 20000265 PARAMETER Experiment Name: At_Open_Flower_P Parameter: Tissue Value: Closed Flower vs. Whole Plant
  misc_feature: MA Experiment ID: 20000286 Result: Down-regulated in Transcription
  misc_feature: MA Experiment 20000286 PARAMETER Experiment Name: At_Open_Flower_P Parameter: Age (day) Value: 21
  misc_feature: MA Experiment 20000286 PARAMETER Experiment Name: At_Open_Flower_P Parameter: Plant Line Value: WS
  misc_feature: MA Experiment 20000286 PARAMETER Experiment Name: At_Open_Flower_P Parameter: Tissue Value: Half Open vs. Whole Plant
  misc_feature: MA Experiment ID: 20000436 Result: Down-regulated in Transcription
  misc_feature: MA Experiment 20000436 PARAMETER Experiment Name: At_Drought_P Parameter: Age (day) Value: 7
  misc_feature: MA Experiment 20000436 PARAMETER Experiment Name: At_Drought_P Parameter: Organism Value: A. thaliana
  misc_feature: MA Experiment 20000436 PARAMETER Experiment Name: At_Drought_P Parameter: Plant Line Value: WS
  misc_feature: MA Experiment 20000436 PARAMETER Experiment Name: At_Drought_P Parameter: Timepoint (hr) Value: 12
  misc_feature: MA Experiment 20000436 PARAMETER Experiment Name: At_Drought_P Parameter: Tissue Value: Whole Plant
  misc_feature: MA Experiment 20000436 PARAMETER Experiment Name: At_Drought_P Parameter: Treatment Value: Drought vs. No Drought
  misc_feature: MA Experiment ID: 20000437 Result: Down-regulated in Transcription
  misc_feature: MA Experiment 20000437 PARAMETER Experiment Name: At_Drought_P Parameter: Age (day) Value: 8
  misc_feature: MA Experiment 20000437 PARAMETER Experiment Name: At_Drought_P Parameter: Organism Value: A. thaliana
  misc_feature: MA Experiment 20000437 PARAMETER Experiment Name: At_Drought_P Parameter: Plant Line Value: WS
  misc_feature: MA Experiment 20000437 PARAMETER Experiment Name: At_Drought_P Parameter: Timepoint (hr) Value: 24
  misc_feature: MA Experiment 20000437 PARAMETER Experiment Name: At_Drought_P Parameter: Tissue Value: Whole Plant
  misc_feature: MA Experiment 20000437 PARAMETER Experiment Name: At_Drought_P Parameter: Treatment Value: Drought vs. No Drought
  misc_feature: MA Experiment ID: 20000438 Result: Up-regulated in Transcription
  misc_feature: MA Experiment 20000438 PARAMETER Experiment Name: At_Shoots__P Parameter: Age (day) Value: 14
  misc_feature: MA Experiment 20000438 PARAMETER Experiment Name: At_Shoots__P Parameter: Tissue Value: Shoots vs. Whole Plant
  misc_feature: MA Experiment ID: 20000439 Result: Down-regulated in Transcription
  misc_feature: MA Experiment 20000439 PARAMETER Experiment Name: At_Roots__P Parameter: Age (day) Value: 14 vs. 21
  misc_feature: MA Experiment 20000439 PARAMETER Experiment Name: At_Roots__P Parameter: Organism Value: A. thaliana
  misc_feature: MA Experiment 20000439 PARAMETER Experiment Name: At_Roots__P Parameter: Tissue Value: Roots vs. Whole Plant
  misc_feature: MA Experiment ID: 20000441 Result: Up-regulated in Transcription
  misc_feature: MA Experiment 20000441 PARAMETER Experiment Name: At_1uM_BR-BRZ__P Parameter: Tissue Value: Shoot Apices
  misc_feature: MA Experiment 20000441 PARAMETER Experiment Name: At_1uM_BR-BRZ__P Parameter: Treatment Value: 1uM BR vs. No Treatment
  misc_feature: MA Experiment ID: 20000527 Result: Down-regulated in Transcription
  misc_feature: MA Experiment 20000527 PARAMETER Experiment Name: At_10percent_PEG_P Parameter: Age (day) Value: 20
  misc_feature: MA Experiment 20000527 PARAMETER Experiment Name: At_10percent_PEG_P Parameter: Organism Value: A. thaliana
  misc_feature: MA Experiment 20000527 PARAMETER Experiment Name: At_10percent_PEG_P Parameter: Plant Line Value: WS
  misc_feature: MA Experiment 20000527 PARAMETER Experiment Name: At_10percent_PEG_P Parameter: Timepoint (day) Value: 20
  misc_feature: MA Experiment 20000527 PARAMETER Experiment Name: At_10percent_PEG_P Parameter: Tissue Value: Whole Plant
  misc_feature: MA Experiment 20000527 PARAMETER Experiment Name: At_10percent_PEG_P Parameter: Treatment Value: 10percent PEG vs. No Treatment
  misc_feature: MA Experiment ID: 20001248 Result: Up-regulated in Transcription
  misc_feature: MA Experiment 20001248 PARAMETER Experiment Name: At_Far-red-induction_P Parameter: Age (day) Value: 7
  misc_feature: MA Experiment 20001248 PARAMETER Experiment Name: At_Far-red-induction_P Parameter: Light Value: Far-red vs. White
  misc_feature: MA Experiment 20001248 PARAMETER Experiment Name: At_Far-red-induction_P Parameter: Organism Value: A. thaliana
  misc_feature: MA Experiment 20001248 PARAMETER Experiment Name: At_Far-red-induction_P Parameter: Plant Line Value: Columbia
  misc_feature: MA Experiment 20001248 PARAMETER Experiment Name: At_Far-red-induction_P Parameter: Timepoint (hr) Value: 4
  misc_feature: MA Experiment 20001248 PARAMETER Experiment Name: At_Far-red-induction_P Parameter: Tissue Value: Whole Plant
  misc_feature: MA Experiment ID: 20001554 Result: Down-regulated in Transcription
  misc_feature: MA Experiment 20001554 PARAMETER Experiment Name: At_Drought_Soil_Dry_P Parameter: Age (day) Value: 21
  misc_feature: MA Experiment 20001554 PARAMETER Experiment Name: At_Drought_Soil_Dry_P Parameter: Organism Value: A. thaliana
  misc_feature: MA Experiment 20001554 PARAMETER Experiment Name: At_Drought_Soil_Dry_P Parameter: Plant Line Value: WS
  misc_feature: MA Experiment 20001554 PARAMETER Experiment Name: At_Drought_Soil_Dry_P Parameter: Post Timepoint (hr) Value: None
  misc_feature: MA Experiment 20001554 PARAMETER Experiment Name: At_Drought_Soil_Dry_P Parameter: Post-Treatment Value: None
  misc_feature: MA Experiment 20001554 PARAMETER Experiment Name: At_Drought_Soil_Dry_P Parameter: Timepoint (day) Value: 7
  misc_feature: MA Experiment 20001554 PARAMETER Experiment Name: At_Drought_Soil_Dry_P Parameter: Treatment Value: Drought vs. No Drought
  misc_feature: MA Experiment ID: 20001555 Result: Down-regulated in Transcription
  misc_feature: MA Experiment 20001555 PARAMETER Experiment Name: At_Drought_Soil_Dry_P Parameter: Age (day) Value: 24
  misc_feature: MA Experiment 20001555 PARAMETER Experiment Name: At_Drought_Soil_Dry_P Parameter: Organism Value: A. thaliana
  misc_feature: MA Experiment 20001555 PARAMETER Experiment Name: At_Drought_Soil_Dry_P Parameter: Plant Line Value: WS
  misc_feature: MA Experiment 20001555 PARAMETER Experiment Name: At_Drought_Soil_Dry_P Parameter: Post Timepoint (hr) Value: None
  misc_feature: MA Experiment 20001555 PARAMETER Experiment Name: At_Drought_Soil_Dry_P Parameter: Post-Treatment Value: None
  misc_feature: MA Experiment 20001555 PARAMETER Experiment Name: At_Drought_Soil_Dry_P Parameter: Timepoint (day) Value: 10
  misc_feature: MA Experiment 20001555 PARAMETER Experiment Name: At_Drought_Soil_Dry_P Parameter: Treatment Value: Drought vs. No Drought
  misc_feature: MA Experiment ID: 20001557 Result: Up-regulated in Transcription
  misc_feature: MA Experiment 20001557 PARAMETER Experiment Name: At_Drought_Soil_Dry_P Parameter: Age (day) Value: 27
  misc_feature: MA Experiment 20001557 PARAMETER Experiment Name: At_Drought_Soil_Dry_P Parameter: Organism Value: A. thaliana
  misc_feature: MA Experiment 20001557 PARAMETER Experiment Name: At_Drought_Soil_Dry_P Parameter: Plant Line Value: WS
  misc_feature: MA Experiment 20001557 PARAMETER Experiment Name: At_Drought_Soil_Dry_P Parameter: Post Timepoint (hr) Value: 3
  misc_feature: MA Experiment 20001557 PARAMETER Experiment Name: At_Drought_Soil_Dry_P Parameter: Post-Treatment Value: Re-Water vs. No Drought
  misc_feature: MA Experiment 20001557 PARAMETER Experiment Name: At_Drought_Soil_Dry_P Parameter: Timepoint (day) Value: 13
  misc_feature: MA Experiment 20001557 PARAMETER Experiment Name: At_Drought_Soil_Dry_P Parameter: Treatment Value: Drought vs. No Drought
  misc_feature: MA Experiment ID: 20001905 Result: Up-regulated in Transcription
  misc_feature: MA Experiment 20001905 PARAMETER Experiment Name: At_Drought_Reproduction_P Parameter: Age (day) Value: 40
  misc_feature: MA Experiment 20001905 PARAMETER Experiment Name: At_Drought_Reproduction_P Parameter: Organism Value: A. thaliana
  misc_feature: MA Experiment 20001905 PARAMETER Experiment Name: At_Drought_Reproduction_P Parameter: Plant Line Value: WS
  misc_feature: MA Experiment 20001905 PARAMETER Experiment Name: At_Drought_Reproduction_P Parameter: Timepoint (day) Value: 10
  misc_feature: MA Experiment 20001905 PARAMETER Experiment Name: At_Drought_Reproduction_P Parameter: Tissue Value: Rosettes
  misc_feature: MA Experiment 20001905 PARAMETER Experiment Name: At_Drought_Reproduction_P Parameter: Treatment Value: Drought vs. No Drought
  misc_feature: MA Experiment ID: 20001911 Result: Down-regulated in Transcription
  misc_feature: MA Experiment 20001911 PARAMETER Experiment Name: At_Drought_Reproduction_P Parameter: Age (day) Value: 40
  misc_feature: MA Experiment 20001911 PARAMETER Experiment Name: At_Drought_Reproduction_P Parameter: Organism Value: A. thaliana
  misc_feature: MA Experiment 20001911 PARAMETER Experiment Name: At_Drought_Reproduction_P Parameter: Plant Line Value: WS
  misc_feature: MA Experiment 20001911 PARAMETER Experiment Name: At_Drought_Reproduction_P Parameter: Timepoint (day) Value: 10
  misc_feature: MA Experiment 20001911 PARAMETER Experiment Name: At_Drought_Reproduction_P Parameter: Tissue Value: Flowers
  misc_feature: MA Experiment 20001911 PARAMETER Experiment Name: At_Drought_Reproduction_P Parameter: Treatment Value: Drought vs. No Drought

SEQ ID NO: 29582 - protein, 345 aa, Arabidopsis thaliana; identical to SEQ ID NO: 25990
  peptide (1)..(345): Ceres Seq. ID no. 12396279
  misc_feature (175)..(276): Pfam Name: 2OG-Fe(II) oxygenase superfamily Pfam Description: 2OG-Fe(II) oxygenase superfamily
  misc_feature (175)..(276): Pfam Name: 2OG-Fe(II) oxygenase superfamily Pfam Description: 2OG-Fe(II) oxygenase superfamily
  misc_feature (23)..(345): Homolog of NCBI NO: 1085595 NR Description: 1-aminocyclopropane-1-carboxylate oxidase
  misc_feature (23)..(345): Homolog of NCBI NO: 532530 NR Description: 1-aminocyclopropane-1-carboxylate oxidase
  misc_feature (23)..(345): Homolog of NCBI NO: 584711 NR Description: 1-aminocyclopropane-1-carboxylate oxidase 3 (ACC
  misc_feature (23)..(344): Homolog of NCBI NO: 398994 NR Description: 1-aminocyclopropane-1-carboxylate oxidase (ACC
  misc_feature (23)..(344): Homolog of NCBI NO: 14573463 NR Description: 1-aminocyclopropane-1-carboxylate oxidase
  misc_feature (23)..(345): Homolog of NCBI NO: 1085595 NR Description: 1-aminocyclopropane-1-carboxylate oxidase
  misc_feature (23)..(345): Homolog of NCBI NO: 584711 NR Description: 1-aminocyclopropane-1-carboxylate oxidase 3 (ACC
  misc_feature (23)..(344): Homolog of NCBI NO: 14573463 NR Description: 1-aminocyclopropane-1-carboxylate oxidase
  misc_feature (23)..(345): Homolog of NCBI NO: 15220386 NR Description: 1-aminocyclopropane-1-carboxylate oxidase
  misc_feature (23)..(345): Homolog of NCBI NO: 541861 NR Description: ethylene-forming enzyme - Arabidopsis thaliana
  misc_feature (23)..(345): Homolog of NCBI NO: 13877785 NR Description: putative 1-aminocyclopropane-1-carboxylate
  misc_feature (23)..(345): Homolog of NCBI NO: 27447954 NR Description: putative 1-aminocyclopropane-1-carboxylate
  misc_feature (23)..(345): Homolog of NCBI NO: 7576446 NR Description: 1-aminocyclopropane-1-carboxylate oxidase
  misc_feature (23)..(344): Homolog of NCBI NO: 398994 NR Description: 1-aminocyclopropane-1-carboxylate oxidase (ACC
  misc_feature (23)..(345): Homolog of NCBI NO: 532530 NR Description: 1-aminocyclopropane-1-carboxylate oxidase
  misc_feature (23)..(345): Homolog of NCBI NO: 7576446 NR Description: 1-aminocyclopropane-1-carboxylate oxidase
  misc_feature (23)..(345): Homolog of NCBI NO: 27447954 NR Description: putative 1-aminocyclopropane-1-carboxylate
  misc_feature (23)..(345): Homolog of NCBI NO: 13877785 NR Description: putative 1-aminocyclopropane-1-carboxylate
  misc_feature (23)..(345): Homolog of NCBI NO: 541861 NR Description: ethylene-forming enzyme - Arabidopsis thaliana
  misc_feature (23)..(345): Homolog of NCBI NO: 15220386 NR Description: 1-aminocyclopropane-1-carboxylate oxidase

SEQ ID NO: 29583 - protein, 323 aa, Arabidopsis thaliana; identical to SEQ ID NO: 25991
  peptide (1)..(323): Ceres Seq. ID no. 12396280
  misc_feature (153)..(254): Pfam Name: 2OG-Fe(II) oxygenase superfamily Pfam Description: 2OG-Fe(II) oxygenase superfamily
  misc_feature (153)..(254): Pfam Name: 2OG-Fe(II) oxygenase superfamily Pfam Description: 2OG-Fe(II) oxygenase superfamily
  misc_feature (1)..(323): Homolog of NCBI NO: 1085595 NR Description: 1-aminocyclopropane-1-carboxylate oxidase
  misc_feature (1)..(323): Homolog of NCBI NO: 532530 NR Description: 1-aminocyclopropane-1-carboxylate oxidase
  misc_feature (1)..(323): Homolog of NCBI NO: 584711 NR Description: 1-aminocyclopropane-1-carboxylate oxidase 3 (ACC
  misc_feature (1)..(322): Homolog of NCBI NO: 398994 NR Description: 1-aminocyclopropane-1-carboxylate oxidase (ACC
  misc_feature (1)..(322): Homolog of NCBI NO: 14573463 NR Description: 1-aminocyclopropane-1-carboxylate oxidase
  misc_feature (1)..(323): Homolog of NCBI NO: 1085595 NR Description: 1-aminocyclopropane-1-carboxylate oxidase
  misc_feature (1)..(323): Homolog of NCBI NO: 584711 NR Description: 1-aminocyclopropane-1-carboxylate oxidase 3 (ACC
  misc_feature (1)..(322): Homolog of NCBI NO: 14573463 NR Description: 1-aminocyclopropane-1-carboxylate oxidase
  misc_feature (1)..(323): Homolog of NCBI NO: 15220386 NR Description: 1-aminocyclopropane-1-carboxylate oxidase
  misc_feature (1)..(323): Homolog of NCBI NO: 541861 NR Description: ethylene-forming enzyme - Arabidopsis thaliana
  misc_feature (1)..(323): Homolog of NCBI NO: 13877785 NR Description: putative 1-aminocyclopropane-1-carboxylate
  misc_feature (1)..(323): Homolog of NCBI NO: 27447954 NR Description: putative 1-aminocyclopropane-1-carboxylate
  misc_feature (1)..(323): Homolog of NCBI NO: 7576446 NR Description: 1-aminocyclopropane-1-carboxylate oxidase
  misc_feature (1)..(322): Homolog of NCBI NO: 398994 NR Description: 1-aminocyclopropane-1-carboxylate oxidase (ACC
  misc_feature (1)..(323): Homolog of NCBI NO: 532530 NR Description: 1-aminocyclopropane-1-carboxylate oxidase
  misc_feature (1)..(323): Homolog of NCBI NO: 7576446 NR Description: 1-aminocyclopropane-1-carboxylate oxidase
  misc_feature (1)..(323): Homolog of NCBI NO: 27447954 NR Description: putative 1-aminocyclopropane-1-carboxylate
  misc_feature (1)..(323): Homolog of NCBI NO: 13877785 NR Description: putative 1-aminocyclopropane-1-carboxylate
  misc_feature (1)..(323): Homolog of NCBI NO: 541861 NR Description: ethylene-forming enzyme - Arabidopsis thaliana
  misc_feature (1)..(323): Homolog of NCBI NO: 15220386 NR Description: 1-aminocyclopropane-1-carboxylate oxidase

SEQ ID NO: 29584 - protein, 303 aa, Arabidopsis thaliana; identical to SEQ ID NO: 25992
  peptide (1)..(303): Ceres Seq. ID no. 12396281
  misc_feature (133)..(234): Pfam Name: 2OG-Fe(II) oxygenase superfamily Pfam Description: 2OG-Fe(II) oxygenase superfamily
  misc_feature (133)..(234): Pfam Name: 2OG-Fe(II) oxygenase superfamily Pfam Description: 2OG-Fe(II) oxygenase superfamily
  misc_feature (1)..(303): Homolog of NCBI NO: 1085595 NR Description: 1-aminocyclopropane-1-carboxylate oxidase
  misc_feature (1)..(303): Homolog of NCBI NO: 532530 NR Description: 1-aminocyclopropane-1-carboxylate oxidase
  misc_feature (1)..(303): Homolog of NCBI NO: 584711 NR Description: 1-aminocyclopropane-1-carboxylate oxidase 3 (ACC
  misc_feature (1)..(302): Homolog of NCBI NO: 398994 NR Description: 1-aminocyclopropane-1-carboxylate oxidase (ACC
  misc_feature (1)..(302): Homolog of NCBI NO: 14573463 NR Description: 1-aminocyclopropane-1-carboxylate oxidase
  misc_feature (1)..(303): Homolog of NCBI NO: 1085595 NR Description: 1-aminocyclopropane-1-carboxylate oxidase
  misc_feature (1)..(303): Homolog of NCBI NO: 584711 NR Description: 1-aminocyclopropane-1-carboxylate oxidase 3 (ACC
  misc_feature (1)..(302): Homolog of NCBI NO: 14573463 NR Description: 1-aminocyclopropane-1-carboxylate oxidase
  misc_feature (1)..(303): Homolog of NCBI NO: 15220386 NR Description: 1-aminocyclopropane-1-carboxylate oxidase
  misc_feature (1)..(303): Homolog of NCBI NO: 541861 NR Description: ethylene-forming enzyme - Arabidopsis thaliana
  misc_feature (1)..(303): Homolog of NCBI NO: 13877785 NR Description: putative 1-aminocyclopropane-1-carboxylate
  misc_feature (1)..(303): Homolog of NCBI NO: 27447954 NR Description: putative 1-aminocyclopropane-1-carboxylate
  misc_feature (1)..(303): Homolog of NCBI NO: 7576446 NR Description: 1-aminocyclopropane-1-carboxylate oxidase
  misc_feature (1)..(302): Homolog of NCBI NO: 398994 NR Description: 1-aminocyclopropane-1-carboxylate oxidase (ACC
  misc_feature (1)..(303): Homolog of NCBI NO: 532530 NR Description: 1-aminocyclopropane-1-carboxylate oxidase
  misc_feature (1)..(303): Homolog of NCBI NO: 7576446 NR Description: 1-aminocyclopropane-1-carboxylate oxidase
  misc_feature (1)..(303): Homolog of NCBI NO: 27447954 NR Description: putative 1-aminocyclopropane-1-carboxylate
  misc_feature (1)..(303): Homolog of NCBI NO: 13877785 NR Description: putative 1-aminocyclopropane-1-carboxylate
  misc_feature (1)..(303): Homolog of NCBI NO: 541861 NR Description: ethylene-forming enzyme - Arabidopsis thaliana
  misc_feature (1)..(303): Homolog of NCBI NO: 15220386 NR Description: 1-aminocyclopropane-1-carboxylate oxidase

SEQ ID NO: 29585 - DNA, 946 bp, Arabidopsis thaliana
  misc_feature (1)..(946): Ceres Seq. ID no. 12441500
  misc_feature: MA Experiment ID: 108434 Result: Down-regulated in Transcription
  misc_feature: MA Experiment 108434 PARAMETER Experiment Name: At_Root_Tips_cDNA_P Parameter: Tissue Value: Root Tips
  misc_feature: MA Experiment ID: 108461 Result: Up-regulated in Transcription
  misc_feature: MA Experiment 108461 PARAMETER Experiment Name: At_Germinating_Seeds_cDNA_P Parameter: Age (day) Value: 1 vs. 0
  misc_feature: MA Experiment 108461 PARAMETER Experiment Name: At_Germinating_Seeds_cDNA_P Parameter: Tissue Value: Germinating Seeds
  misc_feature: MA Experiment ID: 108462 Result: Up-regulated in Transcription
  misc_feature: MA Experiment 108462 PARAMETER Experiment Name: At_Germinating_Seeds_cDNA_P Parameter: Age (day) Value: 2 vs. 0
  misc_feature: MA Experiment 108462 PARAMETER Experiment Name: At_Germinating_Seeds_cDNA_P Parameter: Tissue Value: Germinating Seeds
  misc_feature: MA Experiment ID: 108464 Result: Up-regulated in Transcription
  misc_feature: MA Experiment 108464 PARAMETER Experiment Name: At_Germinating_Seeds_cDNA_P Parameter: Age (day) Value: 4 vs. 0
  misc_feature: MA Experiment 108464 PARAMETER Experiment Name: At_Germinating_Seeds_cDNA_P Parameter: Tissue Value: Germinating Seeds
  misc_feature: MA Experiment ID: 108488 Result: Up-regulated in Transcription
  misc_feature: MA Experiment ID: 108489 Result: Down-regulated in Transcription
  misc_feature: MA Experiment ID: 20000180 Result: Up-regulated in Transcription
  misc_feature: MA Experiment 20000180 PARAMETER Experiment Name: At_Germinating_Seeds_P Parameter: Age (hr) Value: 24 vs. 0
  misc_feature: MA Experiment 20000180 PARAMETER Experiment Name: At_Germinating_Seeds_P Parameter: Tissue Value: Germinating Seeds
  misc_feature: MA Experiment ID: 20000227 Result: Down-regulated in Transcription
  misc_feature: MA Experiment 20000227 PARAMETER Experiment Name: At_Root-Tips-vs-Tops_P Parameter: Tissue Value: Root Tips vs. Root Tops
  misc_feature: MA Experiment ID: 20000265 Result: Down-regulated in Transcription
  misc_feature: MA Experiment 20000265 PARAMETER Experiment Name: At_Open_Flower_P Parameter: Age (day) Value: 21
  misc_feature: MA Experiment 20000265 PARAMETER Experiment Name: At_Open_Flower_P Parameter: Plant Line Value: WS
  misc_feature: MA Experiment 20000265 PARAMETER Experiment Name: At_Open_Flower_P Parameter: Tissue Value: Closed Flower vs. Whole Plant
  misc_feature: MA Experiment ID: 20000269 Result: Down-regulated in Transcription
  misc_feature: MA Experiment 20000269 PARAMETER Experiment Name: At_1mM_KNO3_L-vs-H_Roots_P Parameter: Age (day) Value: 7,10,12
  misc_feature: MA Experiment 20000269 PARAMETER Experiment Name: At_1mM_KNO3_L-vs-H_Roots_P Parameter: Organism Value: A. thaliana
  misc_feature: MA Experiment 20000269 PARAMETER Experiment Name: At_1mM_KNO3_L-vs-H_Roots_P Parameter: Plant Line Value: WS
  misc_feature: MA Experiment 20000269 PARAMETER Experiment Name: At_1mM_KNO3_L-vs-H_Roots_P Parameter: Timepoint (day) Value: 7,10,12
  misc_feature: MA Experiment 20000269 PARAMETER Experiment Name: At_1mM_KNO3_L-vs-H_Roots_P Parameter: Tissue Value: Roots
  misc_feature: MA Experiment 20000269 PARAMETER Experiment Name: At_1mM_KNO3_L-vs-H_Roots_P Parameter: Treatment Value: 1mM KNO3 vs. 50mM KNO3
  misc_feature: MA Experiment ID: 20000286 Result: Down-regulated in Transcription
  misc_feature: MA Experiment 20000286 PARAMETER Experiment Name: At_Open_Flower_P Parameter: Age (day) Value: 21
  misc_feature: MA Experiment 20000286 PARAMETER Experiment Name: At_Open_Flower_P Parameter: Plant Line Value: WS
  misc_feature: MA Experiment 20000286 PARAMETER Experiment Name: At_Open_Flower_P Parameter: Tissue Value: Half Open vs. Whole Plant
  misc_feature: MA Experiment ID: 20000436 Result: Up-regulated in Transcription
  misc_feature: MA Experiment 20000436 PARAMETER Experiment Name: At_Drought_P Parameter: Age (day) Value: 7
  misc_feature: MA Experiment 20000436 PARAMETER Experiment Name: At_Drought_P Parameter: Organism Value: A. thaliana
  misc_feature: MA Experiment 20000436 PARAMETER Experiment Name: At_Drought_P Parameter: Plant Line Value: WS
  misc_feature: MA Experiment 20000436 PARAMETER Experiment Name: At_Drought_P Parameter: Timepoint (hr) Value: 12
  misc_feature: MA Experiment 20000436 PARAMETER Experiment Name: At_Drought_P Parameter: Tissue Value: Whole Plant
  misc_feature: MA Experiment 20000436 PARAMETER Experiment Name: At_Drought_P Parameter: Treatment Value: Drought vs. No Drought
  misc_feature: MA Experiment ID: 20000439 Result: Down-regulated in Transcription
  misc_feature: MA Experiment 20000439 PARAMETER Experiment Name: At_Roots__P Parameter: Age (day) Value: 14 vs. 21
  misc_feature: MA Experiment 20000439 PARAMETER Experiment Name: At_Roots__P Parameter: Organism Value: A. thaliana
  misc_feature: MA Experiment 20000439 PARAMETER Experiment Name: At_Roots__P Parameter: Tissue Value: Roots vs. Whole Plant
  misc_feature: MA Experiment ID: 20000441 Result: Up-regulated in Transcription
  misc_feature: MA Experiment 20000441 PARAMETER Experiment Name: At_1uM_BR-BRZ__P Parameter: Tissue Value: Shoot Apices
  misc_feature: MA Experiment 20000441 PARAMETER Experiment Name: At_1uM_BR-BRZ__P Parameter: Treatment Value: 1uM BR vs. No Treatment
  misc_feature: MA Experiment ID: 20000443 Result: Up-regulated in Transcription
  misc_feature: MA Experiment 20000443 PARAMETER Experiment Name: At_1uM_BR-BRZ__P Parameter: Tissue Value: Shoot Apices
  misc_feature: MA Experiment 20000443 PARAMETER Experiment Name: At_1uM_BR-BRZ__P Parameter: Treatment Value: 1uM BRZ vs. No Treatment
  misc_feature: MA Experiment ID: 20001450 Result: Up-regulated in Transcription
  misc_feature: MA Experiment 20001450 PARAMETER Experiment Name: At_Far-red-induction_P Parameter: Age (day) Value: 7
  misc_feature: MA Experiment 20001450 PARAMETER Experiment Name: At_Far-red-induction_P Parameter: Light Value: Far-red vs. White
  misc_feature: MA Experiment 20001450 PARAMETER Experiment Name: At_Far-red-induction_P Parameter: Organism Value: A. thaliana
  misc_feature: MA Experiment 20001450 PARAMETER Experiment Name: At_Far-red-induction_P Parameter: Plant Line Value: Columbia
  misc_feature: MA Experiment 20001450 PARAMETER Experiment Name: At_Far-red-induction_P Parameter: Timepoint (hr) Value: 8
  misc_feature: MA Experiment 20001450 PARAMETER Experiment Name: At_Far-red-induction_P Parameter: Tissue Value: Whole Plant
  misc_feature: MA Experiment ID: 20001451 Result: Up-regulated in Transcription
  misc_feature: MA Experiment 20001451 PARAMETER Experiment Name: At_Far-red-induction_P Parameter: Age (day) Value: 7
  misc_feature: MA Experiment 20001451 PARAMETER Experiment Name: At_Far-red-induction_P Parameter: Light Value: Far-red vs. White
  misc_feature: MA Experiment 20001451 PARAMETER Experiment Name: At_Far-red-induction_P Parameter: Organism Value: A. thaliana
  misc_feature: MA Experiment 20001451 PARAMETER Experiment Name: At_Far-red-induction_P Parameter: Plant Line Value: Columbia
  misc_feature: MA Experiment 20001451 PARAMETER Experiment Name: At_Far-red-induction_P Parameter: Timepoint (hr) Value: 24
  misc_feature: MA Experiment 20001451 PARAMETER Experiment Name: At_Far-red-induction_P Parameter: Tissue Value: Whole Plant
  misc_feature: MA Experiment ID: 20001558 Result: Down-regulated in Transcription
  misc_feature: MA Experiment 20001558 PARAMETER Experiment Name: At_Drought_Soil_Dry_P Parameter: Age (day) Value: 27
  misc_feature: MA Experiment 20001558 PARAMETER Experiment Name: At_Drought_Soil_Dry_P Parameter: Organism Value: A. thaliana
  misc_feature: MA Experiment 20001558 PARAMETER Experiment Name: At_Drought_Soil_Dry_P Parameter: Plant Line Value: WS
  misc_feature: MA Experiment 20001558 PARAMETER Experiment Name: At_Drought_Soil_Dry_P Parameter: Post Timepoint (hr) Value: 6
  misc_feature: MA Experiment 20001558 PARAMETER Experiment Name: At_Drought_Soil_Dry_P Parameter: Post-Treatment Value: Re-Water vs. No Drought
  misc_feature: MA Experiment 20001558 PARAMETER Experiment Name: At_Drought_Soil_Dry_P Parameter: Timepoint (day) Value: 13
  misc_feature: MA Experiment 20001558 PARAMETER Experiment Name: At_Drought_Soil_Dry_P Parameter: Treatment Value: Drought vs. No Drought
  misc_feature: MA Experiment ID: 20001757 Result: Up-regulated in Transcription
  misc_feature: MA Experiment 20001757 PARAMETER Experiment Name: At_50mM_NH4NO3_L-to-H_P Parameter: Timepoint (hr) Value: 6
  misc_feature: MA Experiment 20001757 PARAMETER Experiment Name: At_50mM_NH4NO3_L-to-H_P Parameter: Tissue Value: Leaf
  misc_feature: MA Experiment 20001757 PARAMETER Experiment Name: At_50mM_NH4NO3_L-to-H_P Parameter: Treatment Value: 50mM NH4NO3 vs 100mM Mannitol
  misc_feature: MA Experiment ID: 20001905 Result: Down-regulated in Transcription
  misc_feature: MA Experiment 20001905 PARAMETER Experiment Name: At_Drought_Reproduction_P Parameter: Age (day) Value: 40
  misc_feature: MA Experiment 20001905 PARAMETER Experiment Name: At_Drought_Reproduction_P Parameter: Organism Value: A. thaliana
  misc_feature: MA Experiment 20001905 PARAMETER Experiment Name: At_Drought_Reproduction_P Parameter: Plant Line Value: WS
  misc_feature: MA Experiment 20001905 PARAMETER Experiment Name: At_Drought_Reproduction_P Parameter: Timepoint (day) Value: 10
  misc_feature: MA Experiment 20001905 PARAMETER Experiment Name: At_Drought_Reproduction_P Parameter: Tissue Value: Rosettes
  misc_feature: MA Experiment 20001905 PARAMETER Experiment Name: At_Drought_Reproduction_P Parameter: Treatment Value: Drought vs. No Drought
aatcactctcaccagtcacaaccaaaaaaaaagaaaacacaaaaacaaagattataatggcttcctcaaccatggctttgtcctcccctgccttcgccggaaaggctgtgaagcctgccgcatcagatgtcctcggaagcggccgtgtgaccatgaggaagactgtcgccaagccaaagggtccatcaggcagcccatggtacggatctgaccgagtcaagtacttgggtccattctccggcgagcccccgagctaccttaccggtgagttccccggtgactacggatgggacaccgctggtctatccgccgacccagagaccttcgccaggaaccgtgagctagaagttatccacagcagatgggccatgctcggagccctaggctgcgttttccctgagctattggctaggaacggagtgaagttcggagaagcggtttggttcaaggccggttcacagatcttcagcgacggaggattggactacttgggcaacccgagcttggtccacgctcagagcatcttagccatttgggctactcaagttatcctcatgggagctgttgaaggctacagagtcgccggagatggtccattgggagaagcagaggacttgctttacccaggtggcagcttcgacccattgggcctcgctactgaccccgaggctttcgcagagttgaaggtgaaggagctcaagaacggaaggttggctatgttctctatgtttggattcttcgttcaagccatcgtcaccggaaagggacctttggagaacctcgccgaccatttggccgacccagtcaacaacaacgcttgggccttcgccaccaacttcgtccccggaaagtgagcggctgcttattatgtgaatgagagcagagaaagagagtttgtttgtggtctattctatgtaaatttgtgacagtgatgtgtttacttttg

SEQ ID NO: 29586 - protein, 283 aa, Arabidopsis thaliana
  peptide (1)..(283): Ceres Seq. ID no. 12441501
  misc_feature (81)..(250): Pfam Name: Chlorophyll A-B binding protein Pfam Description: Chlorophyll A-B binding protein
  misc_feature (36)..(283): Homolog of NCBI NO: 12324161 NR Description: chlorophyll A-B-binding protein 2 precursor, 5'
  misc_feature (19)..(283): Homolog of NCBI NO: 30686051 NR Description: photosystem II type I chlorophyll a /b binding
  misc_feature (19)..(283): Homolog of NCBI NO: 18266039 NR Description: chlorophyll a/b binding protein [Brassica
  misc_feature (19)..(283): Homolog of NCBI NO: 21592428 NR Description: putative photosystem II type I chlorophyll a b
  misc_feature (19)..(283): Homolog of NCBI NO: 18403549 NR Description: photosystem II type I chlorophyll a /b binding
  misc_feature (19)..(283): Homolog of NCBI NO: 115778 NR Description: Chlorophyll A-B binding protein 1, chloroplast
  misc_feature (19)..(283): Homolog of NCBI NO: 17473828 NR Description: chlorophyll a/b-binding protein [Arabidopsis
  misc_feature (19)..(283): Homolog of NCBI NO: 18397286 NR Description: photosystem II type I chlorophyll a /b binding
  misc_feature (19)..(283): Homolog of NCBI NO: 15220615 NR Description: light-harvesting chlorophyll a/b binding protein
  misc_feature (19)..(283): Homolog of NCBI NO: 18403546 NR Description: photosystem II type I chlorophyll a /b binding
SLSPVTTKKKENTKTKIIMASSTMALSSPAFAGKAVKPAASDVLGSGRVTMRKTVAKPKGPSGSPWYGSDRVKYLGPFSGEPPSYLTGEFPGDYGWDTAGLSADPETFARNRELEVIHSRWAMLGALGCVFPELLARNGVKFGEAVWFKAGSQIFSDGGLDYLGNPSLVHAQSILAIWATQVILMGAVEGYRVAGDGPLGEAEDLLYPGGSFDPLGLATDPEAFAELKVKELKNGRLAMFSMFGFFVQAIVTGKGPLENLADHLADPVNNNAWAFATNFVPGK

SEQ ID NO: 29587 - protein, 265 aa, Arabidopsis thaliana
  peptide (1)..(265): Ceres Seq. ID no. 12441502
  misc_feature (63)..(232): Pfam Name: Chlorophyll A-B binding protein Pfam Description: Chlorophyll A-B binding protein
  misc_feature (18)..(265): Homolog of NCBI NO: 12324161 NR Description: chlorophyll A-B-binding protein 2 precursor, 5'
  misc_feature (1)..(265): Homolog of NCBI NO: 30686051 NR Description: photosystem II type I chlorophyll a /b binding
  misc_feature (1)..(265): Homolog of NCBI NO: 18266039 NR Description: chlorophyll a/b binding protein [Brassica
  misc_feature (1)..(265): Homolog of NCBI NO: 21592428 NR Description: putative photosystem II type I chlorophyll a b
  misc_feature (1)..(265): Homolog of NCBI NO: 18403549 NR Description: photosystem II type I chlorophyll a /b binding
  misc_feature (1)..(265): Homolog of NCBI NO: 115778 NR Description: Chlorophyll A-B binding protein 1, chloroplast
  misc_feature (1)..(265): Homolog of NCBI NO: 17473828 NR Description: chlorophyll a/b-binding protein [Arabidopsis
  misc_feature (1)..(265): Homolog of NCBI NO: 18397286 NR Description: photosystem II type I chlorophyll a /b binding
  misc_feature (1)..(265): Homolog of NCBI NO: 15220615 NR Description: light-harvesting chlorophyll a/b binding protein
  misc_feature (1)..(265): Homolog of NCBI NO: 18403546 NR Description: photosystem II type I chlorophyll a /b binding
MASSTMALSSPAFAGKAVKPAASDVLGSGRVTMRKTVAKPKGPSGSPWYGSDRVKYLGPFSGEPPSYLTGEFPGDYGWDTAGLSADPETFARNRELEVIHSRWAMLGALGCVFPELLARNGVKFGEAVWFKAGSQIFSDGGLDYLGNPSLVHAQSILAIWATQVILMGAVEGYRVAGDGPLGEAEDLLYPGGSFDPLGLATDPEAFAELKVKELKNGRLAMFSMFGFFVQAIVTGKGPLENLADHLADPVNNNAWAFATNFVPGK

SEQ ID NO: 29588 - protein, 260 aa, Arabidopsis thaliana
  peptide (1)..(260): Ceres Seq. ID no. 12441503
  misc_feature (58)..(227): Pfam Name: Chlorophyll A-B binding protein Pfam Description: Chlorophyll A-B binding protein
  misc_feature (13)..(260): Homolog of NCBI NO: 12324161 NR Description: chlorophyll A-B-binding protein 2 precursor, 5'
  misc_feature (1)..(260): Homolog of NCBI NO: 30686051 NR Description: photosystem II type I chlorophyll a /b binding
  misc_feature (1)..(260): Homolog of NCBI NO: 18266039 NR Description: chlorophyll a/b binding protein [Brassica
  misc_feature (1)..(260): Homolog of NCBI NO: 21592428 NR Description: putative photosystem II type I chlorophyll a b
  misc_feature (1)..(260): Homolog of NCBI NO: 18403549 NR Description: photosystem II type I chlorophyll a /b binding
  misc_feature (1)..(260): Homolog of NCBI NO: 115778 NR Description: Chlorophyll A-B binding protein 1, chloroplast
  misc_feature (1)..(260): Homolog of NCBI NO: 17473828 NR Description: chlorophyll a/b-binding protein [Arabidopsis
  misc_feature (1)..(260): Homolog of NCBI NO: 18397286 NR Description: photosystem II type I chlorophyll a /b binding
  misc_feature (1)..(260): Homolog of NCBI NO: 15220615 NR Description: light-harvesting chlorophyll a/b binding protein
  misc_feature (1)..(260): Homolog of NCBI NO: 18403546 NR Description: photosystem II type I chlorophyll a /b binding
MALSSPAFAGKAVKPAASDVLGSGRVTMRKTVAKPKGPSGSPWYGSDRVKYLGPFSGEPPSYLTGEFPGDYGWDTAGLSADPETFARNRELEVIHSRWAMLGALGCVFPELLARNGVKFGEAVWFKAGSQIFSDGGLDYLGNPSLVHAQSILAIWATQVILMGAVEGYRVAGDGPLGEAEDLLYPGGSFDPLGLATDPEAFAELKVKELKNGRLAMFSMFGFFVQAIVTGKGPLENLADHLADPVNNNAWAFATNFVPGK

SEQ ID NO: 29589 - DNA, 1462 bp, Arabidopsis thaliana
  misc_feature (1)..(1462): Ceres Seq. ID no. 12421962
  misc_feature: MA Experiment ID: 108435 Result: Up-regulated in Transcription
  misc_feature: MA Experiment 108435 PARAMETER Experiment Name: At_stm_Mutants_cDNA_P Parameter: Plant Line Value: wt Landsburg vs stm
  misc_feature: MA Experiment 108435 PARAMETER Experiment Name: At_stm_Mutants_cDNA_P Parameter: Tissue Value: Shoot Apical Meristem Region
  misc_feature: MA Experiment ID: 20000180 Result: Up-regulated in Transcription
  misc_feature: MA Experiment 20000180 PARAMETER Experiment Name: At_Germinating_Seeds_P Parameter: Age (hr) Value: 24 vs. 0
  misc_feature: MA Experiment 20000180 PARAMETER Experiment Name: At_Germinating_Seeds_P Parameter: Tissue Value: Germinating Seeds
  misc_feature: MA Experiment ID: 20000234 Result: Down-regulated in Transcription
  misc_feature: MA Experiment 20000234 PARAMETER Experiment Name: At_Siliques_P Parameter: Age (day) Value: 21
  misc_feature: MA Experiment 20000234 PARAMETER Experiment Name: At_Siliques_P Parameter: Organism Value: A. thaliana
  misc_feature: MA Experiment 20000234 PARAMETER Experiment Name: At_Siliques_P Parameter: Plant Line Value: WS
  misc_feature: MA Experiment 20000234 PARAMETER Experiment Name: At_Siliques_P Parameter: Tissue Value: Less Than 5mm Siliques vs. Whole Plant
  misc_feature: MA Experiment ID: 20000235 Result: Down-regulated in Transcription
  misc_feature: MA Experiment 20000235 PARAMETER Experiment Name: At_Siliques_P Parameter: Age (day) Value: 21
  misc_feature: MA Experiment 20000235 PARAMETER Experiment Name: At_Siliques_P Parameter: Organism Value: A. thaliana
  misc_feature: MA Experiment 20000235 PARAMETER Experiment Name: At_Siliques_P Parameter: Plant Line Value: WS
  misc_feature: MA Experiment 20000235 PARAMETER Experiment Name: At_Siliques_P Parameter: Tissue Value: 5-10mm Siliques vs. Whole Plant
  misc_feature: MA Experiment ID: 20000437 Result: Down-regulated in Transcription
  misc_feature: MA Experiment 20000437 PARAMETER Experiment Name: At_Drought_P Parameter: Age (day) Value: 8
  misc_feature: MA Experiment 20000437 PARAMETER Experiment Name: At_Drought_P Parameter: Organism Value: A. thaliana
  misc_feature: MA Experiment 20000437 PARAMETER Experiment Name: At_Drought_P Parameter: Plant Line Value: WS
  misc_feature: MA Experiment 20000437 PARAMETER Experiment Name: At_Drought_P Parameter: Timepoint (hr) Value: 24
  misc_feature: MA Experiment 20000437 PARAMETER Experiment Name: At_Drought_P Parameter: Tissue Value: Whole Plant
  misc_feature: MA Experiment 20000437 PARAMETER Experiment Name: At_Drought_P Parameter: Treatment Value: Drought vs. No Drought
  misc_feature: MA Experiment ID: 20000573 Result: Down-regulated in Transcription
  misc_feature: MA Experiment 20000573 PARAMETER Experiment Name: At_100uM_ABA_Mutants__P Parameter: Organism Value: A. thaliana
  misc_feature: MA Experiment 20000573 PARAMETER Experiment Name: At_100uM_ABA_Mutants__P Parameter: Plant Line Value: CS22 vs. Ler wt
  misc_feature: MA Experiment 20000573 PARAMETER Experiment Name: At_100uM_ABA_Mutants__P Parameter: Timepoint (hr) Value: N/A
  misc_feature: MA Experiment 20000573 PARAMETER Experiment Name: At_100uM_ABA_Mutants__P Parameter: Tissue Value: Whole Plant
  misc_feature: MA Experiment 20000573 PARAMETER Experiment Name: At_100uM_ABA_Mutants__P Parameter: Treatment Value: None
  misc_feature: MA Experiment ID: 20000574 Result: Down-regulated in Transcription
  misc_feature: MA Experiment 20000574 PARAMETER Experiment Name: At_100uM_ABA_Mutants__P Parameter: Organism Value: A. thaliana
  misc_feature: MA Experiment 20000574 PARAMETER Experiment Name: At_100uM_ABA_Mutants__P Parameter: Plant Line Value: CS23 vs. Ler wt
  misc_feature: MA Experiment 20000574 PARAMETER Experiment Name: At_100uM_ABA_Mutants__P Parameter: Timepoint (hr) Value: N/A
  misc_feature: MA Experiment 20000574 PARAMETER Experiment Name: At_100uM_ABA_Mutants__P Parameter: Tissue Value: Whole Plant
  misc_feature: MA Experiment 20000574 PARAMETER Experiment Name: At_100uM_ABA_Mutants__P Parameter: Treatment Value: None
  misc_feature: MA Experiment ID: 20001450 Result: Up-regulated in Transcription
  misc_feature: MA Experiment 20001450 PARAMETER Experiment Name: At_Far-red-induction_P Parameter: Age (day) Value: 7
  misc_feature: MA Experiment 20001450 PARAMETER Experiment Name: At_Far-red-induction_P Parameter: Light Value: Far-red vs. White
  misc_feature: MA Experiment 20001450 PARAMETER Experiment Name: At_Far-red-induction_P Parameter: Organism Value: A. thaliana
  misc_feature: MA Experiment 20001450 PARAMETER Experiment Name: At_Far-red-induction_P Parameter: Plant Line Value: Columbia
  misc_feature: MA Experiment 20001450 PARAMETER Experiment Name: At_Far-red-induction_P Parameter: Timepoint (hr) Value: 8
  misc_feature: MA Experiment 20001450 PARAMETER Experiment Name: At_Far-red-induction_P Parameter: Tissue Value: Whole Plant
  misc_feature: MA Experiment ID: 20001451 Result: Up-regulated in Transcription
  misc_feature: MA Experiment 20001451 PARAMETER Experiment Name: At_Far-red-induction_P Parameter: Age (day) Value: 7
  misc_feature: MA Experiment 20001451 PARAMETER Experiment Name: At_Far-red-induction_P Parameter: Light Value: Far-red vs. White
  misc_feature: MA Experiment 20001451 PARAMETER Experiment Name: At_Far-red-induction_P Parameter: Organism Value: A. thaliana
  misc_feature: MA Experiment 20001451 PARAMETER Experiment Name: At_Far-red-induction_P Parameter: Plant Line Value: Columbia
  misc_feature: MA Experiment 20001451 PARAMETER Experiment Name: At_Far-red-induction_P Parameter: Timepoint (hr) Value: 24
  misc_feature: MA Experiment 20001451 PARAMETER Experiment Name: At_Far-red-induction_P Parameter: Tissue Value: Whole Plant
  misc_feature: MA Experiment ID: 20001910 Result: Down-regulated in Transcription
  misc_feature: MA Experiment 20001910 PARAMETER Experiment Name: At_Drought_Reproduction_P Parameter: Age (day) Value: 37
  misc_feature: MA Experiment 20001910 PARAMETER Experiment Name: At_Drought_Reproduction_P Parameter: Organism Value: A. thaliana
  misc_feature: MA Experiment 20001910 PARAMETER Experiment Name: At_Drought_Reproduction_P Parameter: Plant Line Value: WS
  misc_feature: MA Experiment 20001910 PARAMETER Experiment Name: At_Drought_Reproduction_P Parameter: Timepoint (day) Value: 7
  misc_feature: MA Experiment 20001910 PARAMETER Experiment Name: At_Drought_Reproduction_P Parameter: Tissue Value: Flowers
  misc_feature: MA Experiment 20001910 PARAMETER Experiment Name: At_Drought_Reproduction_P Parameter: Treatment Value: Drought vs. No Drought
aagacaatccctttcttctcccctttctccaacacctaccaaaagcctctctctctctctagttcttgatttttcaagatttcaagaaaacatggctgaccaaagtggtgggttggttatgatgagagagtacagaaaaggcaactggacgttgaatgagacgatggttctcattgaggccaagaggatggatgatgagaggaggatgcggcggtccatcggccttccaccgccggagcagcaacaagatatccggagtaataaaccggcggagctacggtggaagtggatagaagattactgttggagaaaaggttgtatgagaagtcagaatcagtgcaatgacaaatgggacaatctcatgagagactacaaaaaagttagagagtacgagagacgaagggtagaatcgtctattaccgccggtgagtcgtcttcatcttcagctccagctggagaaacggcgtcgtactggaagatggagaagagtgagaggaaagagagaagcttaccaagtaatatgttacctcaaacataccaagctttgtttgaagttgttgagagtaaaacgcttccttcttctaccgccgtaaccgctgtaaccgctgcagttgcggctgctgctgctgctattagtagtggaaacggttcaggcggtggacaaatccataaagtgatacaacaaggtttaggatttgttgttcctaaagtacatcaaatcattcagcagcaacctgttttgttaccacttcagccaccgccgccaccaccaccgtctcagccgttaccacgaccactactactgccaccgcctccaccgccttcttttcatgctcagccaatactgcccacagtagaaggatagtagcacagattctgatacaagtgagtattcagacacatctccggcgaagcggaggagaacaatgccgacaaccacaaccgccggtcccagcggcggcggtgtagatgtggaggaggttggacgtagtaagagagatgaagaaacgacagtagcggctgcgttatcaagaagtgtgtcagtgatcgcaaacgcgattagggagagtgaggagagacaagatcggagacataaagaagtgatgaacgtacaagagaggagattgaagatcgaagaatctaatgttgagatgaatagagaaggcatgaatgggttagtggaagccattaataagctagcgagctccattttcgctttggcttcttcttctcgccataataatcagcatcaaggaggtccaccatagtaattcaaatgattattatgtagttaatttgattagggaagtgattaaattgtggagagtgatgatcggagtacataaattgataatgaagtcttaattaatcttgttttcatcactctcaatgttttaaattaatttgttgatttcatgcaatatagattgaaatgtgatcatataaagttgatttaatatgc

SEQ ID NO: 29590 - protein, 287 aa, Arabidopsis thaliana
  peptide (1)..(287): Ceres Seq. ID no. 12421963
  misc_feature (29)..(179): Homolog of NCBI NO: 30685749 NR Description: expressed protein [Arabidopsis thaliana]
  misc_feature (29)..(179): Homolog of NCBI NO: 25408286 NR Description: hypothetical protein At2g33550 [imported] -
  misc_feature (45)..(182): Homolog of NCBI NO: 34907058 NR Description: hypothetical protein [Oryza sativa (japonica
  misc_feature (36)..(263): Homolog of NCBI NO: 38347161 NR Description: OSJNBa0039C07.7 [Oryza sativa (japonica
  misc_feature (31)..(219): Homolog of NCBI NO: 40538915 NR Description: hypothetical protein [Oryza sativa (japonica
  misc_feature (154)..(285): Homolog of NCBI NO: 15227458 NR Description: unknown protein; protein id: At2g35640.1
  misc_feature (32)..(263): Homolog of NCBI NO: 15227458 NR Description: unknown protein; protein id: At2g35640.1
  misc_feature (31)..(284): Homolog of NCBI NO: 15221676 NR Description: hypothetical protein; protein id: At1g31310.1
  misc_feature (31)..(285): Homolog of NCBI NO: 6692131 NR Description: T19E23.10 [Arabidopsis thaliana]
RQSLSSPLSPTPTKSLSLSLVLDFSRFQENMADQSGGLVMMREYRKGNWTLNETMVLIEAKRMDDERRMRRSIGLPPPEQQQDIRSNKPAELRWKWIEDYCWRKGCMRSQNQCNDKWDNLMRDYKKVREYERRRVESSITAGESSSSSAPAGETASYWKMEKSERKERSLPSNMLPQTYQALFEVVESKTLPSSTAVTAVTAAVAAAAAAISSGNGSGGGQIHKVIQQGLGFVVPKVHQIIQQQPVLLPLQPPPPPPPSQPLPRPLLLPPPPPPSFHAQPILPTVEG

SEQ ID NO: 29591 - protein, 257 aa, Arabidopsis thaliana
  peptide (1)..(257): Ceres Seq. ID no. 12421964
  misc_feature (1)..(149): Homolog of NCBI NO: 30685749 NR Description: expressed protein [Arabidopsis thaliana]
  misc_feature (1)..(149): Homolog of NCBI NO: 25408286 NR Description: hypothetical protein At2g33550 [imported] -
  misc_feature (15)..(152): Homolog of NCBI NO: 34907058 NR Description: hypothetical protein [Oryza sativa (japonica
  misc_feature (6)..(233): Homolog of NCBI NO: 38347161 NR Description: OSJNBa0039C07.7 [Oryza sativa (japonica
  misc_feature (1)..(189): Homolog of NCBI NO: 40538915 NR Description: hypothetical protein [Oryza sativa (japonica
  misc_feature (124)..(255): Homolog of NCBI NO: 15227458 NR Description: unknown protein; protein id: At2g35640.1
  misc_feature (2)..(233): Homolog of NCBI NO: 15227458 NR Description: unknown protein; protein id: At2g35640.1
  misc_feature (1)..(254): Homolog of NCBI NO: 15221676 NR Description: hypothetical protein; protein id: At1g31310.1
  misc_feature (1)..(255): Homolog of NCBI NO: 6692131 NR Description: T19E23.10 [Arabidopsis thaliana]
MADQSGGLVMMREYRKGNWTLNETMVLIEAKRMDDERRMRRSIGLPPPEQQQDIRSNKPAELRWKWIEDYCWRKGCMRSQNQCNDKWDNLMRDYKKVREYERRRVESSITAGESSSSSAPAGETASYWKMEKSERKERSLPSNMLPQTYQALFEVVESKTLPSSTAVTAVTAAVAAAAAAISSGNGSGGGQIHKVIQQGLGFVVPKVHQIIQQQPVLLPLQPPPPPPPSQPLPRPLLLPPPPPPSFHAQPILPTVEG

SEQ ID NO: 29592 - protein, 248 aa, Arabidopsis thaliana
  peptide (1)..(248): Ceres Seq. ID no. 12421965
  misc_feature (1)..(140): Homolog of NCBI NO: 30685749 NR Description: expressed protein [Arabidopsis thaliana]
  misc_feature (1)..(140): Homolog of NCBI NO: 25408286 NR Description: hypothetical protein At2g33550 [imported] -
  misc_feature (6)..(143): Homolog of NCBI NO: 34907058 NR Description: hypothetical protein [Oryza sativa (japonica
  misc_feature (1)..(224): Homolog of NCBI NO: 38347161 NR Description: OSJNBa0039C07.7 [Oryza sativa (japonica
  misc_feature (1)..(180): Homolog of NCBI NO: 40538915 NR Description: hypothetical protein [Oryza sativa (japonica
  misc_feature (115)..(246): Homolog of NCBI NO: 15227458 NR Description: unknown protein; protein id: At2g35640.1
  misc_feature (1)..(224): Homolog of NCBI NO: 15227458 NR Description: unknown protein; protein id: At2g35640.1
  misc_feature (1)..(245): Homolog of NCBI NO: 15221676 NR Description: hypothetical protein; protein id: At1g31310.1
  misc_feature (1)..(246): Homolog of NCBI NO: 6692131 NR Description: T19E23.10 [Arabidopsis thaliana]
MMREYRKGNWTLNETMVLIEAKRMDDERRMRRSIGLPPPEQQQDIRSNKPAELRWKWIEDYCWRKGCMRSQNQCNDKWDNLMRDYKKVREYERRRVESSITAGESSSSSAPAGETASYWKMEKSERKERSLPSNMLPQTYQALFEVVESKTLPSSTAVTAVTAAVAAAAAAISSGNGSGGGQIHKVIQQGLGFVVPKVHQIIQQQPVLLPLQPPPPPPPSQPLPRPLLLPPPPPPSFHAQPILPTVEG

SEQ ID NO: 29593 - DNA, 1150 bp, Arabidopsis thaliana
  misc_feature (1)..(1150): Ceres Seq. ID no. 12439663
  misc_feature: MA Experiment ID: 108434 Result: Down-regulated in Transcription
  misc_feature: MA Experiment 108434 PARAMETER Experiment Name: At_Root_Tips_cDNA_P Parameter: Tissue Value: Root Tips
  misc_feature: MA Experiment ID: 108435 Result: Down-regulated in Transcription
  misc_feature: MA Experiment 108435 PARAMETER Experiment Name: At_stm_Mutants_cDNA_P Parameter: Plant Line Value: wt Landsburg vs stm
  misc_feature: MA Experiment 108435 PARAMETER Experiment Name: At_stm_Mutants_cDNA_P Parameter: Tissue Value: Shoot Apical Meristem Region
  misc_feature: MA Experiment ID: 108462 Result: Up-regulated in Transcription
  misc_feature: MA Experiment 108462 PARAMETER Experiment Name: At_Germinating_Seeds_cDNA_P Parameter: Age (day) Value: 2 vs. 0
  misc_feature: MA Experiment 108462 PARAMETER Experiment Name: At_Germinating_Seeds_cDNA_P Parameter: Tissue Value: Germinating Seeds
  misc_feature: MA Experiment ID: 108463 Result: Up-regulated in Transcription
  misc_feature: MA Experiment 108463 PARAMETER Experiment Name: At_Germinating_Seeds_cDNA_P Parameter: Age (day) Value: 3 vs. 0
  misc_feature: MA Experiment 108463 PARAMETER Experiment Name: At_Germinating_Seeds_cDNA_P Parameter: Tissue Value: Germinating Seeds
  misc_feature: MA Experiment ID: 108464 Result: Up-regulated in Transcription
  misc_feature: MA Experiment 108464 PARAMETER Experiment Name: At_Germinating_Seeds_cDNA_P Parameter: Age (day) Value: 4 vs. 0
  misc_feature: MA Experiment 108464 PARAMETER Experiment Name: At_Germinating_Seeds_cDNA_P Parameter: Tissue Value: Germinating Seeds
  misc_feature: MA Experiment ID: 108488 Result: Down-regulated in Transcription
  misc_feature: MA Experiment ID: 108561 Result: Up-regulated in Transcription
  misc_feature: MA Experiment 108561 PARAMETER Experiment Name: At_100uM_ABA_cDNA_P Parameter: Timepoint (hr) Value: 6
  misc_feature: MA Experiment 108561 PARAMETER Experiment Name: At_100uM_ABA_cDNA_P Parameter: Tissue Value: Aerial
  misc_feature: MA Experiment 108561 PARAMETER Experiment Name: At_100uM_ABA_cDNA_P Parameter: Treatment Value: 100uM ABA vs. No Treatment
  misc_feature: MA Experiment ID: 108573 Result: Up-regulated in Transcription
  misc_feature: MA Experiment 108573 PARAMETER Experiment Name: At_Drought_cDNA_P Parameter: Timepoint (hr) Value: 6
  misc_feature: MA Experiment 108573 PARAMETER Experiment Name: At_Drought_cDNA_P Parameter: Tissue Value: Aerial
  misc_feature: MA Experiment 108573 PARAMETER Experiment Name: At_Drought_cDNA_P Parameter: Treatment Value: Drought vs. No Drought
  misc_feature: MA Experiment ID: 108585 Result: Up-regulated in Transcription
  misc_feature: MA Experiment 108585 PARAMETER Experiment Name: At_5mM_NaNP_cDNA_P Parameter: Timepoint (hr) Value: 6
  misc_feature: MA Experiment 108585 PARAMETER Experiment Name: At_5mM_NaNP_cDNA_P Parameter: Tissue Value: Aerial
  misc_feature: MA Experiment 108585 PARAMETER Experiment Name: At_5mM_NaNP_cDNA_P Parameter: Treatment Value: null
  misc_feature: MA Experiment ID: 108605 Result: Up-regulated in Transcription
  misc_feature: MA Experiment 108605 PARAMETER Experiment Name: At_100uM_ABA_cDNA_P Parameter: Timepoint (hr) Value: 6
  misc_feature: MA Experiment 108605 PARAMETER Experiment Name: At_100uM_ABA_cDNA_P Parameter: Tissue Value: Aerial
  misc_feature: MA Experiment 108605 PARAMETER Experiment Name: At_100uM_ABA_cDNA_P Parameter: Treatment Value: 100uM ABA vs. No Treatment
  misc_feature: MA Experiment ID: 108607 Result: Up-regulated in Transcription
  misc_feature: MA Experiment 108607 PARAMETER Experiment Name: At_100uM_ABA_cDNA_P Parameter: Timepoint (hr) Value: 4
  misc_feature: MA Experiment 108607 PARAMETER Experiment Name: At_100uM_ABA_cDNA_P Parameter: Tissue Value: Aerial
  misc_feature: MA Experiment 108607 PARAMETER Experiment Name: At_100uM_ABA_cDNA_P Parameter: Treatment Value: 100uM ABA vs. No Treatment
  misc_feature: MA Experiment ID: 108609 Result: Up-regulated in Transcription
  misc_feature: MA Experiment 108609 PARAMETER Experiment Name: At_100uM_ABA_cDNA_P Parameter: Timepoint (hr) Value: 24
  misc_feature: MA Experiment 108609 PARAMETER Experiment Name: At_100uM_ABA_cDNA_P Parameter: Tissue Value: Aerial
  misc_feature: MA Experiment 108609 PARAMETER Experiment Name: At_100uM_ABA_cDNA_P Parameter: Treatment Value: 100uM ABA vs. No Treatment
  misc_feature: MA Experiment ID: 20000069 Result: Up-regulated in Transcription
  misc_feature: MA Experiment 20000069 PARAMETER Experiment Name: At_100uM_ABA_Mutants_cDNA_P Parameter: Plant Line Value: CS23
  misc_feature: MA Experiment 20000069 PARAMETER Experiment Name: At_100uM_ABA_Mutants_cDNA_P Parameter: Timepoint (hr) Value: 6
  misc_feature: MA Experiment 20000069 PARAMETER Experiment Name: At_100uM_ABA_Mutants_cDNA_P Parameter: Tissue Value: Aerial
  misc_feature: MA Experiment 20000069 PARAMETER Experiment Name: At_100uM_ABA_Mutants_cDNA_P Parameter: Treatment Value: 100uM ABA vs. No Treatment
  misc_feature: MA Experiment ID: 20000070 Result: Up-regulated in Transcription
  misc_feature: MA Experiment 20000070 PARAMETER Experiment Name: At_100uM_ABA_Mutants_cDNA_P Parameter: Plant Line Value: CS24
  misc_feature: MA Experiment 20000070 PARAMETER Experiment Name: At_100uM_ABA_Mutants_cDNA_P Parameter: Timepoint (hr) Value: 6
  misc_feature: MA Experiment 20000070 PARAMETER Experiment Name: At_100uM_ABA_Mutants_cDNA_P Parameter: Tissue Value: Aerial
  misc_feature: MA Experiment 20000070 PARAMETER Experiment Name: At_100uM_ABA_Mutants_cDNA_P Parameter: Treatment Value: 100uM ABA vs. No Treatment
  misc_feature: MA Experiment ID: 20000071 Result: Up-regulated in Transcription
  misc_feature: MA Experiment 20000071 PARAMETER Experiment Name: At_100uM_ABA_Mutants_cDNA_P Parameter: Plant Line Value: CS8104
  misc_feature: MA Experiment 20000071 PARAMETER Experiment Name: At_100uM_ABA_Mutants_cDNA_P Parameter: Timepoint (hr) Value: 6
  misc_feature: MA Experiment 20000071 PARAMETER Experiment Name: At_100uM_ABA_Mutants_cDNA_P Parameter: Tissue Value: Aerial
  misc_feature: MA Experiment 20000071 PARAMETER Experiment Name: At_100uM_ABA_Mutants_cDNA_P Parameter: Treatment Value: 100uM ABA vs. No Treatment
  misc_feature: MA Experiment ID: 20000088 Result: Up-regulated in Transcription
  misc_feature: MA Experiment 20000088 PARAMETER Experiment Name: At_100uM_ABA_Mutants_cDNA_P Parameter: Plant Line Value: Landsberg
  misc_feature: MA Experiment 20000088 PARAMETER Experiment Name: At_100uM_ABA_Mutants_cDNA_P Parameter: Timepoint (hr) Value: 6
  misc_feature: MA Experiment 20000088 PARAMETER Experiment Name: At_100uM_ABA_Mutants_cDNA_P Parameter: Tissue Value: Aerial
  misc_feature: MA Experiment 20000088 PARAMETER Experiment Name: At_100uM_ABA_Mutants_cDNA_P Parameter: Treatment Value: 100uM ABA vs. No Treatment
  misc_feature: MA Experiment ID: 20000111 Result: Down-regulated in Transcription
  misc_feature: MA Experiment 20000111 PARAMETER Experiment Name: At_42deg_Heat_cDNA_P Parameter: Temperature (deg C) Value: 42 vs. 22
  misc_feature: MA Experiment 20000111 PARAMETER Experiment Name: At_42deg_Heat_cDNA_P Parameter: Timepoint (hr) Value: 6
  misc_feature: MA Experiment 20000111 PARAMETER Experiment Name: At_42deg_Heat_cDNA_P Parameter: Tissue Value: Aerial
  misc_feature: MA Experiment ID: 20000166 Result: Up-regulated in Transcription
  misc_feature: MA Experiment 20000166 PARAMETER Experiment Name: At_100uM_ABA_P Parameter: Age (day) Value: 14
  misc_feature: MA Experiment 20000166 PARAMETER Experiment Name: At_100uM_ABA_P Parameter: Organism Value: A. thaliana
  misc_feature: MA Experiment 20000166 PARAMETER Experiment Name: At_100uM_ABA_P Parameter: Plant Line Value: WS
  misc_feature: MA Experiment 20000166 PARAMETER Experiment Name: At_100uM_ABA_P Parameter: Timepoint (hr) Value: 1
  misc_feature: MA Experiment 20000166 PARAMETER Experiment Name: At_100uM_ABA_P Parameter: Tissue Value: Aerial
  misc_feature: MA Experiment 20000166 PARAMETER Experiment Name: At_100uM_ABA_P Parameter: Treatment Value: 100uM ABA vs. No Treatment
  misc_feature: MA Experiment ID: 20000169 Result: Up-regulated in Transcription
  misc_feature: MA Experiment 20000169 PARAMETER Experiment Name: At_100uM_ABA_P Parameter: Age (day) Value: 14
  misc_feature: MA Experiment 20000169 PARAMETER Experiment Name: At_100uM_ABA_P Parameter: Organism Value: A. thaliana
  misc_feature: MA Experiment 20000169 PARAMETER Experiment Name: At_100uM_ABA_P Parameter: Plant Line Value: WS
  misc_feature: MA Experiment 20000169 PARAMETER Experiment Name: At_100uM_ABA_P Parameter: Timepoint (hr) Value: 6
  misc_feature: MA Experiment 20000169 PARAMETER Experiment Name: At_100uM_ABA_P Parameter: Tissue Value: Aerial
  misc_feature: MA Experiment 20000169 PARAMETER Experiment Name: At_100uM_ABA_P Parameter: Treatment Value: 100uM ABA vs. No Treatment
  misc_feature: MA Experiment ID: 20000173 Result: Down-regulated in Transcription
  misc_feature: MA Experiment 20000173 PARAMETER Experiment Name: At_42deg_Heat_P Parameter: Age (day) Value: 14
  misc_feature: MA Experiment 20000173 PARAMETER Experiment Name: At_42deg_Heat_P Parameter: Organism Value: A. thaliana
  misc_feature: MA Experiment 20000173 PARAMETER Experiment Name: At_42deg_Heat_P Parameter: Plant Line Value: WS
  misc_feature: MA Experiment 20000173 PARAMETER Experiment Name: At_42deg_Heat_P Parameter: Temperature (deg C) Value: 42 vs. 22
  misc_feature: MA Experiment 20000173 PARAMETER Experiment Name: At_42deg_Heat_P Parameter: Timepoint (hr) Value: 6
  misc_feature: MA Experiment 20000173 PARAMETER Experiment Name: At_42deg_Heat_P Parameter: Tissue Value: Aerial
  misc_feature: MA Experiment ID: 20000182 Result: Up-regulated in Transcription
  misc_feature: MA Experiment 20000182 PARAMETER Experiment Name: At_2mM_SA_P Parameter: Age (day) Value: 14
  misc_feature: MA Experiment 20000182 PARAMETER Experiment Name: At_2mM_SA_P Parameter: Organism Value: A. thaliana
  misc_feature: MA Experiment 20000182 PARAMETER Experiment Name: At_2mM_SA_P Parameter: Plant Line Value: WS
  misc_feature: MA Experiment 20000182 PARAMETER Experiment Name: At_2mM_SA_P Parameter: Timepoint (hr) Value: 6
  misc_feature: MA Experiment 20000182 PARAMETER Experiment Name: At_2mM_SA_P Parameter: Tissue Value: Aerial
  misc_feature: MA Experiment 20000182 PARAMETER Experiment Name: At_2mM_SA_P Parameter: Treatment Value: 2mM SA vs. No Treatment
  misc_feature: MA Experiment ID: 20000184 Result: Down-regulated in Transcription
  misc_feature: MA Experiment 20000184 PARAMETER Experiment Name: At_Shoots__P Parameter: Age (day) Value: 7
  misc_feature: MA Experiment 20000184 PARAMETER Experiment Name: At_Shoots__P Parameter: Tissue Value: Shoots vs. Whole Plant
  misc_feature: MA Experiment ID: 20000224 Result: Up-regulated in Transcription
  misc_feature: MA Experiment ID: 20000234 Result: Down-regulated in Transcription
  misc_feature: MA Experiment 20000234 PARAMETER Experiment Name: At_Siliques_P Parameter: Age (day) Value: 21
  misc_feature: MA Experiment 20000234 PARAMETER Experiment Name: At_Siliques_P Parameter: Organism Value: A. thaliana
  misc_feature: MA Experiment 20000234 PARAMETER Experiment Name: At_Siliques_P Parameter: Plant Line Value: WS
  misc_feature: MA Experiment 20000234 PARAMETER Experiment Name: At_Siliques_P Parameter: Tissue Value: Less Than 5mm Siliques vs. Whole Plant
  misc_feature: MA Experiment ID: 20000235 Result: Down-regulated in Transcription
  misc_feature: MA Experiment 20000235 PARAMETER Experiment Name: At_Siliques_P Parameter: Age (day) Value: 21
  misc_feature: MA Experiment 20000235 PARAMETER Experiment Name: At_Siliques_P Parameter: Organism Value: A. thaliana
  misc_feature: MA Experiment 20000235 PARAMETER Experiment Name: At_Siliques_P Parameter: Plant Line Value: WS
  misc_feature: MA Experiment 20000235 PARAMETER Experiment Name: At_Siliques_P Parameter: Tissue Value: 5-10mm Siliques vs. Whole Plant
  misc_feature: MA Experiment ID: 20000265 Result: Down-regulated in Transcription
  misc_feature: MA Experiment 20000265 PARAMETER Experiment Name: At_Open_Flower_P Parameter: Age (day) Value: 21
  misc_feature: MA Experiment 20000265 PARAMETER Experiment Name: At_Open_Flower_P Parameter: Plant Line Value: WS
  misc_feature: MA Experiment 20000265 PARAMETER Experiment Name: At_Open_Flower_P Parameter: Tissue Value: Closed Flower vs. Whole Plant
  misc_feature: MA Experiment ID: 20000267 Result: Up-regulated in Transcription
  misc_feature: MA Experiment 20000267 PARAMETER Experiment Name: At_Drought_P Parameter: Age (day) Value: 7
  misc_feature: MA Experiment 20000267 PARAMETER Experiment Name: At_Drought_P Parameter: Organism Value: A. thaliana
  misc_feature: MA Experiment 20000267 PARAMETER Experiment Name: At_Drought_P Parameter: Plant Line Value: WS
  misc_feature: MA Experiment 20000267 PARAMETER Experiment Name: At_Drought_P Parameter: Timepoint (hr) Value: 6
  misc_feature: MA Experiment 20000267 PARAMETER Experiment Name: At_Drought_P Parameter: Tissue Value: Whole Plant
  misc_feature: MA Experiment 20000267 PARAMETER Experiment Name: At_Drought_P Parameter: Treatment Value: Drought vs. No Drought
  misc_feature: MA Experiment ID: 20000286 Result: Down-regulated in Transcription
  misc_feature: MA Experiment 20000286 PARAMETER Experiment Name: At_Open_Flower_P Parameter: Age (day) Value: 21
  misc_feature: MA Experiment 20000286 PARAMETER Experiment Name: At_Open_Flower_P Parameter: Plant Line Value: WS
  misc_feature: MA Experiment 20000286 PARAMETER Experiment Name: At_Open_Flower_P Parameter: Tissue Value: Half Open vs. Whole Plant
  misc_feature: MA Experiment ID: 20000288 Result: Down-regulated in Transcription
  misc_feature: MA Experiment 20000288 PARAMETER Experiment Name: At_Drought_P Parameter: Age (day) Value: 7
  misc_feature: MA Experiment 20000288 PARAMETER Experiment Name: At_Drought_P Parameter: Organism Value: A. thaliana
  misc_feature: MA Experiment 20000288 PARAMETER Experiment Name: At_Drought_P Parameter: Plant Line Value: WS
  misc_feature: MA Experiment 20000288 PARAMETER Experiment Name: At_Drought_P Parameter: Timepoint (hr) Value: 1
  misc_feature: MA Experiment 20000288 PARAMETER Experiment Name: At_Drought_P Parameter: Tissue Value: Whole Plant
  misc_feature: MA Experiment 20000288 PARAMETER Experiment Name: At_Drought_P Parameter: Treatment Value: Drought vs. No Drought
  misc_feature: MA Experiment ID: 20000308 Result: Up-regulated in Transcription
  misc_feature: MA Experiment 20000308 PARAMETER Experiment Name: At_100mM_NaCl__P Parameter: Age (day) Value: 17
  misc_feature: MA Experiment 20000308 PARAMETER Experiment Name: At_100mM_NaCl__P Parameter: Organism Value: A. thaliana
  misc_feature: MA Experiment 20000308 PARAMETER Experiment Name: At_100mM_NaCl__P Parameter: Plant Line Value: WS
  misc_feature: MA Experiment 20000308 PARAMETER Experiment Name: At_100mM_NaCl__P Parameter: Timepoint (hr) Value: 72
  misc_feature: MA Experiment 20000308 PARAMETER Experiment Name: At_100mM_NaCl__P Parameter: Tissue Value: Whole Plant
  misc_feature: MA Experiment 20000308 PARAMETER Experiment Name: At_100mM_NaCl__P Parameter: Treatment Value: 100mM NaCl vs. No Treatment
  misc_feature: MA Experiment ID: 20000436 Result: Up-regulated in Transcription
  misc_feature: MA Experiment 20000436 PARAMETER Experiment Name: At_Drought_P Parameter: Age (day) Value: 7
  misc_feature: MA Experiment 20000436 PARAMETER Experiment Name: At_Drought_P Parameter: Organism Value: A. thaliana
  misc_feature: MA Experiment 20000436 PARAMETER Experiment Name: At_Drought_P Parameter: Plant Line Value: WS
  misc_feature: MA Experiment 20000436 PARAMETER Experiment Name: At_Drought_P Parameter: Timepoint (hr) Value: 12
  misc_feature: MA Experiment 20000436 PARAMETER Experiment Name: At_Drought_P Parameter: Tissue Value: Whole Plant
  misc_feature: MA Experiment 20000436 PARAMETER Experiment Name: At_Drought_P Parameter: Treatment Value: Drought vs. No Drought
  misc_feature: MA Experiment ID: 20000437 Result: Up-regulated in Transcription
  misc_feature: MA Experiment 20000437 PARAMETER Experiment Name: At_Drought_P Parameter: Age (day) Value: 8
  misc_feature: MA Experiment 20000437 PARAMETER Experiment Name: At_Drought_P Parameter: Organism Value: A. thaliana
  misc_feature: MA Experiment 20000437 PARAMETER Experiment Name: At_Drought_P Parameter: Plant Line Value: WS
  misc_feature: MA Experiment 20000437 PARAMETER Experiment Name: At_Drought_P Parameter: Timepoint (hr) Value: 24
  misc_feature: MA Experiment 20000437 PARAMETER Experiment Name: At_Drought_P Parameter: Tissue Value: Whole Plant
  misc_feature: MA Experiment 20000437 PARAMETER Experiment Name: At_Drought_P Parameter: Treatment Value: Drought vs. No Drought
  misc_feature: MA Experiment ID: 20000438 Result: Down-regulated in Transcription
  misc_feature: MA Experiment 20000438 PARAMETER Experiment Name: At_Shoots__P Parameter: Age (day) Value: 14
  misc_feature: MA Experiment 20000438 PARAMETER Experiment Name: At_Shoots__P Parameter: Tissue Value: Shoots vs. Whole Plant
  misc_feature: MA Experiment ID: 20000453 Result: Up-regulated in Transcription
  misc_feature: MA Experiment 20000453 PARAMETER Experiment Name: At_100uM_ABA_P Parameter: Age (day) Value: 15
  misc_feature: MA Experiment 20000453 PARAMETER Experiment Name: At_100uM_ABA_P Parameter: Organism Value: A. thaliana
  misc_feature: MA Experiment 20000453 PARAMETER Experiment Name: At_100uM_ABA_P Parameter: Plant Line Value: WS
  misc_feature: MA Experiment 20000453 PARAMETER Experiment Name: At_100uM_ABA_P Parameter: Timepoint (hr) Value: 24
  misc_feature: MA Experiment 20000453 PARAMETER Experiment Name: At_100uM_ABA_P Parameter: Tissue Value: Aerial
  misc_feature: MA Experiment 20000453 PARAMETER Experiment Name: At_100uM_ABA_P Parameter: Treatment Value: 100uM ABA vs. No Treatment
  misc_feature: MA Experiment ID: 20000455 Result: Up-regulated in Transcription
  misc_feature: MA Experiment 20000455 PARAMETER Experiment Name: At_100uM_ABA_P Parameter: Age (day) Value: 16
  misc_feature: MA Experiment 20000455 PARAMETER Experiment Name: At_100uM_ABA_P Parameter: Organism Value: A. thaliana
  misc_feature: MA Experiment 20000455 PARAMETER Experiment Name: At_100uM_ABA_P Parameter: Plant Line Value: WS
  misc_feature: MA Experiment 20000455 PARAMETER Experiment Name: At_100uM_ABA_P Parameter: Timepoint (hr) Value: 48
  misc_feature: MA Experiment 20000455 PARAMETER Experiment Name: At_100uM_ABA_P Parameter: Tissue Value: Aerial
  misc_feature: MA Experiment 20000455 PARAMETER Experiment Name: At_100uM_ABA_P Parameter: Treatment Value: 100uM ABA vs. No Treatment
  misc_feature: MA Experiment ID: 20000527 Result: Down-regulated in Transcription
  misc_feature: MA Experiment 20000527 PARAMETER Experiment Name: At_10percent_PEG_P Parameter: Age (day) Value: 20
  misc_feature: MA Experiment 20000527 PARAMETER Experiment Name: At_10percent_PEG_P Parameter: Organism Value: A. thaliana
  misc_feature: MA Experiment 20000527 PARAMETER Experiment Name: At_10percent_PEG_P Parameter: Plant Line Value: WS
  misc_feature: MA Experiment 20000527 PARAMETER Experiment Name: At_10percent_PEG_P Parameter: Timepoint (day) Value: 20
  misc_feature: MA Experiment 20000527 PARAMETER Experiment Name: At_10percent_PEG_P Parameter: Tissue Value: Whole Plant
  misc_feature: MA Experiment 20000527 PARAMETER Experiment Name: At_10percent_PEG_P Parameter: Treatment Value: 10percent PEG vs. No Treatment
  misc_feature: MA Experiment ID: 20000573 Result: Up-regulated in Transcription
  misc_feature: MA Experiment 20000573 PARAMETER Experiment Name: At_100uM_ABA_Mutants__P Parameter: Organism Value: A. thaliana
  misc_feature: MA Experiment 20000573 PARAMETER Experiment Name: At_100uM_ABA_Mutants__P Parameter: Plant Line Value: CS22 vs. Ler wt
  misc_feature: MA Experiment 20000573 PARAMETER Experiment Name: At_100uM_ABA_Mutants__P Parameter: Timepoint (hr) Value: N/A
  misc_feature: MA Experiment 20000573 PARAMETER Experiment Name: At_100uM_ABA_Mutants__P Parameter: Tissue Value: Whole Plant
  misc_feature: MA Experiment 20000573 PARAMETER Experiment Name: At_100uM_ABA_Mutants__P Parameter: Treatment Value: None
  misc_feature: MA Experiment ID: 20000574 Result: Up-regulated in Transcription
  misc_feature: MA Experiment 20000574 PARAMETER Experiment Name: At_100uM_ABA_Mutants__P Parameter: Organism Value: A. thaliana
  misc_feature: MA Experiment 20000574 PARAMETER Experiment Name: At_100uM_ABA_Mutants__P Parameter: Plant Line Value: CS23 vs. Ler wt
  misc_feature: MA Experiment 20000574 PARAMETER Experiment Name: At_100uM_ABA_Mutants__P Parameter: Timepoint (hr) Value: N/A
  misc_feature: MA Experiment 20000574 PARAMETER Experiment Name: At_100uM_ABA_Mutants__P Parameter: Tissue Value: Whole Plant
  misc_feature: MA Experiment 20000574 PARAMETER Experiment Name: At_100uM_ABA_Mutants__P Parameter: Treatment Value: None
  misc_feature: MA Experiment ID: 20000576 Result: Down-regulated in Transcription
  misc_feature: MA Experiment 20000576 PARAMETER Experiment Name: At_100uM_ABA_Mutants__P Parameter: Organism Value: A. thaliana
  misc_feature: MA Experiment 20000576 PARAMETER Experiment Name: At_100uM_ABA_Mutants__P Parameter: Plant Line Value: CS23
  misc_feature: MA Experiment 20000576 PARAMETER Experiment Name: At_100uM_ABA_Mutants__P Parameter: Timepoint (hr) Value: 6
  misc_feature: MA Experiment 20000576 PARAMETER Experiment Name: At_100uM_ABA_Mutants__P Parameter: Tissue Value: Whole Plant
  misc_feature: MA Experiment 20000576 PARAMETER Experiment Name: At_100uM_ABA_Mutants__P Parameter: Treatment Value: 1uM ABA vs. No Treatment
  misc_feature: MA Experiment ID: 20000709 Result: Up-regulated in Transcription
  misc_feature: MA Experiment 20000709 PARAMETER Experiment Name: At_15mM_NH4NO3_L-to-H_P Parameter: Age (hr) Value: 14
  misc_feature: MA Experiment 20000709 PARAMETER Experiment Name: At_15mM_NH4NO3_L-to-H_P Parameter: Organism Value: A. thaliana
  misc_feature: MA Experiment 20000709 PARAMETER Experiment Name: At_15mM_NH4NO3_L-to-H_P Parameter: Plant Line Value: WS
  misc_feature: MA Experiment 20000709 PARAMETER Experiment Name: At_15mM_NH4NO3_L-to-H_P Parameter: Timepoint (hr) Value: 4
  misc_feature: MA Experiment 20000709 PARAMETER Experiment Name: At_15mM_NH4NO3_L-to-H_P Parameter: Tissue Value: Aerial
  misc_feature: MA Experiment 20000709 PARAMETER Experiment Name: At_15mM_NH4NO3_L-to-H_P Parameter: Treatment Value: 15mM NH4NO3 vs. 30mM Mannitol
  misc_feature: MA Experiment ID: 20000794 Result: Up-regulated in Transcription
  misc_feature: MA Experiment 20000794 PARAMETER Experiment Name: At_Petals_P Parameter: Age (day) Value: 23-25 days
  misc_feature: MA Experiment 20000794 PARAMETER Experiment Name: At_Petals_P Parameter: Plant Line Value: WS
  misc_feature: MA Experiment 20000794 PARAMETER Experiment Name: At_Petals_P Parameter: Tissue Value: Petals vs. Whole plant
  misc_feature: MA Experiment ID: 20001768 Result: Up-regulated in Transcription
  misc_feature: MA Experiment 20001768 PARAMETER Experiment Name: At_Far-red-enriched-adult_P Parameter: Age (day) Value: 28
  misc_feature: MA Experiment 20001768 PARAMETER Experiment Name: At_Far-red-enriched-adult_P Parameter: Light Value: Far-red enriched vs. White
  misc_feature: MA Experiment 20001768 PARAMETER Experiment Name: At_Far-red-enriched-adult_P Parameter: Organism Value: A. thaliana
  misc_feature: MA Experiment 20001768 PARAMETER Experiment Name: At_Far-red-enriched-adult_P Parameter: Plant Line Value: Columbia
  misc_feature: MA Experiment 20001768 PARAMETER Experiment Name: At_Far-red-enriched-adult_P Parameter: Timepoint (hr) Value: 1
  misc_feature: MA Experiment 20001768 PARAMETER Experiment Name: At_Far-red-enriched-adult_P Parameter: Tissue Value: Aerial
  misc_feature: MA Experiment ID: 20001773 Result: Down-regulated in Transcription
  misc_feature: MA Experiment 20001773 PARAMETER Experiment Name: At_Far-red-enriched-adult_P Parameter: Age (day) Value: 30
  misc_feature: MA Experiment 20001773 PARAMETER Experiment Name: At_Far-red-enriched-adult_P Parameter: Light Value: Far-red enriched vs. White
  misc_feature: MA Experiment 20001773 PARAMETER Experiment Name: At_Far-red-enriched-adult_P Parameter: Organism Value: A. thaliana
  misc_feature: MA Experiment 20001773 PARAMETER Experiment Name: At_Far-red-enriched-adult_P Parameter: Plant Line Value: Columbia
  misc_feature: MA Experiment 20001773 PARAMETER Experiment Name: At_Far-red-enriched-adult_P Parameter: Timepoint (hr) Value: 48
  misc_feature: MA Experiment 20001773 PARAMETER Experiment Name: At_Far-red-enriched-adult_P Parameter: Tissue Value: Aerial
  misc_feature: MA Experiment ID: 20001774 Result: Up-regulated in Transcription
  misc_feature: MA Experiment 20001774 PARAMETER Experiment Name: At_Far-red-enriched-adult_P Parameter: Age (day) Value: 31
  misc_feature: MA Experiment 20001774 PARAMETER Experiment Name: At_Far-red-enriched-adult_P Parameter: Light Value: Far-red enriched vs. White
  misc_feature: MA Experiment 20001774 PARAMETER Experiment Name: At_Far-red-enriched-adult_P Parameter: Organism Value: A. thaliana
  misc_feature: MA Experiment 20001774 PARAMETER Experiment Name: At_Far-red-enriched-adult_P Parameter: Plant Line Value: Columbia
  misc_feature: MA Experiment 20001774 PARAMETER Experiment Name: At_Far-red-enriched-adult_P Parameter: Timepoint (hr) Value: 72
  misc_feature: MA Experiment 20001774 PARAMETER Experiment Name: At_Far-red-enriched-adult_P Parameter: Tissue Value: Aerial
  misc_feature: MA Experiment ID: 20001904 Result: Up-regulated in Transcription
  misc_feature: MA Experiment 20001904 PARAMETER Experiment Name: At_Drought_Reproduction_P Parameter: Age (day) Value: 37
  misc_feature: MA Experiment 20001904 PARAMETER Experiment Name: At_Drought_Reproduction_P Parameter: Organism Value: A. thaliana
  misc_feature: MA Experiment 20001904 PARAMETER Experiment Name: At_Drought_Reproduction_P Parameter: Plant Line Value: WS
  misc_feature: MA Experiment 20001904 PARAMETER Experiment Name: At_Drought_Reproduction_P Parameter: Timepoint (day) Value: 7
  misc_feature: MA Experiment 20001904 PARAMETER Experiment Name: At_Drought_Reproduction_P Parameter: Tissue Value: Rosettes
  misc_feature: MA Experiment 20001904 PARAMETER Experiment Name: At_Drought_Reproduction_P Parameter: Treatment Value: Drought vs. No Drought
  misc_feature: MA Experiment ID: 20001905 Result: Up-regulated in Transcription
  misc_feature: MA Experiment 20001905 PARAMETER Experiment Name: At_Drought_Reproduction_P Parameter: Age (day) Value: 40
  misc_feature: MA Experiment 20001905 PARAMETER Experiment Name: At_Drought_Reproduction_P Parameter: Organism Value: A. thaliana
  misc_feature: MA Experiment 20001905 PARAMETER Experiment Name: At_Drought_Reproduction_P Parameter: Plant Line Value: WS
  misc_feature: MA Experiment 20001905 PARAMETER Experiment Name: At_Drought_Reproduction_P Parameter: Timepoint (day) Value: 10
  misc_feature: MA Experiment 20001905 PARAMETER Experiment Name: At_Drought_Reproduction_P Parameter: Tissue Value: Rosettes
  misc_feature: MA Experiment 20001905 PARAMETER Experiment Name: At_Drought_Reproduction_P Parameter: Treatment Value: Drought vs. No Drought
  misc_feature: MA Experiment ID: 20001906 Result: Up-regulated in Transcription
  misc_feature: MA Experiment 20001906 PARAMETER Experiment Name: At_Drought_Reproduction_P Parameter: Age (day) Value: 35
  misc_feature: MA Experiment 20001906 PARAMETER Experiment Name: At_Drought_Reproduction_P Parameter: Organism Value: A. thaliana
  misc_feature: MA Experiment 20001906 PARAMETER Experiment Name: At_Drought_Reproduction_P Parameter: Plant Line Value: WS
  misc_feature: MA Experiment 20001906 PARAMETER Experiment Name: At_Drought_Reproduction_P Parameter: Timepoint (day) Value: 5
  misc_feature: MA Experiment 20001906 PARAMETER Experiment Name: At_Drought_Reproduction_P Parameter: Tissue Value: Siliques
  misc_feature: MA Experiment 20001906 PARAMETER Experiment Name: At_Drought_Reproduction_P Parameter: Treatment Value: Drought vs. No Drought
  misc_feature: MA Experiment ID: 20001908 Result: Up-regulated in Transcription
  misc_feature: MA Experiment 20001908 PARAMETER Experiment Name: At_Drought_Reproduction_P Parameter: Age (day) Value: 40
  misc_feature: MA Experiment 20001908 PARAMETER Experiment Name: At_Drought_Reproduction_P Parameter: Organism Value: A. thaliana
  misc_feature: MA Experiment 20001908 PARAMETER Experiment Name: At_Drought_Reproduction_P Parameter: Plant Line Value: WS
  misc_feature: MA Experiment 20001908 PARAMETER Experiment Name: At_Drought_Reproduction_P Parameter: Timepoint (day) Value: 10
  misc_feature: MA Experiment 20001908 PARAMETER Experiment Name: At_Drought_Reproduction_P Parameter: Tissue Value: Siliques
  misc_feature: MA Experiment 20001908 PARAMETER Experiment Name: At_Drought_Reproduction_P Parameter: Treatment Value: Drought vs. No Drought
  misc_feature: Phenotype: ROSETTE LEAVES Disorganized Rosette-Disorganized Rosette
  misc_feature: Phenotype: ROSETTE LEAVES Shape-Lanceolate
  misc_feature: Phenotype: ROSETTE LEAVES Curled-Curled 3
  misc_feature: Phenotype: WHOLE PLANT Size-Small
  misc_feature: Phenotype: CAULINE LEAVES Curled-Curled 3
  misc_feature: Phenotype: FLOWERS Other
  misc_feature: Phenotype: INFLORESCENCE Branching-No Branching
  misc_feature: Phenotype: INFLORESCENCE Internode Length-Short Internode
  misc_feature: Phenotype: ROSETTE LEAVES Disorganized Rosette-Disorganized Rosette
  misc_feature: Phenotype: ROSETTE LEAVES Shape-Lanceolate
aattttgaattgagcgaggtttcaaagttcaaaactatcacaactagtcttgatcaattctatataagatctgtgatcttggttgaagaaaagaatcgtcgtaggttgatatttaacaaggaatggcaaaggaagggggcttgggagagaactcaagatggagtcttggaggcatgaccgctcttgtcactggtggctctaaaggcatcggggaagctgtggtggaggaactagccatgttgggagcaaaagtccacacgtgtgccagagacgaaactcagcttcaagaacgcttacgtgaatggcaagcaaaagggtttcaggtcaccacttctgtctgcgacgtctcttctcgtgaccaacgagtgaaactcatggaaactgtttcctctctctaccaaggaaaactcaacatcctcgtcaacaatgtgggaacgtcaatattcaagccgaccacagagtatacagcagaagatttctcttttgtaatggctacaaatctcgagtcagctttccatctctcacagcttgcccacccattgttaaaagcctctggctcagggagcatcgtgctcatatcctctgctgctggagtcgtgcatgtcaatgttggatccatctatggagcaaccaaaggagccatgaatcagctggctagaaacttagcttgcgaatgggcgagcgacaacataaggacgaactctgtttgtccttggtatatcacaactcctttaagtaacgattttttcgatgaagagtttaagaaagaagcggtgcgtacgacaccaatggggcgtgttggagaagcaaatgaagtctcaccgcttgtggcatttctttgtcttccttcagcttcttatattactggtcagaccatttgcgttgacggcggtgccactgttaacggtttttccttcaagactatgccataaaacacatatgcatgtgtttggatcatattttcaataatttaaacttacgggttatatacatcgtcaatatgtaataaatgtaatttagatgtgtccacatgttctgtttctaagagattcttagatatttatgcttgcgtggtgaacaagagttcactctccggatggaccgcatccataatctatgaatttgggaattatattaccaatttgacggc

SEQ ID NO: 29594 - protein, 269 aa, Arabidopsis thaliana
  peptide (1)..(269): Ceres Seq. ID no. 12439664
  misc_feature (6)..(266): Homolog of NCBI NO: 15222399 NR Description: tropinone reductase-I, putative
  misc_feature (1)..(264): Homolog of NCBI NO: 25283134 NR Description: probable tropinone reductase [imported] -
  misc_feature (1)..(266): Homolog of NCBI NO: 15227040 NR Description: putative tropinone reductase; protein id:
  misc_feature (1)..(269): Homolog of NCBI NO: 21554716 NR Description: putative tropinone reductase [Arabidopsis
  misc_feature (1)..(269): Homolog of NCBI NO: 15227076 NR Description: putative tropinone reductase
  misc_feature (1)..(266): Homolog of NCBI NO: 15227043 NR Description: putative tropinone reductase; protein id:
  misc_feature (10)..(266): Homolog of NCBI NO: 15227069 NR Description: putative tropinone reductase; protein id:
  misc_feature (1)..(100): Homolog of NCBI NO: 6457349 NR Description: short chain alcohol dehydrogenase [Arabidopsis
  misc_feature (104)..(269): Homolog of NCBI NO: 6457349 NR Description: short chain alcohol dehydrogenase [Arabidopsis
  misc_feature (1)..(269): Homolog of NCBI NO: 15227075 NR Description: putative tropinone reductase
MAKEGGLGENSRWSLGGMTALVTGGSKGIGEAVVEELAMLGAKVHTCARDETQLQERLREWQAKGFQVTTSVCDVSSRDQRVKLMETVSSLYQGKLNILVNNVGTSIFKPTTEYTAEDFSFVMATNLESAFHLSQLAHPLLKASGSGSIVLISSAAGVVHVNVGSIYGATKGAMNQLARNLACEWASDNIRTNSVCPWYITTPLSNDFFDEEFKKEAVRTTPMGRVGEANEVSPLVAFLCLPSASYITGQTICVDGGATVNGFSFKTMP

SEQ ID NO: 29595 - protein, 252 aa, Arabidopsis thaliana
  peptide (1)..(252): Ceres Seq. ID no. 12439665
  misc_feature (1)..(249): Homolog of NCBI NO: 15222399 NR Description: tropinone reductase-I, putative
  misc_feature (1)..(247): Homolog of NCBI NO: 25283134 NR Description: probable tropinone reductase [imported] -
  misc_feature (1)..(249): Homolog of NCBI NO: 15227040 NR Description: putative tropinone reductase; protein id:
  misc_feature (1)..(252): Homolog of NCBI NO: 21554716 NR Description: putative tropinone reductase [Arabidopsis
  misc_feature (1)..(252): Homolog of NCBI NO: 15227076 NR Description: putative tropinone reductase
  misc_feature (1)..(249): Homolog of NCBI NO: 15227043 NR Description: putative tropinone reductase; protein id:
  misc_feature (1)..(249): Homolog of NCBI NO: 15227069 NR Description: putative tropinone reductase; protein id:
  misc_feature (1)..(83): Homolog of NCBI NO: 6457349 NR Description: short chain alcohol dehydrogenase [Arabidopsis
  misc_feature (87)..(252): Homolog of NCBI NO: 6457349 NR Description: short chain alcohol dehydrogenase [Arabidopsis
  misc_feature (1)..(252): Homolog of NCBI NO: 15227075 NR Description: putative tropinone reductase
MTALVTGGSKGIGEAVVEELAMLGAKVHTCARDETQLQERLREWQAKGFQVTTSVCDVSSRDQRVKLMETVSSLYQGKLNILVNNVGTSIFKPTTEYTAEDFSFVMATNLESAFHLSQLAHPLLKASGSGSIVLISSAAGVVHVNVGSIYGATKGAMNQLARNLACEWASDNIRTNSVCPWYITTPLSNDFFDEEFKKEAVRTTPMGRVGEANEVSPLVAFLCLPSASYITGQTICVDGGATVNGFSFKTMP

SEQ ID NO: 29596 - protein, 231 aa, Arabidopsis thaliana
  peptide (1)..(231): Ceres Seq. ID no. 12439666
  misc_feature (1)..(228): Homolog of NCBI NO: 15222399 NR Description: tropinone reductase-I, putative
  misc_feature (1)..(226): Homolog of NCBI NO: 25283134 NR Description: probable tropinone reductase [imported] -
  misc_feature (1)..(228): Homolog of NCBI NO: 15227040 NR Description: putative tropinone reductase; protein id:
  misc_feature (1)..(231): Homolog of NCBI NO: 21554716 NR Description: putative tropinone reductase [Arabidopsis
  misc_feature (1)..(231): Homolog of NCBI NO: 15227076 NR Description: putative tropinone reductase
  misc_feature (1)..(228): Homolog of NCBI NO: 15227043 NR Description: putative tropinone reductase; protein id:
  misc_feature (1)..(228): Homolog of NCBI NO: 15227069 NR Description: putative tropinone reductase; protein id:
  misc_feature (1)..(62): Homolog of NCBI NO: 6457349 NR Description: short chain alcohol dehydrogenase [Arabidopsis
  misc_feature (66)..(231): Homolog of NCBI NO: 6457349 NR Description: short chain alcohol dehydrogenase [Arabidopsis
  misc_feature (1)..(231): Homolog of NCBI NO: 15227075 NR Description: putative tropinone reductase
MLGAKVHTCARDETQLQERLREWQAKGFQVTTSVCDVSSRDQRVKLMETVSSLYQGKLNILVNNVGTSIFKPTTEYTAEDFSFVMATNLESAFHLSQLAHPLLKASGSGSIVLISSAAGVVHVNVGSIYGATKGAMNQLARNLACEWASDNIRTNSVCPWYITTPLSNDFFDEEFKKEAVRTTPMGRVGEANEVSPLVAFLCLPSASYITGQTICVDGGATVNGFSFKTMP

SEQ ID NO: 29597 - DNA, 1528 bp, Arabidopsis thaliana
  misc_feature (1)..(1528): Ceres Seq. ID no. 13490257
  misc_feature: MA Experiment ID: 108577 Result: Up-regulated in Transcription
  misc_feature: MA Experiment 108577 PARAMETER Experiment Name: At_42deg_Heat_cDNA_P Parameter: Temperature (deg C) Value: 42 vs. 22
  misc_feature: MA Experiment 108577 PARAMETER Experiment Name: At_42deg_Heat_cDNA_P Parameter: Timepoint (hr) Value: 6
  misc_feature: MA Experiment 108577 PARAMETER Experiment Name: At_42deg_Heat_cDNA_P Parameter: Tissue Value: Aerial
  misc_feature: MA Experiment ID: 108595 Result: Down-regulated in Transcription
  misc_feature: MA Experiment 108595 PARAMETER Experiment Name: At_Ler-pi_Ovule_cDNA_P Parameter: Plant Line Value: null
  misc_feature: MA Experiment ID: 20000087 Result: Down-regulated in Transcription
  misc_feature: MA Experiment 20000087 PARAMETER Experiment Name: At_100uM_ABA_Mutants_cDNA_P Parameter: Plant Line Value: WS
  misc_feature: MA Experiment 20000087 PARAMETER Experiment Name: At_100uM_ABA_Mutants_cDNA_P Parameter: Timepoint (hr) Value: 6
  misc_feature: MA Experiment 20000087 PARAMETER Experiment Name: At_100uM_ABA_Mutants_cDNA_P Parameter: Tissue Value: Aerial
  misc_feature: MA Experiment 20000087 PARAMETER Experiment Name: At_100uM_ABA_Mutants_cDNA_P Parameter: Treatment Value: 100uM ABA vs. No Treatment
  misc_feature: MA Experiment ID: 20000111 Result: Up-regulated in Transcription
  misc_feature: MA Experiment 20000111 PARAMETER Experiment Name: At_42deg_Heat_cDNA_P Parameter: Temperature (deg C) Value: 42 vs. 22
  misc_feature: MA Experiment 20000111 PARAMETER Experiment Name: At_42deg_Heat_cDNA_P Parameter: Timepoint (hr) Value: 6
  misc_feature: MA Experiment 20000111 PARAMETER Experiment Name: At_42deg_Heat_cDNA_P Parameter: Tissue Value: Aerial
  misc_feature: MA Experiment ID: 20000112 Result: Up-regulated in Transcription
  misc_feature: MA Experiment 20000112 PARAMETER Experiment Name: At_42deg_Heat_cDNA_P Parameter: Temperature (deg C) Value: 42 vs. 22
  misc_feature: MA Experiment 20000112 PARAMETER Experiment Name: At_42deg_Heat_cDNA_P Parameter: Timepoint (hr) Value: 2
  misc_feature: MA Experiment 20000112 PARAMETER Experiment Name: At_42deg_Heat_cDNA_P Parameter: Tissue Value: Aerial
  misc_feature: MA Experiment ID: 20000113 Result: Up-regulated in Transcription
  misc_feature: MA Experiment 20000113 PARAMETER Experiment Name: At_42deg_Heat_cDNA_P Parameter: Temperature (deg C) Value: 42 vs. 22
  misc_feature: MA Experiment 20000113 PARAMETER Experiment Name: At_42deg_Heat_cDNA_P Parameter: Timepoint (hr) Value: 8
  misc_feature: MA Experiment 20000113 PARAMETER Experiment Name: At_42deg_Heat_cDNA_P Parameter: Tissue Value: Aerial
  misc_feature: MA Experiment ID: 20000173 Result: Up-regulated in Transcription
  misc_feature: MA Experiment 20000173 PARAMETER Experiment Name: At_42deg_Heat_P Parameter: Age (day) Value: 14
  misc_feature: MA Experiment 20000173 PARAMETER Experiment Name: At_42deg_Heat_P Parameter: Organism Value: A. thaliana
  misc_feature: MA Experiment 20000173 PARAMETER Experiment Name: At_42deg_Heat_P Parameter: Plant Line Value: WS
  misc_feature: MA Experiment 20000173 PARAMETER Experiment Name: At_42deg_Heat_P Parameter: Temperature (deg C) Value: 42 vs. 22
  misc_feature: MA Experiment 20000173 PARAMETER Experiment Name: At_42deg_Heat_P Parameter: Timepoint (hr) Value: 6
  misc_feature: MA Experiment 20000173 PARAMETER Experiment Name: At_42deg_Heat_P Parameter: Tissue Value: Aerial
  misc_feature: MA Experiment ID: 20000179 Result: Down-regulated in Transcription
  misc_feature: MA Experiment 20000179 PARAMETER Experiment Name: At_Germinating_Seeds_P Parameter: Age (hr) Value: 6 vs. 0
  misc_feature: MA Experiment 20000179 PARAMETER Experiment Name: At_Germinating_Seeds_P Parameter: Tissue Value: Germinating Seeds
  misc_feature: MA Experiment ID: 20000185 Result: Down-regulated in Transcription
  misc_feature: MA Experiment 20000185 PARAMETER Experiment Name: At_Roots__P Parameter: Age (day) Value: 7 vs. 21
  misc_feature: MA Experiment 20000185 PARAMETER Experiment Name: At_Roots__P Parameter: Organism Value: A. thaliana
  misc_feature: MA Experiment 20000185 PARAMETER Experiment Name: At_Roots__P Parameter: Tissue Value: Roots vs. Whole Plant
  misc_feature: MA Experiment ID: 20000439 Result: Down-regulated in Transcription
  misc_feature: MA Experiment 20000439 PARAMETER Experiment Name: At_Roots__P Parameter: Age (day) Value: 14 vs. 21
  misc_feature: MA Experiment 20000439 PARAMETER Experiment Name: At_Roots__P Parameter: Organism Value: A. thaliana
  misc_feature: MA Experiment 20000439 PARAMETER Experiment Name: At_Roots__P Parameter: Tissue Value: Roots vs. Whole Plant
atttatcgacatcatcttctcctacattctaggtttcttcttcatttctcctttctctggccaaagttccgactttttgcttctcccagaggctaatcatggacgctgtggcggcgaatttgtttcaatctccttccttactgcgtcaaacttccgaaaggttgatattttcgacgcccaactgtcctggcttcatgcgaattagctccggacctcaatttcgtctcagacaaaactcttctcttaaattctcgagaccatttcaaagcggaacaacttgtgttaaatctcggagaagctttgtggttaaagcttcagcttctggtgatgcttcaacagaatcaatcgcgccgcttcagttgaagtctcctgtgggacagtttctgtcacagatattagtgagccatcctcatcttgttccagcagctgttgaacagcagcttgaacagctccaaattgatcgagacgctgaagaacagagtaaagatgcatcctctgtccttggaacagacattgttctctacaggagaattgctgaagttaaggagaaagagagaagaagggccttggaagagattttgtatgcgttagtggttcagaagttcatggatgctaatgttacacttgtaccatccataacctcttcatctgcggatccatctggtcgagttgatacttggccaactctagatggggaacttgagagacttcactcgcctgaagtttatgagatgattcagaatcatctttccatcattcttaaaaaccgcactgatgatctgacagcagttgcgcagataagcaaacttggagttggacaggtatatgctgcttcggtgatgtatgggtatttcctgaagaggatcgatcaaaggtttcagcttgagaagacgatgaggattctcccaggtgggtcagatgaaggtgagactagcattgagcaagcaggccgagatgtagagagaaacttctatgaagaagcagaagagacttatcaggctgtttcctcaaaccaagacgttggttcgtttgtaggagggatcaatgccagtggcggttttagcagtgatatgaagcaatcccggttaaagacatacgttatgtcctttgatggagaaacccttcaaaggtacgctacaataagatctagagaatcggttgggataattgagaagcatacagaagcattgtttgggaggccagagattgtgataacgccacaaggcactattgattcctcgaaggacgagcatatcaagatcagcttcaagggattgaagaggcttgtgttggaggctgtgacgtttggttctttcctctgggacgtggagagccatgtagactcaaggtatcacttcgtactgaactgaaatggcctctgtggtttatgaggatgtgccacattctttgagagggtttggggatttgttgtttgtaatatatgcgactgtgaactgaccaactaatatcaatacccattttatggtaatactacattcgcgatcagtttgtgttattcttctcgttt

SEQ ID NO: 29598 - protein, 423 aa, Arabidopsis thaliana
  peptide (1)..(423): Ceres Seq. ID no. 13490258
  misc_feature (11)..(423): Pfam Name: Protein of unknown function (DUF760) Pfam Description: Protein of unknown function (DUF760)
  misc_feature (314)..(423): Homolog of NCBI NO: 18397912 NR Description: expressed protein [Arabidopsis thaliana]
  misc_feature (63)..(271): Homolog of NCBI NO: 18397912 NR Description: expressed protein [Arabidopsis thaliana]
  misc_feature (3)..(270): Homolog of NCBI NO: 32489097 NR Description: OSJNBa0093F12.3 [Oryza sativa (japonica
  misc_feature (116)..(421): Homolog of NCBI NO: 32489097 NR Description: OSJNBa0093F12.3 [Oryza sativa (japonica
  misc_feature (32)..(421): Homolog of NCBI NO: 18398302 NR Description: expressed protein [Arabidopsis thaliana]
  misc_feature (157)..(423): Homolog of NCBI NO: 13561930 NR Description: unknown [Brassica napus]
  misc_feature (3)..(423): Homolog of NCBI NO: 28301943 NR Description: unknown protein [Oryza sativa (japonica
  misc_feature (1)..(423): Homolog of NCBI NO: 17064820 NR Description: Unknown protein [Arabidopsis thaliana]
  misc_feature (1)..(423): Homolog of NCBI NO: 18401645 NR Description: expressed protein [Arabidopsis thaliana]
  misc_feature (1)..(423): Homolog of NCBI NO: 15221185 NR Description: expressed protein [Arabidopsis thaliana]
MDAVAANLFQSPSLLRQTSERLIFSTPNCPGFMRISSGPQFRLRQNSSLKFSRPFQSGTTCVKSRRSFVVKASASGDASTESIAPLQLKSPVGQFLSQILVSHPHLVPAAVEQQLEQLQIDRDAEEQSKDASSVLGTDIVLYRRIAEVKEKERRRALEEILYALVVQKFMDANVTLVPSITSSSADPSGRVDTWPTLDGELERLHSPEVYEMIQNHLSIILKNRTDDLTAVAQISKLGVGQVYAASVMYGYFLKRIDQRFQLEKTMRILPGGSDEGETSIEQAGRDVERNFYEEAEETYQAVSSNQDVGSFVGGINASGGFSSDMKQSRLKTYVMSFDGETLQRYATIRSRESVGIIEKHTEALFGRPEIVITPQGTIDSSKDEHIKISFKGLKRLVLEAVTFGSFLWDVESHVDSRYHFVLN

SEQ ID NO: 29599 - protein, 391 aa, Arabidopsis thaliana
  peptide (1)..(391): Ceres Seq. ID no. 13490259
  misc_feature (1)..(391): Pfam Name: Protein of unknown function (DUF760) Pfam Description: Protein of unknown function (DUF760)
  misc_feature (282)..(391): Homolog of NCBI NO: 18397912 NR Description: expressed protein [Arabidopsis thaliana]
  misc_feature (31)..(239): Homolog of NCBI NO: 18397912 NR Description: expressed protein [Arabidopsis thaliana]
  misc_feature (1)..(238): Homolog of NCBI NO: 32489097 NR Description: OSJNBa0093F12.3 [Oryza sativa (japonica
  misc_feature (84)..(389): Homolog of NCBI NO: 32489097 NR Description: OSJNBa0093F12.3 [Oryza sativa (japonica
  misc_feature (1)..(389): Homolog of NCBI NO: 18398302 NR Description: expressed protein [Arabidopsis thaliana]
  misc_feature (125)..(391): Homolog of NCBI NO: 13561930 NR Description: unknown [Brassica napus]
  misc_feature (1)..(391): Homolog of NCBI NO: 28301943 NR Description: unknown protein [Oryza sativa (japonica
  misc_feature (1)..(391): Homolog of NCBI NO: 17064820 NR Description: Unknown protein [Arabidopsis thaliana]
  misc_feature (1)..(391): Homolog of NCBI NO: 18401645 NR Description: expressed protein [Arabidopsis thaliana]
  misc_feature (1)..(391): Homolog of NCBI NO: 15221185 NR Description: expressed protein [Arabidopsis thaliana]
MRISSGPQFRLRQNSSLKFSRPFQSGTTCVKSRRSFVVKASASGDASTESIAPLQLKSPVGQFLSQILVSHPHLVPAAVEQQLEQLQIDRDAEEQSKDASSVLGTDIVLYRRIAEVKEKERRRALEEILYALVVQKFMDANVTLVPSITSSSADPSGRVDTWPTLDGELERLHSPEVYEMIQNHLSIILKNRTDDLTAVAQISKLGVGQVYAASVMYGYFLKRIDQRFQLEKTMRILPGGSDEGETSIEQAGRDVERNFYEEAEETYQAVSSNQDVGSFVGGINASGGFSSDMKQSRLKTYVMSFDGETLQRYATIRSRESVGIIEKHTEALFGRPEIVITPQGTIDSSKDEHIKISFKGLKRLVLEAVTFGSFLWDVESHVDSRYHFVLN

SEQ ID NO: 29600 - protein, 254 aa, Arabidopsis thaliana
  peptide (1)..(254): Ceres Seq. ID no. 13490260
  misc_feature (1)..(254): Pfam Name: Protein of unknown function (DUF760) Pfam Description: Protein of unknown function (DUF760)
  misc_feature (145)..(254): Homolog of NCBI NO: 18397912 NR Description: expressed protein [Arabidopsis thaliana]
  misc_feature (1)..(102): Homolog of NCBI NO: 18397912 NR Description: expressed protein [Arabidopsis thaliana]
  misc_feature (1)..(101): Homolog of NCBI NO: 32489097 NR Description: OSJNBa0093F12.3 [Oryza sativa (japonica
  misc_feature (1)..(252): Homolog of NCBI NO: 32489097 NR Description: OSJNBa0093F12.3 [Oryza sativa (japonica
  misc_feature (1)..(252): Homolog of NCBI NO: 18398302 NR Description: expressed protein [Arabidopsis thaliana]
  misc_feature (1)..(254): Homolog of NCBI NO: 13561930 NR Description: unknown [Brassica napus]
  misc_feature (1)..(254): Homolog of NCBI NO: 28301943 NR Description: unknown protein [Oryza sativa (japonica
  misc_feature (1)..(254): Homolog of NCBI NO: 17064820 NR Description: Unknown protein [Arabidopsis thaliana]
  misc_feature (1)..(254): Homolog of NCBI NO: 18401645 NR Description: expressed protein [Arabidopsis thaliana]
  misc_feature (1)..(254): Homolog of NCBI NO: 15221185 NR Description: expressed protein [Arabidopsis thaliana]
MDANVTLVPSITSSSADPSGRVDTWPTLDGELERLHSPEVYEMIQNHLSIILKNRTDDLTAVAQISKLGVGQVYAASVMYGYFLKRIDQRFQLEKTMRILPGGSDEGETSIEQAGRDVERNFYEEAEETYQAVSSNQDVGSFVGGINASGGFSSDMKQSRLKTYVMSFDGETLQRYATIRSRESVGIIEKHTEALFGRPEIVITPQGTIDSSKDEHIKISFKGLKRLVLEAVTFGSFLWDVESHVDSRYHFVLN

SEQ ID NO: 29601 - DNA, 1355 bp, Arabidopsis thaliana
  misc_feature (1)..(1355): Ceres Seq. ID no. 13489420
  misc_feature: MA Experiment ID: 108434 Result: Down-regulated in Transcription
  misc_feature: MA Experiment 108434 PARAMETER Experiment Name: At_Root_Tips_cDNA_P Parameter: Tissue Value: Root Tips
  misc_feature: MA Experiment ID: 108469 Result: Up-regulated in Transcription
  misc_feature: MA Experiment ID: 108585 Result: Up-regulated in Transcription
  misc_feature: MA Experiment 108585 PARAMETER Experiment Name: At_5mM_NaNP_cDNA_P Parameter: Timepoint (hr) Value: 6
  misc_feature: MA Experiment 108585 PARAMETER Experiment Name: At_5mM_NaNP_cDNA_P Parameter: Tissue Value: Aerial
  misc_feature: MA Experiment 108585 PARAMETER Experiment Name: At_5mM_NaNP_cDNA_P Parameter: Treatment Value: null
  misc_feature: MA Experiment ID: 108668 Result: Up-regulated in Transcription
  misc_feature: MA Experiment 108668 PARAMETER Experiment Name: At_2mM_SA_cDNA_P Parameter: Plant Line Value: WS
  misc_feature: MA Experiment 108668 PARAMETER Experiment Name: At_2mM_SA_cDNA_P Parameter: Timepoint (hr) Value: 6
  misc_feature: MA Experiment 108668 PARAMETER Experiment Name: At_2mM_SA_cDNA_P Parameter: Treatment Value: 2mM SA vs. No Treatment
  misc_feature: MA Experiment ID: 20000182 Result: Up-regulated in Transcription
  misc_feature: MA Experiment 20000182 PARAMETER Experiment Name: At_2mM_SA_P Parameter: Age (day) Value: 14
  misc_feature: MA Experiment 20000182 PARAMETER Experiment Name: At_2mM_SA_P Parameter: Organism Value: A. thaliana
  misc_feature: MA Experiment 20000182 PARAMETER Experiment Name: At_2mM_SA_P Parameter: Plant Line Value: WS
  misc_feature: MA Experiment 20000182 PARAMETER Experiment Name: At_2mM_SA_P Parameter: Timepoint (hr) Value: 6
  misc_feature: MA Experiment 20000182 PARAMETER Experiment Name: At_2mM_SA_P Parameter: Tissue Value: Aerial
  misc_feature: MA Experiment 20000182 PARAMETER Experiment Name: At_2mM_SA_P Parameter: Treatment Value: 2mM SA vs. No Treatment
  misc_feature: MA Experiment ID: 20000184 Result: Down-regulated in Transcription
  misc_feature: MA Experiment 20000184 PARAMETER Experiment Name: At_Shoots__P Parameter: Age (day) Value: 7
  misc_feature: MA Experiment 20000184 PARAMETER Experiment Name: At_Shoots__P Parameter: Tissue Value: Shoots vs. Whole Plant
  misc_feature: MA Experiment ID: 20000234 Result: Down-regulated in Transcription
  misc_feature: MA Experiment 20000234 PARAMETER Experiment Name: At_Siliques_P Parameter: Age (day) Value: 21
  misc_feature: MA Experiment 20000234 PARAMETER Experiment Name: At_Siliques_P Parameter: Organism Value: A. thaliana
  misc_feature: MA Experiment 20000234 PARAMETER Experiment Name: At_Siliques_P Parameter: Plant Line Value: WS
  misc_feature: MA Experiment 20000234 PARAMETER Experiment Name: At_Siliques_P Parameter: Tissue Value: Less Than 5mm Siliques vs. Whole Plant
  misc_feature: MA Experiment ID: 20000264 Result: Down-regulated in Transcription
  misc_feature: MA Experiment 20000264 PARAMETER Experiment Name: At_Open_Flower_P Parameter: Age (day) Value: 21
  misc_feature: MA Experiment 20000264 PARAMETER Experiment Name: At_Open_Flower_P Parameter: Plant Line Value: WS
  misc_feature: MA Experiment 20000264 PARAMETER Experiment Name: At_Open_Flower_P Parameter: Tissue Value: Open Flower vs. Whole Plant
  misc_feature: MA Experiment ID: 20000265 Result: Down-regulated in Transcription
  misc_feature: MA Experiment 20000265 PARAMETER Experiment Name: At_Open_Flower_P Parameter: Age (day) Value: 21
  misc_feature: MA Experiment 20000265 PARAMETER Experiment Name: At_Open_Flower_P Parameter: Plant Line Value: WS
  misc_feature: MA Experiment 20000265 PARAMETER Experiment Name: At_Open_Flower_P Parameter: Tissue Value: Closed Flower vs. Whole Plant
  misc_feature: MA Experiment ID: 20000286 Result: Down-regulated in Transcription
  misc_feature: MA Experiment 20000286 PARAMETER Experiment Name: At_Open_Flower_P Parameter: Age (day) Value: 21
  misc_feature: MA Experiment 20000286 PARAMETER Experiment Name: At_Open_Flower_P Parameter: Plant Line Value: WS
  misc_feature: MA Experiment 20000286 PARAMETER Experiment Name: At_Open_Flower_P Parameter: Tissue Value: Half Open vs. Whole Plant
  misc_feature: MA Experiment ID: 20000438 Result: Down-regulated in Transcription
  misc_feature: MA Experiment 20000438 PARAMETER Experiment Name: At_Shoots__P Parameter: Age (day) Value: 14
  misc_feature: MA Experiment 20000438 PARAMETER Experiment Name: At_Shoots__P Parameter: Tissue Value: Shoots vs. Whole Plant
  misc_feature: MA Experiment ID: 20001247 Result: Up-regulated in Transcription
  misc_feature: MA Experiment 20001247 PARAMETER Experiment Name: At_Far-red-induction_P Parameter: Age (day) Value: 7
  misc_feature: MA Experiment 20001247 PARAMETER Experiment Name: At_Far-red-induction_P Parameter: Light Value: Far-red vs. White
  misc_feature: MA Experiment 20001247 PARAMETER Experiment Name: At_Far-red-induction_P Parameter: Organism Value: A. thaliana
  misc_feature: MA Experiment 20001247 PARAMETER Experiment Name: At_Far-red-induction_P Parameter: Plant Line Value: Columbia
  misc_feature: MA Experiment 20001247 PARAMETER Experiment Name: At_Far-red-induction_P Parameter: Timepoint (hr) Value: 1
  misc_feature: MA Experiment 20001247 PARAMETER Experiment Name: At_Far-red-induction_P Parameter: Tissue Value: Whole Plant
  misc_feature: MA Experiment ID: 20001555 Result: Down-regulated in Transcription
  misc_feature: MA Experiment 20001555 PARAMETER Experiment Name: At_Drought_Soil_Dry_P Parameter: Age (day) Value: 24
  misc_feature: MA Experiment 20001555 PARAMETER Experiment Name: At_Drought_Soil_Dry_P Parameter: Organism Value: A. thaliana
  misc_feature: MA Experiment 20001555 PARAMETER Experiment Name: At_Drought_Soil_Dry_P Parameter: Plant Line Value: WS
  misc_feature: MA Experiment 20001555 PARAMETER Experiment Name: At_Drought_Soil_Dry_P Parameter: Post Timepoint (hr) Value: None
  misc_feature: MA Experiment 20001555 PARAMETER Experiment Name: At_Drought_Soil_Dry_P Parameter: Post-Treatment Value: None
  misc_feature: MA Experiment 20001555 PARAMETER Experiment Name: At_Drought_Soil_Dry_P Parameter: Timepoint (day) Value: 10
  misc_feature: MA Experiment 20001555 PARAMETER Experiment Name: At_Drought_Soil_Dry_P Parameter: Treatment Value: Drought vs. No Drought
  misc_feature: MA Experiment ID: 20001556 Result: Down-regulated in Transcription
  misc_feature: MA Experiment 20001556 PARAMETER Experiment Name: At_Drought_Soil_Dry_P Parameter: Age (day) Value: 26
  misc_feature: MA Experiment 20001556 PARAMETER Experiment Name: At_Drought_Soil_Dry_P Parameter: Organism Value: A. thaliana
  misc_feature: MA Experiment 20001556 PARAMETER Experiment Name: At_Drought_Soil_Dry_P Parameter: Plant Line Value: WS
  misc_feature: MA Experiment 20001556 PARAMETER Experiment Name: At_Drought_Soil_Dry_P Parameter: Post Timepoint (hr) Value: None
  misc_feature: MA Experiment 20001556 PARAMETER Experiment Name: At_Drought_Soil_Dry_P Parameter: Post-Treatment Value: None
  misc_feature: MA Experiment 20001556 PARAMETER Experiment Name: At_Drought_Soil_Dry_P Parameter: Timepoint (day) Value: 12
  misc_feature: MA Experiment 20001556 PARAMETER Experiment Name: At_Drought_Soil_Dry_P Parameter: Treatment Value: Drought vs. No Drought
  misc_feature: MA Experiment ID: 20001560 Result: Down-regulated in Transcription
  misc_feature: MA Experiment 20001560 PARAMETER Experiment Name: At_Drought_Soil_Dry_P Parameter: Age (day) Value: 28
  misc_feature: MA Experiment 20001560 PARAMETER Experiment Name: At_Drought_Soil_Dry_P Parameter: Organism Value: A. thaliana
  misc_feature: MA Experiment 20001560 PARAMETER Experiment Name: At_Drought_Soil_Dry_P Parameter: Plant Line Value: WS
  misc_feature: MA Experiment 20001560 PARAMETER Experiment Name: At_Drought_Soil_Dry_P Parameter: Post Timepoint (hr) Value: None
  misc_feature: MA Experiment 20001560 PARAMETER Experiment Name: At_Drought_Soil_Dry_P Parameter: Post-Treatment Value: None
  misc_feature: MA Experiment 20001560 PARAMETER Experiment Name: At_Drought_Soil_Dry_P Parameter: Timepoint (day) Value: 14
  misc_feature: MA Experiment 20001560 PARAMETER Experiment Name: At_Drought_Soil_Dry_P Parameter: Treatment Value: Drought vs. No Drought
gttgtactctcaaattcttgggtcgttctgagtcgtctccgcgttaaatcttttccctttttgatcctttcttcctttcttcttcttcttcgcattgatttggtcctccttcctcttctattctattcattaagaacctaatcttcatcttctccatcttcttcttcacggactccacttcgctcatccaggaaggtttattagtagtaaccaatccaagtgttccttttgtttgaagcaacaagctttgtgatattatcctgagagacaatgtttggtttaaggaaatcaccggcaaatcttcccaagcataactcagtcgacctcaagtcttccaagccaaatcctttcgattcagatgatgaatctgacaacaaacatacccttaacccttctaagaggactacctctgaaccctctttggctgatatgacaaacccttttggtggtgagagagttcagaaaggagatagtagttcatccaaacagtcattgttttcgaactccaaataccagtacaagaacaatttccgtgattctggtggtattgaaaaccagtcggttcaggagcttgaaggttatgctgtgtacaaggctgaagagactacgaaatctgtacaaggttgtttgaaggtagcagaagatataaggtctgatgctaccagaactttggtcatgttacacgatcagggcgagcaaatcactaggacgcaccataaagccgttgaaatcgaccatgatctcagtcgtggtgagaaacttcttggaagccttggaggcatgttttcaaagacttggaaaccaaagaagactcgtcctataaatggtcccgtcgtaaccagagatgactcaccaacgagaagagttaaccacttagagaaaagggaaaaactgggactgaactcagcacccagaggacaatcaagaacccgagaaccactccccgaatcagctgatgcttatcagagagtggagatggaaaaagctaagcaagacgatgggctttcagacttgagtgatatactcggcgagctaaagaacatggctgttgacatgggaagcgaaatcgagaagcagaacaaaggacttgaccatcttcatgatgatgttgacgaactcaacttcagagtgcaacaatcaaaccaacgtggtcgccgtttgcttggaaagtagatgaacagagggtttatatgttcattacactcattcctcgtttgttttattctctatgaagttgttctttaaaactggaaagattcttatcatgttaaatacattattgctatctgtgtttgtatttgatcttgtgacaaaaaaccaaaaaacttattgatcaaacagaagctaactttggt

SEQ ID NO: 29602 - protein, 300 aa, Arabidopsis thaliana
  peptide (1)..(300): Ceres Seq. ID no. 13489421
  misc_feature (240)..(300): Pfam Name: SNARE domain Pfam Description: SNARE domain
  misc_feature (89)..(299): Homolog of NCBI NO: 548945 NR Description: Synaptosomal-associated protein 25B (SNAP-25B)
  misc_feature (89)..(299): Homolog of NCBI NO: 37589801 NR Description: Unknown (protein for MGC:73101) [Danio rerio]
  misc_feature (91)..(298): Homolog of NCBI NO: 27263173 NR Description: synaptosome-associated protein of 25 kDa
  misc_feature (89)..(299): Homolog of NCBI NO: 6755588 NR Description: synaptosomal-associated protein 25
  misc_feature (89)..(299): Homolog of NCBI NO: 18765733 NR Description: synaptosomal-associated protein 25 isoform SNAP25A
  misc_feature (82)..(300): Homolog of NCBI NO: 15241436 NR Description: SNAP25 - like protein [Arabidopsis thaliana]
  misc_feature (8)..(300): Homolog of NCBI NO: 32308074 NR Description: SNAP-34 [Hordeum vulgare subsp. vulgare]
  misc_feature (53)..(300): Homolog of NCBI NO: 15222976 NR Description: synaptosomal associated protein (SNAP25A)
  misc_feature (1)..(300): Homolog of NCBI NO: 21553460 NR Description: snap25a [Arabidopsis thaliana]
  misc_feature (1)..(300): Homolog of NCBI NO: 15240163 NR Description: syntaxin SNAP33 [Arabidopsis thaliana]
MFGLRKSPANLPKHNSVDLKSSKPNPFDSDDESDNKHTLNPSKRTTSEPSLADMTNPFGGERVQKGDSSSSKQSLFSNSKYQYKNNFRDSGGIENQSVQELEGYAVYKAEETTKSVQGCLKVAEDIRSDATRTLVMLHDQGEQITRTHHKAVEIDHDLSRGEKLLGSLGGMFSKTWKPKKTRPINGPVVTRDDSPTRRVNHLEKREKLGLNSAPRGQSRTREPLPESADAYQRVEMEKAKQDDGLSDLSDILGELKNMAVDMGSEIEKQNKGLDHLHDDVDELNFRVQQSNQRGRRLLGK

SEQ ID NO: 29603 - protein, 247 aa, Arabidopsis thaliana
  peptide (1)..(247): Ceres Seq. ID no. 13489422
  misc_feature (187)..(247): Pfam Name: SNARE domain Pfam Description: SNARE domain
  misc_feature (36)..(246): Homolog of NCBI NO: 548945 NR Description: Synaptosomal-associated protein 25B (SNAP-25B)
  misc_feature (36)..(246): Homolog of NCBI NO: 37589801 NR Description: Unknown (protein for MGC:73101) [Danio rerio]
  misc_feature (38)..(245): Homolog of NCBI NO: 27263173 NR Description: synaptosome-associated protein of 25 kDa
  misc_feature (36)..(246): Homolog of NCBI NO: 6755588 NR Description: synaptosomal-associated protein 25
  misc_feature (36)..(246): Homolog of NCBI NO: 18765733 NR Description: synaptosomal-associated protein 25 isoform SNAP25A
  misc_feature (29)..(247): Homolog of NCBI NO: 15241436 NR Description: SNAP25 - like protein [Arabidopsis thaliana]
  misc_feature (1)..(247): Homolog of NCBI NO: 32308074 NR Description: SNAP-34 [Hordeum vulgare subsp. vulgare]
  misc_feature (1)..(247): Homolog of NCBI NO: 15222976 NR Description: synaptosomal associated protein (SNAP25A)
  misc_feature (1)..(247): Homolog of NCBI NO: 21553460 NR Description: snap25a [Arabidopsis thaliana]
  misc_feature (1)..(247): Homolog of NCBI NO: 15240163 NR Description: syntaxin SNAP33 [Arabidopsis thaliana]
MTNPFGGERVQKGDSSSSKQSLFSNSKYQYKNNFRDSGGIENQSVQELEGYAVYKAEETTKSVQGCLKVAEDIRSDATRTLVMLHDQGEQITRTHHKAVEIDHDLSRGEKLLGSLGGMFSKTWKPKKTRPINGPVVTRDDSPTRRVNHLEKREKLGLNSAPRGQSRTREPLPESADAYQRVEMEKAKQDDGLSDLSDILGELKNMAVDMGSEIEKQNKGLDHLHDDVDELNFRVQQSNQRGRRLLGK

SEQ ID NO: 29604 - protein, 165 aa, Arabidopsis thaliana
  peptide (1)..(165): Ceres Seq. ID no. 13489423
  misc_feature (105)..(165): Pfam Name: SNARE domain Pfam Description: SNARE domain
  misc_feature (1)..(164): Homolog of NCBI NO: 548945 NR Description: Synaptosomal-associated protein 25B (SNAP-25B)
  misc_feature (1)..(164): Homolog of NCBI NO: 37589801 NR Description: Unknown (protein for MGC:73101) [Danio rerio]
  misc_feature (1)..(163): Homolog of NCBI NO: 27263173 NR Description: synaptosome-associated protein of 25 kDa
  misc_feature (1)..(164): Homolog of NCBI NO: 6755588 NR Description: synaptosomal-associated protein 25
  misc_feature (1)..(164): Homolog of NCBI NO: 18765733 NR Description: synaptosomal-associated protein 25 isoform SNAP25A
  misc_feature (1)..(165): Homolog of NCBI NO: 15241436 NR Description: SNAP25 - like protein [Arabidopsis thaliana]
  misc_feature (1)..(165): Homolog of NCBI NO: 32308074 NR Description: SNAP-34 [Hordeum vulgare subsp. vulgare]
  misc_feature (1)..(165): Homolog of NCBI NO: 15222976 NR Description: synaptosomal associated protein (SNAP25A)
  misc_feature (1)..(165): Homolog of NCBI NO: 21553460 NR Description: snap25a [Arabidopsis thaliana]
  misc_feature (1)..(165): Homolog of NCBI NO: 15240163 NR Description: syntaxin SNAP33 [Arabidopsis thaliana]
MLHDQGEQITRTHHKAVEIDHDLSRGEKLLGSLGGMFSKTWKPKKTRPINGPVVTRDDSPTRRVNHLEKREKLGLNSAPRGQSRTREPLPESADAYQRVEMEKAKQDDGLSDLSDILGELKNMAVDMGSEIEKQNKGLDHLHDDVDELNFRVQQSNQRGRRLLGK

SEQ ID NO: 29605 - DNA, 675 bp, Arabidopsis thaliana
  misc_feature (1)..(675): Ceres Seq. ID no. 12738445
  misc_feature: MA Experiment ID: 108434 Result: Up-regulated in Transcription
  misc_feature: MA Experiment 108434 PARAMETER Experiment Name: At_Root_Tips_cDNA_P Parameter: Tissue Value: Root Tips
  misc_feature: MA Experiment ID: 108462 Result: Down-regulated in Transcription
  misc_feature: MA Experiment 108462 PARAMETER Experiment Name: At_Germinating_Seeds_cDNA_P Parameter: Age (day) Value: 2 vs. 0
  misc_feature: MA Experiment 108462 PARAMETER Experiment Name: At_Germinating_Seeds_cDNA_P Parameter: Tissue Value: Germinating Seeds
  misc_feature: MA Experiment ID: 108463 Result: Down-regulated in Transcription
  misc_feature: MA Experiment 108463 PARAMETER Experiment Name: At_Germinating_Seeds_cDNA_P Parameter: Age (day) Value: 3 vs. 0
  misc_feature: MA Experiment 108463 PARAMETER Experiment Name: At_Germinating_Seeds_cDNA_P Parameter: Tissue Value: Germinating Seeds
  misc_feature: MA Experiment ID: 108464 Result: Down-regulated in Transcription
  misc_feature: MA Experiment 108464 PARAMETER Experiment Name: At_Germinating_Seeds_cDNA_P Parameter: Age (day) Value: 4 vs. 0
  misc_feature: MA Experiment 108464 PARAMETER Experiment Name: At_Germinating_Seeds_cDNA_P Parameter: Tissue Value: Germinating Seeds
  misc_feature: MA Experiment ID: 108573 Result: Down-regulated in Transcription
  misc_feature: MA Experiment 108573 PARAMETER Experiment Name: At_Drought_cDNA_P Parameter: Timepoint (hr) Value: 6
  misc_feature: MA Experiment 108573 PARAMETER Experiment Name: At_Drought_cDNA_P Parameter: Tissue Value: Aerial
  misc_feature: MA Experiment 108573 PARAMETER Experiment Name: At_Drought_cDNA_P Parameter: Treatment Value: Drought vs. No Drought
  misc_feature: MA Experiment ID: 108605 Result: Down-regulated in Transcription
  misc_feature: MA Experiment 108605 PARAMETER Experiment Name: At_100uM_ABA_cDNA_P Parameter: Timepoint (hr) Value: 6
  misc_feature: MA Experiment 108605 PARAMETER Experiment Name: At_100uM_ABA_cDNA_P Parameter: Tissue Value: Aerial
  misc_feature: MA Experiment 108605 PARAMETER Experiment Name: At_100uM_ABA_cDNA_P Parameter: Treatment Value: 100uM ABA vs. No Treatment
  misc_feature: MA Experiment ID: 20000070 Result: Down-regulated in Transcription
  misc_feature: MA Experiment 20000070 PARAMETER Experiment Name: At_100uM_ABA_Mutants_cDNA_P Parameter: Plant Line Value: CS24
  misc_feature: MA Experiment 20000070 PARAMETER Experiment Name: At_100uM_ABA_Mutants_cDNA_P Parameter: Timepoint (hr) Value: 6
  misc_feature: MA Experiment 20000070 PARAMETER Experiment Name: At_100uM_ABA_Mutants_cDNA_P Parameter: Tissue Value: Aerial
  misc_feature: MA Experiment 20000070 PARAMETER Experiment Name: At_100uM_ABA_Mutants_cDNA_P Parameter: Treatment Value: 100uM ABA vs. No Treatment
  misc_feature: MA Experiment ID: 20000329 Result: Up-regulated in Transcription
  misc_feature: MA Experiment 20000329 PARAMETER Experiment Name: At_4deg_Cold_Sub_P Parameter: Age (day) Value: 14
  misc_feature: MA Experiment 20000329 PARAMETER Experiment Name: At_4deg_Cold_Sub_P Parameter: Organism Value: A. thaliana
  misc_feature: MA Experiment 20000329 PARAMETER Experiment Name: At_4deg_Cold_Sub_P Parameter: Plant Line Value: WS
  misc_feature: MA Experiment 20000329 PARAMETER Experiment Name: At_4deg_Cold_Sub_P Parameter: Temperature (deg C) Value: 4 vs. 22
  misc_feature: MA Experiment 20000329 PARAMETER Experiment Name: At_4deg_Cold_Sub_P Parameter: Timepoint (hr) Value: 6
  misc_feature: MA Experiment 20000329 PARAMETER Experiment Name: At_4deg_Cold_Sub_P Parameter: Tissue Value: Aerial
  misc_feature: MA Experiment ID: 20000355 Result: Up-regulated in Transcription
  misc_feature: MA Experiment 20000355 PARAMETER Experiment Name: At_Siliques_Sub_P Parameter: Age (day) Value: 21
  misc_feature: MA Experiment 20000355 PARAMETER Experiment Name: At_Siliques_Sub_P Parameter: Organism Value: A. thaliana
  misc_feature: MA Experiment 20000355 PARAMETER Experiment Name: At_Siliques_Sub_P Parameter: Plant Line Value: WS
  misc_feature: MA Experiment 20000355 PARAMETER Experiment Name: At_Siliques_Sub_P Parameter: Tissue Value: Less Than 5mm Siliques vs. Whole Plant
  misc_feature: MA Experiment ID: 20000440 Result: Up-regulated in Transcription
  misc_feature: MA Experiment 20000440 PARAMETER Experiment Name: At_Closed-Flower__Sub_P Parameter: Tissue Value: Closed Flower vs. Whole Plant
  misc_feature: MA Experiment ID: 20001807 Result: Up-regulated in Transcription
  misc_feature: MA Experiment 20001807 PARAMETER Experiment Name: At_50mM_NH4NO3_L-to-H_Sub_P Parameter: Timepoint (hr) Value: 6
  misc_feature: MA Experiment 20001807 PARAMETER Experiment Name: At_50mM_NH4NO3_L-to-H_Sub_P Parameter: Tissue Value: Leaf
  misc_feature: MA Experiment 20001807 PARAMETER Experiment Name: At_50mM_NH4NO3_L-to-H_Sub_P Parameter: Treatment Value: 50mM NH4NO3 vs 100mM Mannitol
gattttttagggtttcaagtgaaaagagtaatagcgcggcggagccatggttctcaagactgagctttgccgattcagtggccagaaaatttaccctggtagagggatcagatttatccgatcggactctcaggtgtttttgtttctcaactccaaatgtaagaggtatttccacaacaagttgaagccatctaagctttgctggactgctatgtaccgaaagcagcacaagaaggacgcagcacaagaggctgtgaagagaaggagacgtgcaactaagaagccttactcaaggtcgattgtcggtgctactttggaggttattcagaagaagcgagcagagaagcctgaagttcgtgatgccgctagagaagctgccctacgtgagatcaaggagagaatcaagaagaccaaggacgagaagaaggcaaagaaggtcgagtatgcatcaaagcaacagaagtcacaagtgaagggaaatatccccaagagtgctgcacccaaggctgctaagatgggtggtggtggaggcagacgttgaatggagctatagagtagcccactcttctctcttcacttatctttctttcttgttttgacattgttttgttttgtcagccattttttagttttgcaccagatctaatatattcagtttatgaaaactttttgttt

SEQ ID NO: 29606 - protein, 164 aa, Arabidopsis thaliana
  peptide (1)..(164): Ceres Seq. ID no. 12738446
  misc_feature (3)..(73): Pfam Name: Ribosomal protein L24e Pfam Description: Ribosomal protein L24e
  misc_feature (3)..(159): Homolog of NCBI NO: 4506619 NR Description: ribosomal protein L24
  misc_feature (3)..(151): Homolog of NCBI NO: 19115030 NR Description: 60S ribosomal protein L24 [Schizosaccharomyces
  misc_feature (1)..(159): Homolog of NCBI NO: 28174943 NR Description: Similar to ribosomal protein L24 [Mus musculus]
  misc_feature (4)..(164): Homolog of NCBI NO: 34900364 NR Description: putative 60S ribosomal protein L24
  misc_feature (1)..(159): Homolog of NCBI NO: 10180025 NR Description: 60S ribosomal protein L24 [Prunus avium]
  misc_feature (1)..(164): Homolog of NCBI NO: 1710521 NR Description: 60S RIBOSOMAL PROTEIN L24
  misc_feature (1)..(163): Homolog of NCBI NO: 6094040 NR Description: 60S ribosomal protein L24
  misc_feature (1)..(164): Homolog of NCBI NO: 15231730 NR Description: 60S ribosomal protein - like
  misc_feature (5)..(164): Homolog of NCBI NO: 25295112 NR Description: 60S ribosomal protein L24 [imported] -
  misc_feature (1)..(164): Homolog of NCBI NO: 18404176 NR Description: 60S ribosomal protein L24
MVLKTELCRFSGQKIYPGRGIRFIRSDSQVFLFLNSKCKRYFHNKLKPSKLCWTAMYRKQHKKDAAQEAVKRRRRATKKPYSRSIVGATLEVIQKKRAEKPEVRDAAREAALREIKERIKKTKDEKKAKKVEYASKQQKSQVKGNIPKSAAPKAAKMGGGGGRR

SEQ ID NO: 29607 - protein, 109 aa, Arabidopsis thaliana
  peptide (1)..(109): Ceres Seq. ID no. 12738447
  misc_feature (1)..(104): Homolog of NCBI NO: 4506619 NR Description: ribosomal protein L24
  misc_feature (1)..(96): Homolog of NCBI NO: 19115030 NR Description: 60S ribosomal protein L24 [Schizosaccharomyces
  misc_feature (1)..(104): Homolog of NCBI NO: 28174943 NR Description: Similar to ribosomal protein L24 [Mus musculus]
  misc_feature (1)..(109): Homolog of NCBI NO: 34900364 NR Description: putative 60S ribosomal protein L24
  misc_feature (1)..(104): Homolog of NCBI NO: 10180025 NR Description: 60S ribosomal protein L24 [Prunus avium]
  misc_feature (1)..(109): Homolog of NCBI NO: 1710521 NR Description: 60S RIBOSOMAL PROTEIN L24
  misc_feature (1)..(108): Homolog of NCBI NO: 6094040 NR Description: 60S ribosomal protein L24
  misc_feature (1)..(109): Homolog of NCBI NO: 15231730 NR Description: 60S ribosomal protein - like
  misc_feature (1)..(109): Homolog of NCBI NO: 25295112 NR Description: 60S ribosomal protein L24 [imported] -
  misc_feature (1)..(109): Homolog of NCBI NO: 18404176 NR Description: 60S ribosomal protein L24
MYRKQHKKDAAQEAVKRRRRATKKPYSRSIVGATLEVIQKKRAEKPEVRDAAREAALREIKERIKKTKDEKKAKKVEYASKQQKSQVKGNIPKSAAPKAAKMGGGGGRR

SEQ ID NO: 29608 - DNA, 1217 bp, Arabidopsis thaliana
  misc_feature (1)..(1217): Ceres Seq. ID no. 13489591
  misc_feature: MA Experiment ID: 108434 Result: Up-regulated in Transcription
  misc_feature: MA Experiment 108434 PARAMETER Experiment Name: At_Root_Tips_cDNA_P Parameter: Tissue Value: Root Tips
  misc_feature: MA Experiment ID: 20000111 Result: Down-regulated in Transcription
  misc_feature: MA Experiment 20000111 PARAMETER Experiment Name: At_42deg_Heat_cDNA_P Parameter: Temperature (deg C) Value: 42 vs. 22
  misc_feature: MA Experiment 20000111 PARAMETER Experiment Name: At_42deg_Heat_cDNA_P Parameter: Timepoint (hr) Value: 6
  misc_feature: MA Experiment 20000111 PARAMETER Experiment Name: At_42deg_Heat_cDNA_P Parameter: Tissue Value: Aerial
  misc_feature: MA Experiment ID: 20000113 Result: Down-regulated in Transcription
  misc_feature: MA Experiment 20000113 PARAMETER Experiment Name: At_42deg_Heat_cDNA_P Parameter: Temperature (deg C) Value: 42 vs. 22
  misc_feature: MA Experiment 20000113 PARAMETER Experiment Name: At_42deg_Heat_cDNA_P Parameter: Timepoint (hr) Value: 8
  misc_feature: MA Experiment 20000113 PARAMETER Experiment Name: At_42deg_Heat_cDNA_P Parameter: Tissue Value: Aerial
  misc_feature: MA Experiment ID: 20000179 Result: Up-regulated in Transcription
  misc_feature: MA Experiment 20000179 PARAMETER Experiment Name: At_Germinating_Seeds_P Parameter: Age (hr) Value: 6 vs. 0
  misc_feature: MA Experiment 20000179 PARAMETER Experiment Name: At_Germinating_Seeds_P Parameter: Tissue Value: Germinating Seeds
  misc_feature: MA Experiment ID: 20000184 Result: Down-regulated in Transcription
  misc_feature: MA Experiment 20000184 PARAMETER Experiment Name: At_Shoots__P Parameter: Age (day) Value: 7
  misc_feature: MA Experiment 20000184 PARAMETER Experiment Name: At_Shoots__P Parameter: Tissue Value: Shoots vs. Whole Plant
  misc_feature: MA Experiment ID: 20000224 Result: Up-regulated in Transcription
  misc_feature: MA Experiment ID: 20000264 Result: Up-regulated in Transcription
  misc_feature: MA Experiment 20000264 PARAMETER Experiment Name: At_Open_Flower_P Parameter: Age (day) Value: 21
  misc_feature: MA Experiment 20000264 PARAMETER Experiment Name: At_Open_Flower_P Parameter: Plant Line Value: WS
  misc_feature: MA Experiment 20000264 PARAMETER Experiment Name: At_Open_Flower_P Parameter: Tissue Value: Open Flower vs. Whole Plant
  misc_feature: MA Experiment ID: 20000265 Result: Up-regulated in Transcription
  misc_feature: MA Experiment 20000265 PARAMETER Experiment Name: At_Open_Flower_P Parameter: Age (day) Value: 21
  misc_feature: MA Experiment 20000265 PARAMETER Experiment Name: At_Open_Flower_P Parameter: Plant Line Value: WS
  misc_feature: MA Experiment 20000265 PARAMETER Experiment Name: At_Open_Flower_P Parameter: Tissue Value: Closed Flower vs. Whole Plant
  misc_feature: MA Experiment ID: 20000286 Result: Up-regulated in Transcription
  misc_feature: MA Experiment 20000286 PARAMETER Experiment Name: At_Open_Flower_P Parameter: Age (day) Value: 21
  misc_feature: MA Experiment 20000286 PARAMETER Experiment Name: At_Open_Flower_P Parameter: Plant Line Value: WS
  misc_feature: MA Experiment 20000286 PARAMETER Experiment Name: At_Open_Flower_P Parameter: Tissue Value: Half Open vs. Whole Plant
  misc_feature: MA Experiment ID: 20000794 Result: Up-regulated in Transcription
  misc_feature: MA Experiment 20000794 PARAMETER Experiment Name: At_Petals_P Parameter: Age (day) Value: 23-25 days
  misc_feature: MA Experiment 20000794 PARAMETER Experiment Name: At_Petals_P Parameter: Plant Line Value: WS
  misc_feature: MA Experiment 20000794 PARAMETER Experiment Name: At_Petals_P Parameter: Tissue Value: Petals vs. Whole plant
aatgctcgtaagttcaagcaaaatcacaagagcgagagagatggtgacgaaaacagaggagaagcaattgaaccagctagagattcaagtcgataatggcggaggcggaacatgggagtatctttgcctcgttcgtaatctcaaagttcgccggtcggagaaagtgttaaaacacggttcctcgattttgaatgatcagaagaaacgatctgctcttggtccagatgaatggacactaaatgagcaggtggcaattgcagctatggactgtcaatgtctcggtgtcgcacagagttgcattaaggctttgcagacaaaatttcctgggagcaaaagagttgggaggcttgaggcattgcttcttgaagcgaagggattatggggagaggctgaggaagcatatgcgagtcttttggaggataatccactcgaccaagcgatacacaaacgaagagtggctatatccaaggcactaggcaaaccttccatagccattgagcttcttaacaaatatcttgaactattcatggctgatcatgatgcatggagagaactcgcagagctttacctttccttgcaaatgtataagcaagcagctttctgctatgaagagctcatactatctcagcctactgttccattgtaccacctcgcatatgctgaggttctctatacaatcggtggagtagaaaacattatctcagcaagaaaatactatgcagcgaccgtagatttaacaggcggcaaaaacactagagctcttctcggaatctgcttgtgtgcatcggccattgcacagctctcaaaaggcaggaacaaagaggacaaagacgctacggcagccccagagcttcattccctggctgcagctgcagtagagaaagaatacaagcaaaaagccccggacaaacttcaactcatctcttccgcgttaagaatcttgaagacttgatcgcaagtaaacgatgttctggcccacaagacgcaaacgatttagcagtagtagatagtcggaaaatatcgaactctaaattcaaataactttctttaaagtttaaaccaaagagaattttgattactgttagataccaaaaccaaataactgtatcactccttagcctttacggtttccatgcttgcgacgtgcagcttcttttgtatcattttcgatgcgctcaacgtacatcggtagaaggataatctctttgatctccttc

SEQ ID NO: 29609 - protein, 316 aa, Arabidopsis thaliana
  peptide (1)..(316): Ceres Seq. ID no. 13489592
  misc_feature (50)..(277): Homolog of NCBI NO: 34866113 NR Description: similar to RIKEN cDNA 4921531G14 [Rattus
  misc_feature (50)..(297): Homolog of NCBI NO: 7661910 NR Description: KIAA0103 gene product [Homo sapiens]
  misc_feature (50)..(297): Homolog of NCBI NO: 14193698 NR Description: KIAA0103 protein [Mus musculus]
  misc_feature (50)..(297): Homolog of NCBI NO: 13385196 NR Description: RIKEN cDNA 4921531G14 [Mus musculus]
  misc_feature (50)..(297): Homolog of NCBI NO: 27370885 NR Description: Similar to KIAA0103 gene product [Xenopus laevis]
  misc_feature (101)..(315): Homolog of NCBI NO: 10799830 NR Description: O-linked GlcNAc transferase like [Nicotiana
  misc_feature (14)..(315): Homolog of NCBI NO: 22330847 NR Description: expressed protein [Arabidopsis thaliana]
  misc_feature (14)..(315): Homolog of NCBI NO: 30679284 NR Description: expressed protein [Arabidopsis thaliana]
  misc_feature (14)..(316): Homolog of NCBI NO: 5732436 NR Description: contains similarity to O-linked GlcNAc
  misc_feature (1)..(316): Homolog of NCBI NO: 30690960 NR Description: expressed protein [Arabidopsis thaliana]
MLVSSSKITRAREMVTKTEEKQLNQLEIQVDNGGGGTWEYLCLVRNLKVRRSEKVLKHGSSILNDQKKRSALGPDEWTLNEQVAIAAMDCQCLGVAQSCIKALQTKFPGSKRVGRLEALLLEAKGLWGEAEEAYASLLEDNPLDQAIHKRRVAISKALGKPSIAIELLNKYLELFMADHDAWRELAELYLSLQMYKQAAFCYEELILSQPTVPLYHLAYAEVLYTIGGVENIISARKYYAATVDLTGGKNTRALLGICLCASAIAQLSKGRNKEDKDATAAPELHSLAAAAVEKEYKQKAPDKLQLISSALRILKT

SEQ ID NO: 29610 - protein, 303 aa, Arabidopsis thaliana
  peptide (1)..(303): Ceres Seq. ID no. 13489593
  misc_feature (37)..(264): Homolog of NCBI NO: 34866113 NR Description: similar to RIKEN cDNA 4921531G14 [Rattus
  misc_feature (37)..(284): Homolog of NCBI NO: 7661910 NR Description: KIAA0103 gene product [Homo sapiens]
  misc_feature (37)..(284): Homolog of NCBI NO: 14193698 NR Description: KIAA0103 protein [Mus musculus]
  misc_feature (37)..(284): Homolog of NCBI NO: 13385196 NR Description: RIKEN cDNA 4921531G14 [Mus musculus]
  misc_feature (37)..(284): Homolog of NCBI NO: 27370885 NR Description: Similar to KIAA0103 gene product [Xenopus laevis]
  misc_feature (88)..(302): Homolog of NCBI NO: 10799830 NR Description: O-linked GlcNAc transferase like [Nicotiana
  misc_feature (1)..(302): Homolog of NCBI NO: 22330847 NR Description: expressed protein [Arabidopsis thaliana]
  misc_feature (1)..(302): Homolog of NCBI NO: 30679284 NR Description: expressed protein [Arabidopsis thaliana]
  misc_feature (1)..(303): Homolog of NCBI NO: 5732436 NR Description: contains similarity to O-linked GlcNAc
  misc_feature (1)..(303): Homolog of NCBI NO: 30690960 NR Description: expressed protein [Arabidopsis thaliana]
MVTKTEEKQLNQLEIQVDNGGGGTWEYLCLVRNLKVRRSEKVLKHGSSILNDQKKRSALGPDEWTLNEQVAIAAMDCQCLGVAQSCIKALQTKFPGSKRVGRLEALLLEAKGLWGEAEEAYASLLEDNPLDQAIHKRRVAISKALGKPSIAIELLNKYLELFMADHDAWRELAELYLSLQMYKQAAFCYEELILSQPTVPLYHLAYAEVLYTIGGVENIISARKYYAATVDLTGGKNTRALLGICLCASAIAQLSKGRNKEDKDATAAPELHSLAAAAVEKEYKQKAPDKLQLISSALRILKT

SEQ ID NO: 29611 - protein, 229 aa, Arabidopsis thaliana
  peptide (1)..(229): Ceres Seq. ID no. 13489594
  misc_feature (1)..(190): Homolog of NCBI NO: 34866113 NR Description: similar to RIKEN cDNA 4921531G14 [Rattus
  misc_feature (1)..(210): Homolog of NCBI NO: 7661910 NR Description: KIAA0103 gene product [Homo sapiens]
  misc_feature (1)..(210): Homolog of NCBI NO: 14193698 NR Description: KIAA0103 protein [Mus musculus]
  misc_feature (1)..(210): Homolog of NCBI NO: 13385196 NR Description: RIKEN cDNA 4921531G14 [Mus musculus]
  misc_feature (1)..(210): Homolog of NCBI NO: 27370885 NR Description: Similar to KIAA0103 gene product [Xenopus laevis]
  misc_feature (14)..(228): Homolog of NCBI NO: 10799830 NR Description: O-linked GlcNAc transferase like [Nicotiana
  misc_feature (1)..(228): Homolog of NCBI NO: 22330847 NR Description: expressed protein [Arabidopsis thaliana]
  misc_feature (1)..(228): Homolog of NCBI NO: 30679284 NR Description: expressed protein [Arabidopsis thaliana]
  misc_feature (1)..(229): Homolog of NCBI NO: 5732436 NR Description: contains similarity to O-linked GlcNAc
  misc_feature (1)..(229): Homolog of NCBI NO: 30690960 NR Description: expressed protein [Arabidopsis thaliana]
MDCQCLGVAQSCIKALQTKFPGSKRVGRLEALLLEAKGLWGEAEEAYASLLEDNPLDQAIHKRRVAISKALGKPSIAIELLNKYLELFMADHDAWRELAELYLSLQMYKQAAFCYEELILSQPTVPLYHLAYAEVLYTIGGVENIISARKYYAATVDLTGGKNTRALLGICLCASAIAQLSKGRNKEDKDATAAPELHSLAAAAVEKEYKQKAPDKLQLISSALRILKT

SEQ ID NO: 29612 - DNA, 1535 bp, Arabidopsis thaliana
  misc_feature (1)..(1535): Ceres Seq. ID no. 13490268
  misc_feature: MA Experiment ID: 108434 Result: Down-regulated in Transcription
  misc_feature: MA Experiment 108434 PARAMETER Experiment Name: At_Root_Tips_cDNA_P Parameter: Tissue Value: Root Tips
  misc_feature: MA Experiment ID: 108469 Result: Up-regulated in Transcription
  misc_feature: MA Experiment ID: 108569 Result: Up-regulated in Transcription
  misc_feature: MA Experiment 108569 PARAMETER Experiment Name: At_0.001%_MeJA__cDNA_P Parameter: Timepoint (hr) Value: 6
  misc_feature: MA Experiment 108569 PARAMETER Experiment Name: At_0.001%_MeJA__cDNA_P Parameter: Tissue Value: Aerial
  misc_feature: MA Experiment 108569 PARAMETER Experiment Name: At_0.001%_MeJA__cDNA_P Parameter: Treatment Value: 0.001% MeJA vs. No Treatment
  misc_feature: MA Experiment ID: 108572 Result: Up-regulated in Transcription
  misc_feature: MA Experiment 108572 PARAMETER Experiment Name: At_Drought_cDNA_P Parameter: Timepoint (hr) Value: 1
  misc_feature: MA Experiment 108572 PARAMETER Experiment Name: At_Drought_cDNA_P Parameter: Tissue Value: Aerial
  misc_feature: MA Experiment 108572 PARAMETER Experiment Name: At_Drought_cDNA_P Parameter: Treatment Value: Drought vs. No Drought
  misc_feature: MA Experiment ID: 108573 Result: Up-regulated in Transcription
  misc_feature: MA Experiment 108573 PARAMETER Experiment Name: At_Drought_cDNA_P Parameter: Timepoint (hr) Value: 6
  misc_feature: MA Experiment 108573 PARAMETER Experiment Name: At_Drought_cDNA_P Parameter: Tissue Value: Aerial
  misc_feature: MA Experiment 108573 PARAMETER Experiment Name: At_Drought_cDNA_P Parameter: Treatment Value: Drought vs. No Drought
  misc_feature: MA Experiment ID: 108574 Result: Up-regulated in Transcription
  misc_feature: MA Experiment 108574 PARAMETER Experiment Name: At_Wounding__cDNA_P Parameter: Timepoint (hr) Value: 1
  misc_feature: MA Experiment 108574 PARAMETER Experiment Name: At_Wounding__cDNA_P Parameter: Tissue Value: Aerial
  misc_feature: MA Experiment 108574 PARAMETER Experiment Name: At_Wounding__cDNA_P Parameter: Treatment Value: Wounding vs. No Wounding
  misc_feature: MA Experiment ID: 108585 Result: Up-regulated in Transcription
  misc_feature: MA Experiment 108585 PARAMETER Experiment Name: At_5mM_NaNP_cDNA_P Parameter: Timepoint (hr) Value: 6
  misc_feature: MA Experiment 108585 PARAMETER Experiment Name: At_5mM_NaNP_cDNA_P Parameter: Tissue Value: Aerial
  misc_feature: MA Experiment 108585 PARAMETER Experiment Name: At_5mM_NaNP_cDNA_P Parameter: Treatment Value: null
  misc_feature: MA Experiment ID: 108607 Result: Up-regulated in Transcription
  misc_feature: MA Experiment 108607 PARAMETER Experiment Name: At_100uM_ABA_cDNA_P Parameter: Timepoint (hr) Value: 4
  misc_feature: MA Experiment 108607 PARAMETER Experiment Name: At_100uM_ABA_cDNA_P Parameter: Tissue Value: Aerial
  misc_feature: MA Experiment 108607 PARAMETER Experiment Name: At_100uM_ABA_cDNA_P Parameter: Treatment Value: 100uM ABA vs. No Treatment
  misc_feature: MA Experiment ID: 108667 Result: Up-regulated in Transcription
  misc_feature: MA Experiment 108667 PARAMETER Experiment Name: At_2mM_SA_cDNA_P Parameter: Plant Line Value: WS
  misc_feature: MA Experiment 108667 PARAMETER Experiment Name: At_2mM_SA_cDNA_P Parameter: Timepoint (hr) Value: 1
  misc_feature: MA Experiment 108667 PARAMETER Experiment Name: At_2mM_SA_cDNA_P Parameter: Treatment Value: 2mM SA vs. No Treatment
  misc_feature: MA Experiment ID: 108668 Result: Up-regulated in Transcription
  misc_feature: MA Experiment 108668 PARAMETER Experiment Name: At_2mM_SA_cDNA_P Parameter: Plant Line Value: WS
  misc_feature: MA Experiment 108668 PARAMETER Experiment Name: At_2mM_SA_cDNA_P Parameter: Timepoint (hr) Value: 6
  misc_feature: MA Experiment 108668 PARAMETER Experiment Name: At_2mM_SA_cDNA_P Parameter: Treatment Value: 2mM SA vs. No Treatment
  misc_feature: MA Experiment ID: 20000166 Result: Up-regulated in Transcription
  misc_feature: MA Experiment 20000166 PARAMETER Experiment Name: At_100uM_ABA_P Parameter: Age (day) Value: 14
  misc_feature: MA Experiment 20000166 PARAMETER Experiment Name: At_100uM_ABA_P Parameter: Organism Value: A. thaliana
  misc_feature: MA Experiment 20000166 PARAMETER Experiment Name: At_100uM_ABA_P Parameter: Plant Line Value: WS
  misc_feature: MA Experiment 20000166 PARAMETER Experiment Name: At_100uM_ABA_P Parameter: Timepoint (hr) Value: 1
  misc_feature: MA Experiment 20000166 PARAMETER Experiment Name: At_100uM_ABA_P Parameter: Tissue Value: Aerial
  misc_feature: MA Experiment 20000166 PARAMETER Experiment Name: At_100uM_ABA_P Parameter: Treatment Value: 100uM ABA vs. No Treatment
  misc_feature: MA Experiment ID: 20000173 Result: Down-regulated in Transcription
  misc_feature: MA Experiment 20000173 PARAMETER Experiment Name: At_42deg_Heat_P Parameter: Age (day) Value: 14
  misc_feature: MA Experiment 20000173 PARAMETER Experiment Name: At_42deg_Heat_P Parameter: Organism Value: A. thaliana
  misc_feature: MA Experiment 20000173 PARAMETER Experiment Name: At_42deg_Heat_P Parameter: Plant Line Value: WS
  misc_feature: MA Experiment 20000173 PARAMETER Experiment Name: At_42deg_Heat_P Parameter: Temperature (deg C) Value: 42 vs. 22
  misc_feature: MA Experiment 20000173 PARAMETER Experiment Name: At_42deg_Heat_P Parameter: Timepoint (hr) Value: 6
  misc_feature: MA Experiment 20000173 PARAMETER Experiment Name: At_42deg_Heat_P Parameter: Tissue Value: Aerial
  misc_feature: MA Experiment ID: 20000182 Result: Up-regulated in Transcription
  misc_feature: MA Experiment 20000182 PARAMETER Experiment Name: At_2mM_SA_P Parameter: Age (day) Value: 14
  misc_feature: MA Experiment 20000182 PARAMETER Experiment Name: At_2mM_SA_P Parameter: Organism Value: A. thaliana
  misc_feature: MA Experiment 20000182 PARAMETER Experiment Name: At_2mM_SA_P Parameter: Plant Line Value: WS
  misc_feature: MA Experiment 20000182 PARAMETER Experiment Name: At_2mM_SA_P Parameter: Timepoint (hr) Value: 6
  misc_feature: MA Experiment 20000182 PARAMETER Experiment Name: At_2mM_SA_P Parameter: Tissue Value: Aerial
  misc_feature: MA Experiment 20000182 PARAMETER Experiment Name: At_2mM_SA_P Parameter: Treatment Value: 2mM SA vs. No Treatment
  misc_feature: MA Experiment ID: 20000184 Result: Down-regulated in Transcription
  misc_feature: MA Experiment 20000184 PARAMETER Experiment Name: At_Shoots__P Parameter: Age (day) Value: 7
  misc_feature: MA Experiment 20000184 PARAMETER Experiment Name: At_Shoots__P Parameter: Tissue Value: Shoots vs. Whole Plant
  misc_feature: MA Experiment ID: 20000185 Result: Down-regulated in Transcription
  misc_feature: MA Experiment 20000185 PARAMETER Experiment Name: At_Roots__P Parameter: Age (day) Value: 7 vs. 21
  misc_feature: MA Experiment 20000185 PARAMETER Experiment Name: At_Roots__P Parameter: Organism Value: A. thaliana
  misc_feature: MA Experiment 20000185 PARAMETER Experiment Name: At_Roots__P Parameter: Tissue Value: Roots vs. Whole Plant
  misc_feature: MA Experiment ID: 20000234 Result: Down-regulated in Transcription
  misc_feature: MA Experiment 20000234 PARAMETER Experiment Name: At_Siliques_P Parameter: Age (day) Value: 21
  misc_feature: MA Experiment 20000234 PARAMETER Experiment Name: At_Siliques_P Parameter: Organism Value: A. thaliana
  misc_feature: MA Experiment 20000234 PARAMETER Experiment Name: At_Siliques_P Parameter: Plant Line Value: WS
  misc_feature: MA Experiment 20000234 PARAMETER Experiment Name: At_Siliques_P Parameter: Tissue Value: Less Than 5mm Siliques vs. Whole Plant
  misc_feature: MA Experiment ID: 20000235 Result: Down-regulated in Transcription
  misc_feature: MA Experiment 20000235 PARAMETER Experiment Name: At_Siliques_P Parameter: Age (day) Value: 21
  misc_feature: MA Experiment 20000235 PARAMETER Experiment Name: At_Siliques_P Parameter: Organism Value: A. thaliana
  misc_feature: MA Experiment 20000235 PARAMETER Experiment Name: At_Siliques_P Parameter: Plant Line Value: WS
  misc_feature: MA Experiment 20000235 PARAMETER Experiment Name: At_Siliques_P Parameter: Tissue Value: 5-10mm Siliques vs. Whole Plant
  misc_feature: MA Experiment ID: 20000264 Result: Down-regulated in Transcription
  misc_feature: MA Experiment 20000264 PARAMETER Experiment Name: At_Open_Flower_P Parameter: Age (day) Value: 21
  misc_feature: MA Experiment 20000264 PARAMETER Experiment Name: At_Open_Flower_P Parameter: Plant Line Value: WS
  misc_feature: MA Experiment 20000264 PARAMETER Experiment Name: At_Open_Flower_P Parameter: Tissue Value: Open Flower vs. Whole Plant
  misc_feature: MA Experiment ID: 20000265 Result: Down-regulated in Transcription
  misc_feature: MA Experiment 20000265 PARAMETER Experiment Name: At_Open_Flower_P Parameter: Age (day) Value: 21
  misc_feature: MA Experiment 20000265 PARAMETER Experiment Name: At_Open_Flower_P Parameter: Plant Line Value: WS
  misc_feature: MA Experiment 20000265 PARAMETER Experiment Name: At_Open_Flower_P Parameter: Tissue Value: Closed Flower vs. Whole Plant
  misc_feature: MA Experiment ID: 20000286 Result: Down-regulated in Transcription
  misc_feature: MA Experiment 20000286 PARAMETER Experiment Name: At_Open_Flower_P Parameter: Age (day) Value: 21
  misc_feature: MA Experiment 20000286 PARAMETER Experiment Name: At_Open_Flower_P Parameter: Plant Line Value: WS
  misc_feature: MA Experiment 20000286 PARAMETER Experiment Name: At_Open_Flower_P Parameter: Tissue Value: Half Open vs. Whole Plant
  misc_feature: MA Experiment ID: 20000308 Result: Up-regulated in Transcription
  misc_feature: MA Experiment 20000308 PARAMETER Experiment Name: At_100mM_NaCl__P Parameter: Age (day) Value: 17
  misc_feature: MA Experiment 20000308 PARAMETER Experiment Name: At_100mM_NaCl__P Parameter: Organism Value: A. thaliana
  misc_feature: MA Experiment 20000308 PARAMETER Experiment Name: At_100mM_NaCl__P Parameter: Plant Line Value: WS
  misc_feature: MA Experiment 20000308 PARAMETER Experiment Name: At_100mM_NaCl__P Parameter: Timepoint (hr) Value: 72
  misc_feature: MA Experiment 20000308 PARAMETER Experiment Name: At_100mM_NaCl__P Parameter: Tissue Value: Whole Plant
  misc_feature: MA Experiment 20000308 PARAMETER Experiment Name: At_100mM_NaCl__P Parameter: Treatment Value: 100mM NaCl vs. No Treatment
  misc_feature: MA Experiment ID: 20000437 Result: Down-regulated in Transcription
  misc_feature: MA Experiment 20000437 PARAMETER Experiment Name: At_Drought_P Parameter: Age (day) Value: 8
  misc_feature: MA Experiment 20000437 PARAMETER Experiment Name: At_Drought_P Parameter: Organism Value: A. thaliana
  misc_feature: MA Experiment 20000437 PARAMETER Experiment Name: At_Drought_P Parameter: Plant Line Value: WS
  misc_feature: MA Experiment 20000437 PARAMETER Experiment Name: At_Drought_P Parameter: Timepoint (hr) Value: 24
  misc_feature: MA Experiment 20000437 PARAMETER Experiment Name: At_Drought_P Parameter: Tissue Value: Whole Plant
  misc_feature: MA Experiment 20000437 PARAMETER Experiment Name: At_Drought_P Parameter: Treatment Value: Drought vs. No Drought
  misc_feature: MA Experiment ID: 20000438 Result: Down-regulated in Transcription
  misc_feature: MA Experiment 20000438 PARAMETER Experiment Name: At_Shoots__P Parameter: Age (day) Value: 14
  misc_feature: MA Experiment 20000438 PARAMETER Experiment Name: At_Shoots__P Parameter: Tissue Value: Shoots vs. Whole Plant
  misc_feature: MA Experiment ID: 20000439 Result: Down-regulated in Transcription
  misc_feature: MA Experiment 20000439 PARAMETER Experiment Name: At_Roots__P Parameter: Age (day) Value: 14 vs. 21
  misc_feature: MA Experiment 20000439 PARAMETER Experiment Name: At_Roots__P Parameter: Organism Value: A. thaliana
  misc_feature: MA Experiment 20000439 PARAMETER Experiment Name: At_Roots__P Parameter: Tissue Value: Roots vs. Whole Plant
  misc_feature: MA Experiment ID: 20000495 Result: Down-regulated in Transcription
  misc_feature: MA Experiment 20000495 PARAMETER Experiment Name: At_Guard_Cells_P Parameter: Harvest Date Value: 8/2/2002
  misc_feature: MA Experiment 20000495 PARAMETER Experiment Name: At_Guard_Cells_P Parameter: Organism Value: A. thaliana
  misc_feature: MA Experiment 20000495 PARAMETER Experiment Name: At_Guard_Cells_P Parameter: Tissue Value: Guard Cells vs. Leaves
  misc_feature: MA Experiment ID: 20000527 Result: Down-regulated in Transcription
  misc_feature: MA Experiment 20000527 PARAMETER Experiment Name: At_10percent_PEG_P Parameter: Age (day) Value: 20
  misc_feature: MA Experiment 20000527 PARAMETER Experiment Name: At_10percent_PEG_P Parameter: Organism Value: A. thaliana
  misc_feature: MA Experiment 20000527 PARAMETER Experiment Name: At_10percent_PEG_P Parameter: Plant Line Value: WS
  misc_feature: MA Experiment 20000527 PARAMETER Experiment Name: At_10percent_PEG_P Parameter: Timepoint (day) Value: 20
  misc_feature: MA Experiment 20000527 PARAMETER Experiment Name: At_10percent_PEG_P Parameter: Tissue Value: Whole Plant
  misc_feature: MA Experiment 20000527 PARAMETER Experiment Name: At_10percent_PEG_P Parameter: Treatment Value: 10percent PEG vs. No Treatment
  misc_feature: MA Experiment ID: 20000573 Result: Up-regulated in Transcription
  misc_feature: MA Experiment 20000573 PARAMETER Experiment Name: At_100uM_ABA_Mutants__P Parameter: Organism Value: A. thaliana
  misc_feature: MA Experiment 20000573 PARAMETER Experiment Name: At_100uM_ABA_Mutants__P Parameter: Plant Line Value: CS22 vs. Ler wt
  misc_feature: MA Experiment 20000573 PARAMETER Experiment Name: At_100uM_ABA_Mutants__P Parameter: Timepoint (hr) Value: N/A
  misc_feature: MA Experiment 20000573 PARAMETER Experiment Name: At_100uM_ABA_Mutants__P Parameter: Tissue Value: Whole Plant
  misc_feature: MA Experiment 20000573 PARAMETER Experiment Name: At_100uM_ABA_Mutants__P Parameter: Treatment Value: None
  misc_feature: MA Experiment ID: 20000575 Result: Down-regulated in Transcription
  misc_feature: MA Experiment 20000575 PARAMETER Experiment Name: At_100uM_ABA_Mutants__P Parameter: Organism Value: A. thaliana
  misc_feature: MA Experiment 20000575 PARAMETER Experiment Name: At_100uM_ABA_Mutants__P Parameter: Plant Line Value: CS22
  misc_feature: MA Experiment 20000575 PARAMETER Experiment Name: At_100uM_ABA_Mutants__P Parameter: Timepoint (hr) Value: 6
  misc_feature: MA Experiment 20000575 PARAMETER Experiment Name: At_100uM_ABA_Mutants__P Parameter: Tissue Value: Whole Plant
  misc_feature: MA Experiment 20000575 PARAMETER Experiment Name: At_100uM_ABA_Mutants__P Parameter: Treatment Value: 1uM ABA vs. No Treatment
  misc_feature: MA Experiment ID: 20000576 Result: Down-regulated in Transcription
  misc_feature: MA Experiment 20000576 PARAMETER Experiment Name: At_100uM_ABA_Mutants__P Parameter: Organism Value: A. thaliana
  misc_feature: MA Experiment 20000576 PARAMETER Experiment Name: At_100uM_ABA_Mutants__P Parameter: Plant Line Value: CS23
  misc_feature: MA Experiment 20000576 PARAMETER Experiment Name: At_100uM_ABA_Mutants__P Parameter: Timepoint (hr) Value: 6
  misc_feature: MA Experiment 20000576 PARAMETER Experiment Name: At_100uM_ABA_Mutants__P Parameter: Tissue Value: Whole Plant
  misc_feature: MA Experiment 20000576 PARAMETER Experiment Name: At_100uM_ABA_Mutants__P Parameter: Treatment Value: 1uM ABA vs. No Treatment
  misc_feature: MA Experiment ID: 20000709 Result: Down-regulated in Transcription
  misc_feature: MA Experiment 20000709 PARAMETER Experiment Name: At_15mM_NH4NO3_L-to-H_P Parameter: Age (hr) Value: 14
  misc_feature: MA Experiment 20000709 PARAMETER Experiment Name: At_15mM_NH4NO3_L-to-H_P Parameter: Organism Value: A. thaliana
  misc_feature: MA Experiment 20000709 PARAMETER Experiment Name: At_15mM_NH4NO3_L-to-H_P Parameter: Plant Line Value: WS
  misc_feature: MA Experiment 20000709 PARAMETER Experiment Name: At_15mM_NH4NO3_L-to-H_P Parameter: Timepoint (hr) Value: 4
  misc_feature: MA Experiment 20000709 PARAMETER Experiment Name: At_15mM_NH4NO3_L-to-H_P Parameter: Tissue Value: Aerial
  misc_feature: MA Experiment 20000709 PARAMETER Experiment Name: At_15mM_NH4NO3_L-to-H_P Parameter: Treatment Value: 15mM NH4NO3 vs. 30mM Mannitol
  misc_feature: MA Experiment ID: 20000794 Result: Down-regulated in Transcription
  misc_feature: MA Experiment 20000794 PARAMETER Experiment Name: At_Petals_P Parameter: Age (day) Value: 23-25 days
  misc_feature: MA Experiment 20000794 PARAMETER Experiment Name: At_Petals_P Parameter: Plant Line Value: WS
  misc_feature: MA Experiment 20000794 PARAMETER Experiment Name: At_Petals_P Parameter: Tissue Value: Petals vs. Whole plant
  misc_feature: MA Experiment ID: 20001248 Result: Down-regulated in Transcription
  misc_feature: MA Experiment 20001248 PARAMETER Experiment Name: At_Far-red-induction_P Parameter: Age (day) Value: 7
  misc_feature: MA Experiment 20001248 PARAMETER Experiment Name: At_Far-red-induction_P Parameter: Light Value: Far-red vs. White
  misc_feature: MA Experiment 20001248 PARAMETER Experiment Name: At_Far-red-induction_P Parameter: Organism Value: A. thaliana
  misc_feature: MA Experiment 20001248 PARAMETER Experiment Name: At_Far-red-induction_P Parameter: Plant Line Value: Columbia
  misc_feature: MA Experiment 20001248 PARAMETER Experiment Name: At_Far-red-induction_P Parameter: Timepoint (hr) Value: 4
  misc_feature: MA Experiment 20001248 PARAMETER Experiment Name: At_Far-red-induction_P Parameter: Tissue Value: Whole Plant
  misc_feature: MA Experiment ID: 20001450 Result: Down-regulated in Transcription
  misc_feature: MA Experiment 20001450 PARAMETER Experiment Name: At_Far-red-induction_P Parameter: Age (day) Value: 7
  misc_feature: MA Experiment 20001450 PARAMETER Experiment Name: At_Far-red-induction_P Parameter: Light Value: Far-red vs. White
  misc_feature: MA Experiment 20001450 PARAMETER Experiment Name: At_Far-red-induction_P Parameter: Organism Value: A. thaliana
  misc_feature: MA Experiment 20001450 PARAMETER Experiment Name: At_Far-red-induction_P Parameter: Plant Line Value: Columbia
  misc_feature: MA Experiment 20001450 PARAMETER Experiment Name: At_Far-red-induction_P Parameter: Timepoint (hr) Value: 8
  misc_feature: MA Experiment 20001450 PARAMETER Experiment Name: At_Far-red-induction_P Parameter: Tissue Value: Whole Plant
  misc_feature: MA Experiment ID: 20001451 Result: Down-regulated in Transcription
  misc_feature: MA Experiment 20001451 PARAMETER Experiment Name: At_Far-red-induction_P Parameter: Age (day) Value: 7
  misc_feature: MA Experiment 20001451 PARAMETER Experiment Name: At_Far-red-induction_P Parameter: Light Value: Far-red vs. White
  misc_feature: MA Experiment 20001451 PARAMETER Experiment Name: At_Far-red-induction_P Parameter: Organism Value: A. thaliana
  misc_feature: MA Experiment 20001451 PARAMETER Experiment Name: At_Far-red-induction_P Parameter: Plant Line Value: Columbia
  misc_feature: MA Experiment 20001451 PARAMETER Experiment Name: At_Far-red-induction_P Parameter: Timepoint (hr) Value: 24
  misc_feature: MA Experiment 20001451 PARAMETER Experiment Name: At_Far-red-induction_P Parameter: Tissue Value: Whole Plant
  misc_feature: MA Experiment ID: 20001554 Result: Down-regulated in Transcription
  misc_feature: MA Experiment 20001554 PARAMETER Experiment Name: At_Drought_Soil_Dry_P Parameter: Age (day) Value: 21
  misc_feature: MA Experiment 20001554 PARAMETER Experiment Name: At_Drought_Soil_Dry_P Parameter: Organism Value: A. thaliana
  misc_feature: MA Experiment 20001554 PARAMETER Experiment Name: At_Drought_Soil_Dry_P Parameter: Plant Line Value: WS
  misc_feature: MA Experiment 20001554 PARAMETER Experiment Name: At_Drought_Soil_Dry_P Parameter: Post Timepoint (hr) Value: None
  misc_feature: MA Experiment 20001554 PARAMETER Experiment Name: At_Drought_Soil_Dry_P Parameter: Post-Treatment Value: None
  misc_feature: MA Experiment 20001554 PARAMETER Experiment Name: At_Drought_Soil_Dry_P Parameter: Timepoint (day) Value: 7
  misc_feature: MA Experiment 20001554 PARAMETER Experiment Name: At_Drought_Soil_Dry_P Parameter: Treatment Value: Drought vs. No Drought
  misc_feature: MA Experiment ID: 20001555 Result: Down-regulated in Transcription
  misc_feature: MA Experiment 20001555 PARAMETER Experiment Name: At_Drought_Soil_Dry_P Parameter: Age (day) Value: 24
  misc_feature: MA Experiment 20001555 PARAMETER Experiment Name: At_Drought_Soil_Dry_P Parameter: Organism Value: A. thaliana
  misc_feature: MA Experiment 20001555 PARAMETER Experiment Name: At_Drought_Soil_Dry_P Parameter: Plant Line Value: WS
  misc_feature: MA Experiment 20001555 PARAMETER Experiment Name: At_Drought_Soil_Dry_P Parameter: Post Timepoint (hr) Value: None
  misc_feature: MA Experiment 20001555 PARAMETER Experiment Name: At_Drought_Soil_Dry_P Parameter: Post-Treatment Value: None
  misc_feature: MA Experiment 20001555 PARAMETER Experiment Name: At_Drought_Soil_Dry_P Parameter: Timepoint (day) Value: 10
  misc_feature: MA Experiment 20001555 PARAMETER Experiment Name: At_Drought_Soil_Dry_P Parameter: Treatment Value: Drought vs. No Drought
  misc_feature: MA Experiment ID: 20001556 Result: Down-regulated in Transcription
  misc_feature: MA Experiment 20001556 PARAMETER Experiment Name: At_Drought_Soil_Dry_P Parameter: Age (day) Value: 26
  misc_feature: MA Experiment 20001556 PARAMETER Experiment Name: At_Drought_Soil_Dry_P Parameter: Organism Value: A. thaliana
  misc_feature: MA Experiment 20001556 PARAMETER Experiment Name: At_Drought_Soil_Dry_P Parameter: Plant Line Value: WS
  misc_feature: MA Experiment 20001556 PARAMETER Experiment Name: At_Drought_Soil_Dry_P Parameter: Post Timepoint (hr) Value: None
  misc_feature: MA Experiment 20001556 PARAMETER Experiment Name: At_Drought_Soil_Dry_P Parameter: Post-Treatment Value: None
  misc_feature: MA Experiment 20001556 PARAMETER Experiment Name: At_Drought_Soil_Dry_P Parameter: Timepoint (day) Value: 12
  misc_feature: MA Experiment 20001556 PARAMETER Experiment Name: At_Drought_Soil_Dry_P Parameter: Treatment Value: Drought vs. No Drought
  misc_feature: MA Experiment ID: 20001558 Result: Down-regulated in Transcription
  misc_feature: MA Experiment 20001558 PARAMETER Experiment Name: At_Drought_Soil_Dry_P Parameter: Age (day) Value: 27
  misc_feature: MA Experiment 20001558 PARAMETER Experiment Name: At_Drought_Soil_Dry_P Parameter: Organism Value: A. thaliana
  misc_feature: MA Experiment 20001558 PARAMETER Experiment Name: At_Drought_Soil_Dry_P Parameter: Plant Line Value: WS
  misc_feature: MA Experiment 20001558 PARAMETER Experiment Name: At_Drought_Soil_Dry_P Parameter: Post Timepoint (hr) Value: 6
  misc_feature: MA Experiment 20001558 PARAMETER Experiment Name: At_Drought_Soil_Dry_P Parameter: Post-Treatment Value: Re-Water vs. No Drought
  misc_feature: MA Experiment 20001558 PARAMETER Experiment Name: At_Drought_Soil_Dry_P Parameter: Timepoint (day) Value: 13
  misc_feature: MA Experiment 20001558 PARAMETER Experiment Name: At_Drought_Soil_Dry_P Parameter: Treatment Value: Drought vs. No Drought
  misc_feature: MA Experiment ID: 20001560 Result: Down-regulated in Transcription
  misc_feature: MA Experiment 20001560 PARAMETER Experiment Name: At_Drought_Soil_Dry_P Parameter: Age (day) Value: 28
  misc_feature: MA Experiment 20001560 PARAMETER Experiment Name: At_Drought_Soil_Dry_P Parameter: Organism Value: A. thaliana
  misc_feature: MA Experiment 20001560 PARAMETER Experiment Name: At_Drought_Soil_Dry_P Parameter: Plant Line Value: WS
  misc_feature: MA Experiment 20001560 PARAMETER Experiment Name: At_Drought_Soil_Dry_P Parameter: Post Timepoint (hr) Value: None
  misc_feature: MA Experiment 20001560 PARAMETER Experiment Name: At_Drought_Soil_Dry_P Parameter: Post-Treatment Value: None
  misc_feature: MA Experiment 20001560 PARAMETER Experiment Name: At_Drought_Soil_Dry_P Parameter: Timepoint (day) Value: 14
  misc_feature: MA Experiment 20001560 PARAMETER Experiment Name: At_Drought_Soil_Dry_P Parameter: Treatment Value: Drought vs. No Drought
  misc_feature: MA Experiment ID: 20001755 Result: Down-regulated in Transcription
  misc_feature: MA Experiment 20001755 PARAMETER Experiment Name: At_50mM_NH4NO3_L-to-H_P Parameter: Timepoint (hr) Value: 2
  misc_feature: MA Experiment 20001755 PARAMETER Experiment Name: At_50mM_NH4NO3_L-to-H_P Parameter: Tissue Value: Leaf
  misc_feature: MA Experiment 20001755 PARAMETER Experiment Name: At_50mM_NH4NO3_L-to-H_P Parameter: Treatment Value: 50mM NH4NO3 vs 100mM Mannitol
  misc_feature: MA Experiment ID: 20001771 Result: Down-regulated in Transcription
  misc_feature: MA Experiment 20001771 PARAMETER Experiment Name: At_Far-red-enriched-adult_P Parameter: Age (day) Value: 28
  misc_feature: MA Experiment 20001771 PARAMETER Experiment Name: At_Far-red-enriched-adult_P Parameter: Light Value: Far-red enriched vs. White
  misc_feature: MA Experiment 20001771 PARAMETER Experiment Name: At_Far-red-enriched-adult_P Parameter: Organism Value: A. thaliana
  misc_feature: MA Experiment 20001771 PARAMETER Experiment Name: At_Far-red-enriched-adult_P Parameter: Plant Line Value: Columbia
  misc_feature: MA Experiment 20001771 PARAMETER Experiment Name: At_Far-red-enriched-adult_P Parameter: Timepoint (hr) Value: 16
  misc_feature: MA Experiment 20001771 PARAMETER Experiment Name: At_Far-red-enriched-adult_P Parameter: Tissue Value: Aerial
  misc_feature: MA Experiment ID: 20001773 Result: Up-regulated in Transcription
  misc_feature: MA Experiment 20001773 PARAMETER Experiment Name: At_Far-red-enriched-adult_P Parameter: Age (day) Value: 30
  misc_feature: MA Experiment 20001773 PARAMETER Experiment Name: At_Far-red-enriched-adult_P Parameter: Light Value: Far-red enriched vs. White
  misc_feature: MA Experiment 20001773 PARAMETER Experiment Name: At_Far-red-enriched-adult_P Parameter: Organism Value: A. thaliana
  misc_feature: MA Experiment 20001773 PARAMETER Experiment Name: At_Far-red-enriched-adult_P Parameter: Plant Line Value: Columbia
  misc_feature: MA Experiment 20001773 PARAMETER Experiment Name: At_Far-red-enriched-adult_P Parameter: Timepoint (hr) Value: 48
  misc_feature: MA Experiment 20001773 PARAMETER Experiment Name: At_Far-red-enriched-adult_P Parameter: Tissue Value: Aerial
  misc_feature: MA Experiment ID: 20001774 Result: Up-regulated in Transcription
  misc_feature: MA Experiment 20001774 PARAMETER Experiment Name: At_Far-red-enriched-adult_P Parameter: Age (day) Value: 31
  misc_feature: MA Experiment 20001774 PARAMETER Experiment Name: At_Far-red-enriched-adult_P Parameter: Light Value: Far-red enriched vs. White
  misc_feature: MA Experiment 20001774 PARAMETER Experiment Name: At_Far-red-enriched-adult_P Parameter: Organism Value: A. thaliana
  misc_feature: MA Experiment 20001774 PARAMETER Experiment Name: At_Far-red-enriched-adult_P Parameter: Plant Line Value: Columbia
  misc_feature: MA Experiment 20001774 PARAMETER Experiment Name: At_Far-red-enriched-adult_P Parameter: Timepoint (hr) Value: 72
  misc_feature: MA Experiment 20001774 PARAMETER Experiment Name: At_Far-red-enriched-adult_P Parameter: Tissue Value: Aerial
  misc_feature: MA Experiment ID: 20001904 Result: Down-regulated in Transcription
  misc_feature: MA Experiment 20001904 PARAMETER Experiment Name: At_Drought_Reproduction_P Parameter: Age (day) Value: 37
  misc_feature: MA Experiment 20001904 PARAMETER Experiment Name: At_Drought_Reproduction_P Parameter: Organism Value: A. thaliana
  misc_feature: MA Experiment 20001904 PARAMETER Experiment Name: At_Drought_Reproduction_P Parameter: Plant Line Value: WS
  misc_feature: MA Experiment 20001904 PARAMETER Experiment Name: At_Drought_Reproduction_P Parameter: Timepoint (day) Value: 7
  misc_feature: MA Experiment 20001904 PARAMETER Experiment Name: At_Drought_Reproduction_P Parameter: Tissue Value: Rosettes
  misc_feature: MA Experiment 20001904 PARAMETER Experiment Name: At_Drought_Reproduction_P Parameter: Treatment Value: Drought vs. No Drought
  misc_feature: MA Experiment ID: 20001905 Result: Down-regulated in Transcription
  misc_feature: MA Experiment 20001905 PARAMETER Experiment Name: At_Drought_Reproduction_P Parameter: Age (day) Value: 40
  misc_feature: MA Experiment 20001905 PARAMETER Experiment Name: At_Drought_Reproduction_P Parameter: Organism Value: A. thaliana
  misc_feature: MA Experiment 20001905 PARAMETER Experiment Name: At_Drought_Reproduction_P Parameter: Plant Line Value: WS
  misc_feature: MA Experiment 20001905 PARAMETER Experiment Name: At_Drought_Reproduction_P Parameter: Timepoint (day) Value: 10
  misc_feature: MA Experiment 20001905 PARAMETER Experiment Name: At_Drought_Reproduction_P Parameter: Tissue Value: Rosettes
  misc_feature: MA Experiment 20001905 PARAMETER Experiment Name: At_Drought_Reproduction_P Parameter: Treatment Value: Drought vs. No Drought
accaacaacacaaaacttgtactcacaactaaaagaagaactcaaacgcaagacagaaagatcaatggcgagcaacggagttaccaactgtaacgcaaacgccaatgtttggcggttcaaaggaaacggtgcaacgagtgatgcggcggcggtgacgttgagaaagcttgcttttgggatgtttaaaaactgcaccatgaacagtggaaagaccattttgttcccaactcccggcgagccctccgcccattccaacttcaggacttgcccggaagccgaggaagccgttgccgcagctgcacgctccggcatggctaactcttacgcacccagccctggagttttcaaggctagaagggcggtggctgaatatttaaacggagaacttccgacgaagctgaaggccgaggatgtgtatatcaccggaggatgtaaccaagccatagagatcgtgatagattctcttgccggaaatccatccgccaacattctacttccaaggccgggatatcctcactacgatgctcgtgctgtctatagcggcctcgagattcgcaaatacgatcttctccccgagagtgattgggaaatcaatctcgatggcctcgaggcggctgcggatgagaataccgtcgcaatggtaatcatcaaccccaacaatccatgtggaaacgtctacacctacgaccatctcaacaaggtcgcggagatggctagaaaactcggtataatgataatatccgacgaagtatatgatcatgttgtatatggagacaagccttttattcccatggggaagtttgcatcaatagctccggtgatcacgctcggatccatatccaaaggatgggtcaacccaggctggagagttggctggatcgccatgaacgatcctaatggtatctttgtatctacaggggtagttcaagcaatagaggattttcttgatttaactccacagccttcatttattctccaggaagcacttcctgatatattggagaaaacacctaaagagttcttcgagaagaagatcaaagccatgagacgcaacgtcgagctttcatgtgagaggctcaaggatattccttgtctcttttgtcccaagaaacccgaatcttgttcttatttatggttgaagcttgacacatcaatgttgaataatatcaaaaatgattttgatttctgcacgaagctagttagtgaggagagtcttatccttataccaggagtggctctaggggcagagaattgggtgaggatatcgataggaaccgacgaatcagtggtacaagaaatatttgacagactaaaaggtttctatgatcgtcatgccatctccaaggaagctatcaaactcagtggccatgccattaaccagatcgtcgtctctgtcaactgattgtagtagtcctatgccacaagtccacattataatttgtgcgtaattccttaattatcaggaacacaatcaagaaaaatagcattggataatgaaataaagatgtgtgaaaaataaaaggatatttgttttc

SEQ ID NO: 29613 - protein, 466 aa, Arabidopsis thaliana
  peptide (1)..(466): Ceres Seq. ID no. 13490269
  misc_feature (123)..(441): Pfam Name: Aminotransferase class I and II Pfam Description: Aminotransferase class I and II
  misc_feature (42)..(445): Homolog of NCBI NO: 15239521 NR Description: aminotransferase, putative [Arabidopsis thaliana]
  misc_feature (37)..(452): Homolog of NCBI NO: 15236533 NR Description: aminotransferase family [Arabidopsis thaliana]
  misc_feature (37)..(453): Homolog of NCBI NO: 22328891 NR Description: aminotransferase family [Arabidopsis thaliana]
  misc_feature (28)..(386): Homolog of NCBI NO: 15235287 NR Description: aminotransferase, putative [Arabidopsis thaliana]
  misc_feature (31)..(449): Homolog of NCBI NO: 15225387 NR Description: aminotransferase, putative [Arabidopsis thaliana]
  misc_feature (31)..(449): Homolog of NCBI NO: 11527943 NR Description: ROOTY/SUPERROOT1 [Arabidopsis thaliana]
  misc_feature (31)..(449): Homolog of NCBI NO: 15809874 NR Description: At2g20610/F23N11.7 [Arabidopsis thaliana]
  misc_feature (17)..(449): Homolog of NCBI NO: 11527941 NR Description: ROOTY/SUPERROOT1 [Arabidopsis thaliana]
  misc_feature (22)..(466): Homolog of NCBI NO: 21553462 NR Description: putative tyrosine aminotransferase [Arabidopsis
  misc_feature (22)..(466): Homolog of NCBI NO: 15224631 NR Description: putative tyrosine aminotransferase
PTTQNLYSQLKEELKRKTERSMASNGVTNCNANANVWRFKGNGATSDAAAVTLRKLAFGMFKNCTMNSGKTILFPTPGEPSAHSNFRTCPEAEEAVAAAARSGMANSYAPSPGVFKARRAVAEYLNGELPTKLKAEDVYITGGCNQAIEIVIDSLAGNPSANILLPRPGYPHYDARAVYSGLEIRKYDLLPESDWEINLDGLEAAADENTVAMVIINPNNPCGNVYTYDHLNKVAEMARKLGIMIISDEVYDHVVYGDKPFIPMGKFASIAPVITLGSISKGWVNPGWRVGWIAMNDPNGIFVSTGVVQAIEDFLDLTPQPSFILQEALPDILEKTPKEFFEKKIKAMRRNVELSCERLKDIPCLFCPKKPESCSYLWLKLDTSMLNNIKNDFDFCTKLVSEESLILIPGVALGAENWVRISIGTDESVVQEIFDRLKGFYDRHAISKEAIKLSGHAINQIVVSVN

SEQ ID NO: 29614 - protein, 445 aa, Arabidopsis thaliana
  peptide (1)..(445): Ceres Seq. ID no. 13490270
  misc_feature (102)..(420): Pfam Name: Aminotransferase class I and II Pfam Description: Aminotransferase class I and II
  misc_feature (21)..(424): Homolog of NCBI NO: 15239521 NR Description: aminotransferase, putative [Arabidopsis thaliana]
  misc_feature (16)..(431): Homolog of NCBI NO: 15236533 NR Description: aminotransferase family [Arabidopsis thaliana]
  misc_feature (16)..(432): Homolog of NCBI NO: 22328891 NR Description: aminotransferase family [Arabidopsis thaliana]
  misc_feature (7)..(365): Homolog of NCBI NO: 15235287 NR Description: aminotransferase, putative [Arabidopsis thaliana]
  misc_feature (10)..(428): Homolog of NCBI NO: 15225387 NR Description: aminotransferase, putative [Arabidopsis thaliana]
  misc_feature (10)..(428): Homolog of NCBI NO: 11527943 NR Description: ROOTY/SUPERROOT1 [Arabidopsis thaliana]
  misc_feature (10)..(428): Homolog of NCBI NO: 15809874 NR Description: At2g20610/F23N11.7 [Arabidopsis thaliana]
  misc_feature (1)..(428): Homolog of NCBI NO: 11527941 NR Description: ROOTY/SUPERROOT1 [Arabidopsis thaliana]
  misc_feature (1)..(445): Homolog of NCBI NO: 21553462 NR Description: putative tyrosine aminotransferase [Arabidopsis
  misc_feature (1)..(445): Homolog of NCBI NO: 15224631 NR Description: putative tyrosine aminotransferase
MASNGVTNCNANANVWRFKGNGATSDAAAVTLRKLAFGMFKNCTMNSGKTILFPTPGEPSAHSNFRTCPEAEEAVAAAARSGMANSYAPSPGVFKARRAVAEYLNGELPTKLKAEDVYITGGCNQAIEIVIDSLAGNPSANILLPRPGYPHYDARAVYSGLEIRKYDLLPESDWEINLDGLEAAADENTVAMVIINPNNPCGNVYTYDHLNKVAEMARKLGIMIISDEVYDHVVYGDKPFIPMGKFASIAPVITLGSISKGWVNPGWRVGWIAMNDPNGIFVSTGVVQAIEDFLDLTPQPSFILQEALPDILEKTPKEFFEKKIKAMRRNVELSCERLKDIPCLFCPKKPESCSYLWLKLDTSMLNNIKNDFDFCTKLVSEESLILIPGVALGAENWVRISIGTDESVVQEIFDRLKGFYDRHAISKEAIKLSGHAINQIVVSVN

SEQ ID NO: 29615 - protein, 407 aa, Arabidopsis thaliana
  peptide (1)..(407): Ceres Seq. ID no. 13490271
  misc_feature (64)..(382): Pfam Name: Aminotransferase class I and II Pfam Description: Aminotransferase class I and II
  misc_feature (1)..(386): Homolog of NCBI NO: 15239521 NR Description: aminotransferase, putative [Arabidopsis thaliana]
  misc_feature (1)..(393): Homolog of NCBI NO: 15236533 NR Description: aminotransferase family [Arabidopsis thaliana]
  misc_feature (1)..(394): Homolog of NCBI NO: 22328891 NR Description: aminotransferase family [Arabidopsis thaliana]
  misc_feature (1)..(327): Homolog of NCBI NO: 15235287 NR Description: aminotransferase, putative [Arabidopsis thaliana]
  misc_feature (1)..(390): Homolog of NCBI NO: 15225387 NR Description: aminotransferase, putative [Arabidopsis thaliana]
  misc_feature (1)..(390): Homolog of NCBI NO: 11527943 NR Description: ROOTY/SUPERROOT1 [Arabidopsis thaliana]
  misc_feature (1)..(390): Homolog of NCBI NO: 15809874 NR Description: At2g20610/F23N11.7 [Arabidopsis thaliana]
  misc_feature (1)..(390): Homolog of NCBI NO: 11527941 NR Description: ROOTY/SUPERROOT1 [Arabidopsis thaliana]
  misc_feature (1)..(407): Homolog of NCBI NO: 21553462 NR Description: putative tyrosine aminotransferase [Arabidopsis
  misc_feature (1)..(407): Homolog of NCBI NO: 15224631 NR Description: putative tyrosine aminotransferase
MFKNCTMNSGKTILFPTPGEPSAHSNFRTCPEAEEAVAAAARSGMANSYAPSPGVFKARRAVAEYLNGELPTKLKAEDVYITGGCNQAIEIVIDSLAGNPSANILLPRPGYPHYDARAVYSGLEIRKYDLLPESDWEINLDGLEAAADENTVAMVIINPNNPCGNVYTYDHLNKVAEMARKLGIMIISDEVYDHVVYGDKPFIPMGKFASIAPVITLGSISKGWVNPGWRVGWIAMNDPNGIFVSTGVVQAIEDFLDLTPQPSFILQEALPDILEKTPKEFFEKKIKAMRRNVELSCERLKDIPCLFCPKKPESCSYLWLKLDTSMLNNIKNDFDFCTKLVSEESLILIPGVALGAENWVRISIGTDESVVQEIFDRLKGFYDRHAISKEAIKLSGHAINQIVVSVN

SEQ ID NO: 29616 - DNA, 1032 bp, Arabidopsis thaliana
  misc_feature (1)..(1032): Ceres Seq. ID no. 13490453
  misc_feature: MA Experiment ID: 108488 Result: Down-regulated in Transcription
  misc_feature: MA Experiment ID: 108489 Result: Up-regulated in Transcription
  misc_feature: MA Experiment ID: 20000089 Result: Down-regulated in Transcription
  misc_feature: MA Experiment ID: 20000090 Result: Down-regulated in Transcription
  misc_feature: MA Experiment ID: 20000111 Result: Up-regulated in Transcription
  misc_feature: MA Experiment 20000111 PARAMETER Experiment Name: At_42deg_Heat_cDNA_P Parameter: Temperature (deg C) Value: 42 vs. 22
  misc_feature: MA Experiment 20000111 PARAMETER Experiment Name: At_42deg_Heat_cDNA_P Parameter: Timepoint (hr) Value: 6
  misc_feature: MA Experiment 20000111 PARAMETER Experiment Name: At_42deg_Heat_cDNA_P Parameter: Tissue Value: Aerial
  misc_feature: MA Experiment ID: 20001905 Result: Up-regulated in Transcription
  misc_feature: MA Experiment 20001905 PARAMETER Experiment Name: At_Drought_Reproduction_P Parameter: Age (day) Value: 40
  misc_feature: MA Experiment 20001905 PARAMETER Experiment Name: At_Drought_Reproduction_P Parameter: Organism Value: A. thaliana
  misc_feature: MA Experiment 20001905 PARAMETER Experiment Name: At_Drought_Reproduction_P Parameter: Plant Line Value: WS
  misc_feature: MA Experiment 20001905 PARAMETER Experiment Name: At_Drought_Reproduction_P Parameter: Timepoint (day) Value: 10
  misc_feature: MA Experiment 20001905 PARAMETER Experiment Name: At_Drought_Reproduction_P Parameter: Tissue Value: Rosettes
  misc_feature: MA Experiment 20001905 PARAMETER Experiment Name: At_Drought_Reproduction_P Parameter: Treatment Value: Drought vs. No Drought
agaggggtagtttggtaaattttcaaatgcccttatctcatttccgatcctccttcttcttgctaccgccttcgcacccattcataaaaaaggaaagacgcaatcttttcttgtctcttccattgcttcaaatcctcctaataaagctttcctctttcactttctaatctctttaatccgtttaaatccaatcccaaatacagattttgattacaaaaatctaacattttgctgatttgtgttttagggttctctcgtgttttttatgattttgattcccgtaaagattcaatcacttttctcatatctcttgttactgaatttgatccaatcgatcgataaaccaaacccagaagctatgagagtgcacccaattcccagaaacatcaacaacacattgatccatcatcatcatcataacccgacccgagaacccggaaagaatctccgacgattaccacatatcttcaaccgtgttctggagctaccattgaggtcagaagcagatgtagcagtggaagagagacacgactgttttcgatttgtggcggagacggtaggtctctgtaacggcgatggagaaatgagggcttatatggttgagattcatcctggtataaccaagatcgttgtgaggacaaatgggtcttcttctcttggtttgtctttagacgaattagagcttgacgtgtggcgttttaggttaccggaatcaactaggcctgagcttgttactgttgcttgtgttgatggtgatttgattgttactgtgcctaagaatgctgaagaagaagatgatgatggtggtggtggtgattttggacaaggtattggtagtggaaggcttgtgcttgttcagtgaatcaaagtaatgtcctctatgtaacatgagaagaagactaatctctaatcttcttcgtttcgttgatattgtgtagccttctgtttttgttgttggcaataaaagaaaagattgaatctttgatgttctcttattttgtaagatcaacaagggttgtttaaggttgtacc

SEQ ID NO: 29617 - protein, 198 aa, Arabidopsis thaliana
  peptide (1)..(198): Ceres Seq. ID no. 13490454
  misc_feature (59)..(171): Homolog of NCBI NO: 22773244 NR Description: Hypothetical protein [Oryza sativa (japonica
  misc_feature (32)..(197): Homolog of NCBI NO: 34394452 NR Description: hypothetical protein [Oryza sativa (japonica
  misc_feature (32)..(171): Homolog of NCBI NO: 15233585 NR Description: expressed protein [Arabidopsis thaliana]
  misc_feature (32)..(198): Homolog of NCBI NO: 11994285 NR Description: emb|CAB10262.1~gene_id:F16J14.9~similar to
  misc_feature (1)..(198): Homolog of NCBI NO: 21553463 NR Description: unknown [Arabidopsis thaliana]
  misc_feature (1)..(198): Homolog of NCBI NO: 18403425 NR Description: expressed protein [Arabidopsis thaliana]
MILIPVKIQSLFSYLLLLNLIQSIDKPNPEAMRVHPIPRNINNTLIHHHHHNPTREPGKNLRRLPHIFNRVLELPLRSEADVAVEERHDCFRFVAETVGLCNGDGEMRAYMVEIHPGITKIVVRTNGSSSLGLSLDELELDVWRFRLPESTRPELVTVACVDGDLIVTVPKNAEEEDDDGGGGDFGQGIGSGRLVLVQ

SEQ ID NO: 29618 - protein, 167 aa, Arabidopsis thaliana
  peptide (1)..(167): Ceres Seq. ID no. 13490455
  misc_feature (28)..(140): Homolog of NCBI NO: 22773244 NR Description: Hypothetical protein [Oryza sativa (japonica
  misc_feature (1)..(166): Homolog of NCBI NO: 34394452 NR Description: hypothetical protein [Oryza sativa (japonica
  misc_feature (1)..(140): Homolog of NCBI NO: 15233585 NR Description: expressed protein [Arabidopsis thaliana]
  misc_feature (1)..(167): Homolog of NCBI NO: 11994285 NR Description: emb|CAB10262.1~gene_id:F16J14.9~similar to
  misc_feature (1)..(167): Homolog of NCBI NO: 21553463 NR Description: unknown [Arabidopsis thaliana]
  misc_feature (1)..(167): Homolog of NCBI NO: 18403425 NR Description: expressed protein [Arabidopsis thaliana]
MRVHPIPRNINNTLIHHHHHNPTREPGKNLRRLPHIFNRVLELPLRSEADVAVEERHDCFRFVAETVGLCNGDGEMRAYMVEIHPGITKIVVRTNGSSSLGLSLDELELDVWRFRLPESTRPELVTVACVDGDLIVTVPKNAEEEDDDGGGGDFGQGIGSGRLVLVQ

SEQ ID NO: 29619 - DNA, 1281 bp, Arabidopsis thaliana
  misc_feature (1)..(1281): Ceres Seq. ID no. 13487403
  misc_feature: MA Experiment ID: 108434 Result: Down-regulated in Transcription
  misc_feature: MA Experiment 108434 PARAMETER Experiment Name: At_Root_Tips_cDNA_P Parameter: Tissue Value: Root Tips
  misc_feature: MA Experiment ID: 108572 Result: Up-regulated in Transcription
  misc_feature: MA Experiment 108572 PARAMETER Experiment Name: At_Drought_cDNA_P Parameter: Timepoint (hr) Value: 1
  misc_feature: MA Experiment 108572 PARAMETER Experiment Name: At_Drought_cDNA_P Parameter: Tissue Value: Aerial
  misc_feature: MA Experiment 108572 PARAMETER Experiment Name: At_Drought_cDNA_P Parameter: Treatment Value: Drought vs. No Drought
  misc_feature: MA Experiment ID: 108573 Result: Up-regulated in Transcription
  misc_feature: MA Experiment 108573 PARAMETER Experiment Name: At_Drought_cDNA_P Parameter: Timepoint (hr) Value: 6
  misc_feature: MA Experiment 108573 PARAMETER Experiment Name: At_Drought_cDNA_P Parameter: Tissue Value: Aerial
  misc_feature: MA Experiment 108573 PARAMETER Experiment Name: At_Drought_cDNA_P Parameter: Treatment Value: Drought vs. No Drought
  misc_feature: MA Experiment ID: 108585 Result: Up-regulated in Transcription
  misc_feature: MA Experiment 108585 PARAMETER Experiment Name: At_5mM_NaNP_cDNA_P Parameter: Timepoint (hr) Value: 6
  misc_feature: MA Experiment 108585 PARAMETER Experiment Name: At_5mM_NaNP_cDNA_P Parameter: Tissue Value: Aerial
  misc_feature: MA Experiment 108585 PARAMETER Experiment Name: At_5mM_NaNP_cDNA_P Parameter: Treatment Value: null
  misc_feature: MA Experiment ID: 20000111 Result: Up-regulated in Transcription
  misc_feature: MA Experiment 20000111 PARAMETER Experiment Name: At_42deg_Heat_cDNA_P Parameter: Temperature (deg C) Value: 42 vs. 22
  misc_feature: MA Experiment 20000111 PARAMETER Experiment Name: At_42deg_Heat_cDNA_P Parameter: Timepoint (hr) Value: 6
  misc_feature: MA Experiment 20000111 PARAMETER Experiment Name: At_42deg_Heat_cDNA_P Parameter: Tissue Value: Aerial
  misc_feature: MA Experiment ID: 20000113 Result: Up-regulated in Transcription
  misc_feature: MA Experiment 20000113 PARAMETER Experiment Name: At_42deg_Heat_cDNA_P Parameter: Temperature (deg C) Value: 42 vs. 22
  misc_feature: MA Experiment 20000113 PARAMETER Experiment Name: At_42deg_Heat_cDNA_P Parameter: Timepoint (hr) Value: 8
  misc_feature: MA Experiment 20000113 PARAMETER Experiment Name: At_42deg_Heat_cDNA_P Parameter: Tissue Value: Aerial
  misc_feature: MA Experiment ID: 20000173 Result: Up-regulated in Transcription
  misc_feature: MA Experiment 20000173 PARAMETER Experiment Name: At_42deg_Heat_P Parameter: Age (day) Value: 14
  misc_feature: MA Experiment 20000173 PARAMETER Experiment Name: At_42deg_Heat_P Parameter: Organism Value: A. thaliana
  misc_feature: MA Experiment 20000173 PARAMETER Experiment Name: At_42deg_Heat_P Parameter: Plant Line Value: WS
  misc_feature: MA Experiment 20000173 PARAMETER Experiment Name: At_42deg_Heat_P Parameter: Temperature (deg C) Value: 42 vs. 22
  misc_feature: MA Experiment 20000173 PARAMETER Experiment Name: At_42deg_Heat_P Parameter: Timepoint (hr) Value: 6
  misc_feature: MA Experiment 20000173 PARAMETER Experiment Name: At_42deg_Heat_P Parameter: Tissue Value: Aerial
  misc_feature: MA Experiment ID: 20000179 Result: Up-regulated in Transcription
  misc_feature: MA Experiment 20000179 PARAMETER Experiment Name: At_Germinating_Seeds_P Parameter: Age (hr) Value: 6 vs. 0
  misc_feature: MA Experiment 20000179 PARAMETER Experiment Name: At_Germinating_Seeds_P Parameter: Tissue Value: Germinating Seeds
  misc_feature: MA Experiment ID: 20000227 Result: Down-regulated in Transcription
  misc_feature: MA Experiment 20000227 PARAMETER Experiment Name: At_Root-Tips-vs-Tops_P Parameter: Tissue Value: Root Tips vs. Root Tops
  misc_feature: MA Experiment ID: 20001451 Result: Up-regulated in Transcription
  misc_feature: MA Experiment 20001451 PARAMETER Experiment Name: At_Far-red-induction_P Parameter: Age (day) Value: 7
  misc_feature: MA Experiment 20001451 PARAMETER Experiment Name: At_Far-red-induction_P Parameter: Light Value: Far-red vs. White
  misc_feature: MA Experiment 20001451 PARAMETER Experiment Name: At_Far-red-induction_P Parameter: Organism Value: A. thaliana
  misc_feature: MA Experiment 20001451 PARAMETER Experiment Name: At_Far-red-induction_P Parameter: Plant Line Value: Columbia
  misc_feature: MA Experiment 20001451 PARAMETER Experiment Name: At_Far-red-induction_P Parameter: Timepoint (hr) Value: 24
  misc_feature: MA Experiment 20001451 PARAMETER Experiment Name: At_Far-red-induction_P Parameter: Tissue Value: Whole Plant
  misc_feature: MA Experiment ID: 20001905 Result: Up-regulated in Transcription
  misc_feature: MA Experiment 20001905 PARAMETER Experiment Name: At_Drought_Reproduction_P Parameter: Age (day) Value: 40
  misc_feature: MA Experiment 20001905 PARAMETER Experiment Name: At_Drought_Reproduction_P Parameter: Organism Value: A. thaliana
  misc_feature: MA Experiment 20001905 PARAMETER Experiment Name: At_Drought_Reproduction_P Parameter: Plant Line Value: WS
  misc_feature: MA Experiment 20001905 PARAMETER Experiment Name: At_Drought_Reproduction_P Parameter: Timepoint (day) Value: 10
  misc_feature: MA Experiment 20001905 PARAMETER Experiment Name: At_Drought_Reproduction_P Parameter: Tissue Value: Rosettes
  misc_feature: MA Experiment 20001905 PARAMETER Experiment Name: At_Drought_Reproduction_P Parameter: Treatment Value: Drought vs. No Drought
  misc_feature: MA Experiment ID: 20001911 Result: Up-regulated in Transcription
  misc_feature: MA Experiment 20001911 PARAMETER Experiment Name: At_Drought_Reproduction_P Parameter: Age (day) Value: 40
  misc_feature: MA Experiment 20001911 PARAMETER Experiment Name: At_Drought_Reproduction_P Parameter: Organism Value: A. thaliana
  misc_feature: MA Experiment 20001911 PARAMETER Experiment Name: At_Drought_Reproduction_P Parameter: Plant Line Value: WS
  misc_feature: MA Experiment 20001911 PARAMETER Experiment Name: At_Drought_Reproduction_P Parameter: Timepoint (day) Value: 10
  misc_feature: MA Experiment 20001911 PARAMETER Experiment Name: At_Drought_Reproduction_P Parameter: Tissue Value: Flowers
  misc_feature: MA Experiment 20001911 PARAMETER Experiment Name: At_Drought_Reproduction_P Parameter: Treatment Value: Drought vs. No Drought
gctttttgtgttgaagagagagtttcctatcttctccattcctcccaccatctccctcatcttcatcttcctctctctttctctctttctcaacaatctctattagatctttctccattaccattacctctggctttctcttaaatccaccatcatgaggagaggaagaggctcttccgccgtcgccggacctaccgtcgttgccgccatcaacggatctgtaaaagaaatcagattcagaggcgtaaggaagagaccttggggacgattcgcagctgagatccgtgatccatggaaaaaagctcgtgtttggttaggtactttcgattccgccgaagaagctgctcgcgcttacgactccgccgctcgtaacctccgtggtcctaaagccaaaactaatttccccatcgattcttcttctcctcctcctcctaatctccgatttaatcagattcgtaatcaaaatcaaaaccaagtcgatccgtttatggaccaccggttattcaccgaccatcaacaacagttcccgattgttaaccggcctactagtagcagcatgagcagcaccgttgaatcgtttagcggacccagacctacgacgatgaaaccggccacgacgaagagatatcctagaactccaccggttgttccggaggattgtcacagcgattgcgattcgtcgtcgtctgtaatcgacgacgacgacgatatcgcatcgtcttcacggcgacggaatccgccgtttcaattcgatcttaattttccaccgttggattgtgttgacttgttcaatggcgctgatgatcttcactgtaccgatctacgtctctaatgaattggtaaaatcaaactcaaaatcacagatccgtgatcggtttgattttaatcgaaaacacacaacaaaatccttttttttttttttttaaattttctgtttcgttgatctcatataatttttactatgcgggagaaatagaaagacaaagaaacgaagaagaagaagaagatggtgatgagcttgagagagcttgagctggttctgtgtttcttctgtgatgatattgtaagagtattattattttactattattactaaatcttcaaaaccaagaagaagaagaccgaacacgatgatctgttgtgtctgtttgttttactgtaagaaaaacgcagatctgggtttcgtttttttcttgagatagatcaaacaacccccatctttgtaacatatacatttggaacactcatgattctaaataaaaaatctagaatctttttttc

SEQ ID NO: 29620 - protein, 225 aa, Arabidopsis thaliana
  peptide (1)..(225): Ceres Seq. ID no. 13487404
  misc_feature (25)..(89): Pfam Name: AP2 domain Pfam Description: AP2 domain
  misc_feature (22)..(205): Homolog of NCBI NO: 20340233 NR Description: ethylene responsive element binding factor 4-like
  misc_feature (23)..(92): Homolog of NCBI NO: 7489114 NR Description: DNA binding protein EREBP-3 - common tobacco
  misc_feature (7)..(93): Homolog of NCBI NO: 38345793 NR Description: OSJNBa0085I10.10 [Oryza sativa (japonica
  misc_feature (20)..(89): Homolog of NCBI NO: 8809573 NR Description: ethylene-responsive element binding factor
  misc_feature (20)..(106): Homolog of NCBI NO: 4099914 NR Description: ethylene-responsive element binding protein
  misc_feature (14)..(106): Homolog of NCBI NO: 4099921 NR Description: EREBP-3 homolog [Stylosanthes hamata]
  misc_feature (105)..(225): Homolog of NCBI NO: 15231110 NR Description: ethylene responsive element binding factor 7
  misc_feature (1)..(175): Homolog of NCBI NO: 15231110 NR Description: ethylene responsive element binding factor 7
  misc_feature (1)..(225): Homolog of NCBI NO: 4587373 NR Description: ethylene responsive element binding factor
  misc_feature (1)..(225): Homolog of NCBI NO: 15223609 NR Description: ethylene responsive element binding factor 3
MRRGRGSSAVAGPTVVAAINGSVKEIRFRGVRKRPWGRFAAEIRDPWKKARVWLGTFDSAEEAARAYDSAARNLRGPKAKTNFPIDSSSPPPPNLRFNQIRNQNQNQVDPFMDHRLFTDHQQQFPIVNRPTSSSMSSTVESFSGPRPTTMKPATTKRYPRTPPVVPEDCHSDCDSSSSVIDDDDDIASSSRRRNPPFQFDLNFPPLDCVDLFNGADDLHCTDLRL

SEQ ID NO: 29621 - protein, 114 aa, Arabidopsis thaliana
  peptide (1)..(114): Ceres Seq. ID no. 13487405
  misc_feature (1)..(78): Homolog of NCBI NO: 22655200 NR Description: putative Ap2 domain protein [Arabidopsis thaliana]
  misc_feature (1)..(78): Homolog of NCBI NO: 15236595 NR Description: AP2 domain transcription factor, putative
  misc_feature (1)..(55): Homolog of NCBI NO: 15240610 NR Description: putative protein; protein id: At5g50080.1
  misc_feature (1)..(48): Homolog of NCBI NO: 6560760 NR Description: F3M18.21 [Arabidopsis thaliana]
  misc_feature (1)..(111): Homolog of NCBI NO: 34904146 NR Description: unnamed protein product [Oryza sativa (japonica
  misc_feature (1)..(94): Homolog of NCBI NO: 20340233 NR Description: ethylene responsive element binding factor 4-like
  misc_feature (1)..(114): Homolog of NCBI NO: 15231110 NR Description: ethylene responsive element binding factor 7
  misc_feature (1)..(64): Homolog of NCBI NO: 15231110 NR Description: ethylene responsive element binding factor 7
  misc_feature (1)..(114): Homolog of NCBI NO: 4587373 NR Description: ethylene responsive element binding factor
  misc_feature (1)..(114): Homolog of NCBI NO: 15223609 NR Description: ethylene responsive element binding factor 3
MDHRLFTDHQQQFPIVNRPTSSSMSSTVESFSGPRPTTMKPATTKRYPRTPPVVPEDCHSDCDSSSSVIDDDDDIASSSRRRNPPFQFDLNFPPLDCVDLFNGADDLHCTDLRL

SEQ ID NO: 29622 - DNA, 1635 bp, Arabidopsis thaliana
  misc_feature (1)..(1635): Ceres Seq. ID no. 13497565
  misc_feature: MA Experiment ID: 108576 Result: Up-regulated in Transcription
  misc_feature: MA Experiment 108576 PARAMETER Experiment Name: At_42deg_Heat_cDNA_P Parameter: Temperature (deg C) Value: 42 vs. 22
  misc_feature: MA Experiment 108576 PARAMETER Experiment Name: At_42deg_Heat_cDNA_P Parameter: Timepoint (hr) Value: 1
  misc_feature: MA Experiment 108576 PARAMETER Experiment Name: At_42deg_Heat_cDNA_P Parameter: Tissue Value: Aerial
  misc_feature: MA Experiment ID: 108577 Result: Up-regulated in Transcription
  misc_feature: MA Experiment 108577 PARAMETER Experiment Name: At_42deg_Heat_cDNA_P Parameter: Temperature (deg C) Value: 42 vs. 22
  misc_feature: MA Experiment 108577 PARAMETER Experiment Name: At_42deg_Heat_cDNA_P Parameter: Timepoint (hr) Value: 6
  misc_feature: MA Experiment 108577 PARAMETER Experiment Name: At_42deg_Heat_cDNA_P Parameter: Tissue Value: Aerial
  misc_feature: MA Experiment ID: 20000111 Result: Up-regulated in Transcription
  misc_feature: MA Experiment 20000111 PARAMETER Experiment Name: At_42deg_Heat_cDNA_P Parameter: Temperature (deg C) Value: 42 vs. 22
  misc_feature: MA Experiment 20000111 PARAMETER Experiment Name: At_42deg_Heat_cDNA_P Parameter: Timepoint (hr) Value: 6
  misc_feature: MA Experiment 20000111 PARAMETER Experiment Name: At_42deg_Heat_cDNA_P Parameter: Tissue Value: Aerial
  misc_feature: MA Experiment ID: 20000171 Result: Up-regulated in Transcription
  misc_feature: MA Experiment 20000171 PARAMETER Experiment Name: At_42deg_Heat_P Parameter: Age (day) Value: 14
  misc_feature: MA Experiment 20000171 PARAMETER Experiment Name: At_42deg_Heat_P Parameter: Organism Value: A. thaliana
  misc_feature: MA Experiment 20000171 PARAMETER Experiment Name: At_42deg_Heat_P Parameter: Plant Line Value: WS
  misc_feature: MA Experiment 20000171 PARAMETER Experiment Name: At_42deg_Heat_P Parameter: Temperature (deg C) Value: 42 vs. 22
  misc_feature: MA Experiment 20000171 PARAMETER Experiment Name: At_42deg_Heat_P Parameter: Timepoint (hr) Value: 1
  misc_feature: MA Experiment 20000171 PARAMETER Experiment Name: At_42deg_Heat_P Parameter: Tissue Value: Aerial
  misc_feature: MA Experiment ID: 20000173 Result: Up-regulated in Transcription
  misc_feature: MA Experiment 20000173 PARAMETER Experiment Name: At_42deg_Heat_P Parameter: Age (day) Value: 14
  misc_feature: MA Experiment 20000173 PARAMETER Experiment Name: At_42deg_Heat_P Parameter: Organism Value: A. thaliana
  misc_feature: MA Experiment 20000173 PARAMETER Experiment Name: At_42deg_Heat_P Parameter: Plant Line Value: WS
  misc_feature: MA Experiment 20000173 PARAMETER Experiment Name: At_42deg_Heat_P Parameter: Temperature (deg C) Value: 42 vs. 22
  misc_feature: MA Experiment 20000173 PARAMETER Experiment Name: At_42deg_Heat_P Parameter: Timepoint (hr) Value: 6
  misc_feature: MA Experiment 20000173 PARAMETER Experiment Name: At_42deg_Heat_P Parameter: Tissue Value: Aerial
aaacgaaaaccctcgggattcctctgcttctgtctcgtccgtcgtcgtcaatttctctgcatcagagattccggtgtccttcttcctttcactcgcgtataacctcttttccttgacgttgtctccgtgagctctctgtgctttgactgcaaccatgtcgactattatgcagaagatcaaagaaattgaagatgagatggctaaaacacagaagaataaagctacttctcatcatctgggtttgttaaaggccaagcttgctaagcttcggagggaccttcttgcaccgcctaccaaaggtggcggtggtggtgctggagaaggttttgatgtgactaaaagtggagattctagagttggactggtcggatttccttcggttggaaaatctacgctattaaacaagctgactgggacattttccgaggttgcttcttatgagttcacgactttgacatgcattcctggtgttatcacatatcgtggagctaaaatccagttattagatcttcctggtattattgagggtgctaaagatggaaaaggtagaggaagacaggttataagtacggctaggacatgcaactgcatcttaatagttcttgatgccataaaaccaattactcacaagcgtctcattgaaaaagagctcgaaggattcggaataaggttgaacaaggagccaccaaatttaacatttaggaaaaaagacaaaggtggtatcaatctaacttctacagtcgctgtcacacaccttgaccttgacaccgtcaaggcgatttgcggtgagtacaggatgcacaatgctgacatcaccctgcgctacgatgcaaccgctgatgacctcattgatgtcatcgagggcagtcggatttatatgccctgtatctatgctgtcaacaagatcgattcaatcacacttgaggaacttgaaattttggacaaacttcctcattactgtcctgtcagtgcgcatctggagtggaatcttgatggacttctggacaagatatgggaatacttggatctaactcgaatctacacaaaaccaaaggcaatgaatccggattatgatgatcccgtaatcttatcatccaagaagagaacagtagaggacttctgcatccggattcacaaagacatgcttaaacaattcaagtacgctctggtttggggttcaagtgccaaacacaagccacaaagagttggaaaggaacacgagcttgaggacgaggatgttgttcagatcgttaaaaagatatgatttttgcagataatggagagcagtcaagagaccaaccaaagtagccataatgagatctcctataggaaggtcaggatttcttttggtttctcagctttatctttcttttgtaattgtattattatatccagacgaaatctgtgtctacacccttttttatgtcttattagatacttttgtcttcttccaataatactattaagcatgtgattgatgttgtcggaacacctcctattatctccagtatgggtttgcctagattttctcctcccttgtttttatgtatgcaactagacttttttggattttatttactaaacatatgattcagtttttcttcatgtaataaagaaaaactgttaaaacggcct

SEQ ID NO: 29623 - protein, 369 aa, Arabidopsis thaliana
  peptide (1)..(369): Ceres Seq. ID no. 13497566
  misc_feature (2)..(270): Pfam Name: GTP1/OBG family Pfam Description: GTP1/OBG family
  misc_feature (1)..(368): Homolog of NCBI NO: 26348781 NR Description: unnamed protein product [Mus musculus]
  misc_feature (1)..(368): Homolog of NCBI NO: 346685 NR Description: GTP-binding protein DRG [validated] - mouse
  misc_feature (1)..(368): Homolog of NCBI NO: 1169421 NR Description: Developmentally regulated GTP-binding protein 1
  misc_feature (1)..(368): Homolog of NCBI NO: 18089152 NR Description: developmentally regulated GTP binding protein 1
  misc_feature (1)..(368): Homolog of NCBI NO: 6681225 NR Description: developmentally regulated GTP binding protein 1
  misc_feature (1)..(368): Homolog of NCBI NO: 24586704 NR Description: developmentally regulated GTP binding protein 1
  misc_feature (1)..(368): Homolog of NCBI NO: 4758796 NR Description: developmentally regulated GTP binding protein 1
  misc_feature (1)..(369): Homolog of NCBI NO: 30585289 NR Description: Homo sapiens developmentally regulated GTP
  misc_feature (1)..(369): Homolog of NCBI NO: 33146858 NR Description: putative GTP-binding protein DRG
  misc_feature (1)..(369): Homolog of NCBI NO: 15235111 NR Description: GTP-binding - like protein [Arabidopsis thaliana]
MSTIMQKIKEIEDEMAKTQKNKATSHHLGLLKAKLAKLRRDLLAPPTKGGGGGAGEGFDVTKSGDSRVGLVGFPSVGKSTLLNKLTGTFSEVASYEFTTLTCIPGVITYRGAKIQLLDLPGIIEGAKDGKGRGRQVISTARTCNCILIVLDAIKPITHKRLIEKELEGFGIRLNKEPPNLTFRKKDKGGINLTSTVAVTHLDLDTVKAICGEYRMHNADITLRYDATADDLIDVIEGSRIYMPCIYAVNKIDSITLEELEILDKLPHYCPVSAHLEWNLDGLLDKIWEYLDLTRIYTKPKAMNPDYDDPVILSSKKRTVEDFCIRIHKDMLKQFKYALVWGSSAKHKPQRVGKEHELEDEDVVQIVKKI

SEQ ID NO: 29624 - protein, 365 aa, Arabidopsis thaliana
  peptide (1)..(365): Ceres Seq. ID no. 13497567
  misc_feature (1)..(266): Pfam Name: GTP1/OBG family Pfam Description: GTP1/OBG family
  misc_feature (1)..(364): Homolog of NCBI NO: 26348781 NR Description: unnamed protein product [Mus musculus]
  misc_feature (1)..(364): Homolog of NCBI NO: 346685 NR Description: GTP-binding protein DRG [validated] - mouse
  misc_feature (1)..(364): Homolog of NCBI NO: 1169421 NR Description: Developmentally regulated GTP-binding protein 1
  misc_feature (1)..(364): Homolog of NCBI NO: 18089152 NR Description: developmentally regulated GTP binding protein 1
  misc_feature (1)..(364): Homolog of NCBI NO: 6681225 NR Description: developmentally regulated GTP binding protein 1
  misc_feature (1)..(364): Homolog of NCBI NO: 24586704 NR Description: developmentally regulated GTP binding protein 1
  misc_feature (1)..(364): Homolog of NCBI NO: 4758796 NR Description: developmentally regulated GTP binding protein 1
  misc_feature (1)..(365): Homolog of NCBI NO: 30585289 NR Description: Homo sapiens developmentally regulated GTP
  misc_feature (1)..(365): Homolog of NCBI NO: 33146858 NR Description: putative GTP-binding protein DRG
  misc_feature (1)..(365): Homolog of NCBI NO: 15235111 NR Description: GTP-binding - like protein [Arabidopsis thaliana]
MQKIKEIEDEMAKTQKNKATSHHLGLLKAKLAKLRRDLLAPPTKGGGGGAGEGFDVTKSGDSRVGLVGFPSVGKSTLLNKLTGTFSEVASYEFTTLTCIPGVITYRGAKIQLLDLPGIIEGAKDGKGRGRQVISTARTCNCILIVLDAIKPITHKRLIEKELEGFGIRLNKEPPNLTFRKKDKGGINLTSTVAVTHLDLDTVKAICGEYRMHNADITLRYDATADDLIDVIEGSRIYMPCIYAVNKIDSITLEELEILDKLPHYCPVSAHLEWNLDGLLDKIWEYLDLTRIYTKPKAMNPDYDDPVILSSKKRTVEDFCIRIHKDMLKQFKYALVWGSSAKHKPQRVGKEHELEDEDVVQIVKKI

SEQ ID NO: 29625 - protein, 355 aa, Arabidopsis thaliana
  peptide (1)..(355): Ceres Seq. ID no. 13497568
  misc_feature (1)..(256): Pfam Name: GTP1/OBG family Pfam Description: GTP1/OBG family
  misc_feature (1)..(354): Homolog of NCBI NO: 26348781 NR Description: unnamed protein product [Mus musculus]
  misc_feature (1)..(354): Homolog of NCBI NO: 346685 NR Description: GTP-binding protein DRG [validated] - mouse
  misc_feature (1)..(354): Homolog of NCBI NO: 1169421 NR Description: Developmentally regulated GTP-binding protein 1
  misc_feature (1)..(354): Homolog of NCBI NO: 18089152 NR Description: developmentally regulated GTP binding protein 1
  misc_feature (1)..(354): Homolog of NCBI NO: 6681225 NR Description: developmentally regulated GTP binding protein 1
  misc_feature (1)..(354): Homolog of NCBI NO: 24586704 NR Description: developmentally regulated GTP binding protein 1
  misc_feature (1)..(354): Homolog of NCBI NO: 4758796 NR Description: developmentally regulated GTP binding protein 1
  misc_feature (1)..(355): Homolog of NCBI NO: 30585289 NR Description: Homo sapiens developmentally regulated GTP
  misc_feature (1)..(355): Homolog of NCBI NO: 33146858 NR Description: putative GTP-binding protein DRG
  misc_feature (1)..(355): Homolog of NCBI NO: 15235111 NR Description: GTP-binding - like protein [Arabidopsis thaliana]
MAKTQKNKATSHHLGLLKAKLAKLRRDLLAPPTKGGGGGAGEGFDVTKSGDSRVGLVGFPSVGKSTLLNKLTGTFSEVASYEFTTLTCIPGVITYRGAKIQLLDLPGIIEGAKDGKGRGRQVISTARTCNCILIVLDAIKPITHKRLIEKELEGFGIRLNKEPPNLTFRKKDKGGINLTSTVAVTHLDLDTVKAICGEYRMHNADITLRYDATADDLIDVIEGSRIYMPCIYAVNKIDSITLEELEILDKLPHYCPVSAHLEWNLDGLLDKIWEYLDLTRIYTKPKAMNPDYDDPVILSSKKRTVEDFCIRIHKDMLKQFKYALVWGSSAKHKPQRVGKEHELEDEDVVQIVKKI

SEQ ID NO: 29626 - DNA, 1518 bp, Arabidopsis thaliana; identical to SEQ ID NO: 29022
  misc_feature (1)..(1518): Ceres Seq. ID no. 12371601
  misc_feature: MA Experiment ID: 20000030 Result: Down-regulated in Transcription
  misc_feature: MA Experiment 20000030 PARAMETER Experiment Name: At_CS6630_Roots_cDNA_P Parameter: Plant Line Value: CS6630 vs. WS
  misc_feature: MA Experiment 20000030 PARAMETER Experiment Name: At_CS6630_Roots_cDNA_P Parameter: Tissue Value: Roots
  misc_feature: MA Experiment ID: 20000111 Result: Down-regulated in Transcription
  misc_feature: MA Experiment 20000111 PARAMETER Experiment Name: At_42deg_Heat_cDNA_P Parameter: Temperature (deg C) Value: 42 vs. 22
  misc_feature: MA Experiment 20000111 PARAMETER Experiment Name: At_42deg_Heat_cDNA_P Parameter: Timepoint (hr) Value: 6
  misc_feature: MA Experiment 20000111 PARAMETER Experiment Name: At_42deg_Heat_cDNA_P Parameter: Tissue Value: Aerial
  misc_feature: MA Experiment ID: 20000113 Result: Down-regulated in Transcription
  misc_feature: MA Experiment 20000113 PARAMETER Experiment Name: At_42deg_Heat_cDNA_P Parameter: Temperature (deg C) Value: 42 vs. 22
  misc_feature: MA Experiment 20000113 PARAMETER Experiment Name: At_42deg_Heat_cDNA_P Parameter: Timepoint (hr) Value: 8
  misc_feature: MA Experiment 20000113 PARAMETER Experiment Name: At_42deg_Heat_cDNA_P Parameter: Tissue Value: Aerial
  misc_feature: MA Experiment ID: 20000171 Result: Down-regulated in Transcription
  misc_feature: MA Experiment 20000171 PARAMETER Experiment Name: At_42deg_Heat_P Parameter: Age (day) Value: 14
  misc_feature: MA Experiment 20000171 PARAMETER Experiment Name: At_42deg_Heat_P Parameter: Organism Value: A. thaliana
  misc_feature: MA Experiment 20000171 PARAMETER Experiment Name: At_42deg_Heat_P Parameter: Plant Line Value: WS
  misc_feature: MA Experiment 20000171 PARAMETER Experiment Name: At_42deg_Heat_P Parameter: Temperature (deg C) Value: 42 vs. 22
  misc_feature: MA Experiment 20000171 PARAMETER Experiment Name: At_42deg_Heat_P Parameter: Timepoint (hr) Value: 1
  misc_feature: MA Experiment 20000171 PARAMETER Experiment Name: At_42deg_Heat_P Parameter: Tissue Value: Aerial
  misc_feature: MA Experiment ID: 20000173 Result: Down-regulated in Transcription
  misc_feature: MA Experiment 20000173 PARAMETER Experiment Name: At_42deg_Heat_P Parameter: Age (day) Value: 14
  misc_feature: MA Experiment 20000173 PARAMETER Experiment Name: At_42deg_Heat_P Parameter: Organism Value: A. thaliana
  misc_feature: MA Experiment 20000173 PARAMETER Experiment Name: At_42deg_Heat_P Parameter: Plant Line Value: WS
  misc_feature: MA Experiment 20000173 PARAMETER Experiment Name: At_42deg_Heat_P Parameter: Temperature (deg C) Value: 42 vs. 22
  misc_feature: MA Experiment 20000173 PARAMETER Experiment Name: At_42deg_Heat_P Parameter: Timepoint (hr) Value: 6
  misc_feature: MA Experiment 20000173 PARAMETER Experiment Name: At_42deg_Heat_P Parameter: Tissue Value: Aerial
  misc_feature: MA Experiment ID: 20000224 Result: Down-regulated in Transcription

SEQ ID NO: 29627 - protein, 454 aa, Arabidopsis thaliana; identical to SEQ ID NO: 29023
  peptide (1)..(454): Ceres Seq. ID no. 12371602
  misc_feature (35)..(373): Homolog of NCBI NO: 12056117 NR Description: protein disulfide isomerase [Triticum turgidum
  misc_feature (18)..(318): Homolog of NCBI NO: 17647799 NR Description: Protein disulfide isomerase CG6988-PA
  misc_feature (7)..(368): Homolog of NCBI NO: 31239469 NR Description: ENSANGP00000011666 [Anopheles gambiae]
  misc_feature (25)..(382): Homolog of NCBI NO: 11133775 NR Description: Protein disulfide isomerase precursor (PDI)
  misc_feature (18)..(318): Homolog of NCBI NO: 27819775 NR Description: RH09122p [Drosophila melanogaster]
  misc_feature (26)..(382): Homolog of NCBI NO: 15219086 NR Description: putative protein disulfide isomerase precursor
  misc_feature (26)..(382): Homolog of NCBI NO: 30687521 NR Description: protein disulfide isomerase, putative
  misc_feature (18)..(419): Homolog of NCBI NO: 38344940 NR Description: OSJNBa0084A10.16 [Oryza sativa (japonica
  misc_feature (15)..(443): Homolog of NCBI NO: 8778373 NR Description: F15O4.20 [Arabidopsis thaliana]
  misc_feature (15)..(454): Homolog of NCBI NO: 18399786 NR Description: protein disulfide isomerase, putative
  misc_feature (35)..(373): Homolog of NCBI NO: 12056117 NR Description: protein disulfide isomerase [Triticum turgidum
  misc_feature (18)..(318): Homolog of NCBI NO: 17647799 NR Description: Protein disulfide isomerase CG6988-PA
  misc_feature (7)..(368): Homolog of NCBI NO: 31239469 NR Description: ENSANGP00000011666 [Anopheles gambiae]
  misc_feature (25)..(382): Homolog of NCBI NO: 11133775 NR Description: Protein disulfide isomerase precursor (PDI)
  misc_feature (18)..(318): Homolog of NCBI NO: 27819775 NR Description: RH09122p [Drosophila melanogaster]
  misc_feature (26)..(382): Homolog of NCBI NO: 15219086 NR Description: putative protein disulfide isomerase precursor
  misc_feature (26)..(382): Homolog of NCBI NO: 30687521 NR Description: protein disulfide isomerase, putative
  misc_feature (18)..(419): Homolog of NCBI NO: 38344940 NR Description: OSJNBa0084A10.16 [Oryza sativa (japonica
  misc_feature (15)..(443): Homolog of NCBI NO: 8778373 NR Description: F15O4.20 [Arabidopsis thaliana]
  misc_feature (15)..(454): Homolog of NCBI NO: 18399786 NR Description: protein disulfide isomerase, putative

SEQ ID NO: 29628 - protein, 440 aa, Arabidopsis thaliana; identical to SEQ ID NO: 29024
  peptide (1)..(440): Ceres Seq. ID no. 12371603
  misc_feature (21)..(359): Homolog of NCBI NO: 12056117 NR Description: protein disulfide isomerase [Triticum turgidum
  misc_feature (4)..(304): Homolog of NCBI NO: 17647799 NR Description: Protein disulfide isomerase CG6988-PA
  misc_feature (1)..(354): Homolog of NCBI NO: 31239469 NR Description: ENSANGP00000011666 [Anopheles gambiae]
  misc_feature (11)..(368): Homolog of NCBI NO: 11133775 NR Description: Protein disulfide isomerase precursor (PDI)
  misc_feature (4)..(304): Homolog of NCBI NO: 27819775 NR Description: RH09122p [Drosophila melanogaster]
  misc_feature (12)..(368): Homolog of NCBI NO: 15219086 NR Description: putative protein disulfide isomerase precursor
  misc_feature (12)..(368): Homolog of NCBI NO: 30687521 NR Description: protein disulfide isomerase, putative
  misc_feature (4)..(405): Homolog of NCBI NO: 38344940 NR Description: OSJNBa0084A10.16 [Oryza sativa (japonica
  misc_feature (1)..(429): Homolog of NCBI NO: 8778373 NR Description: F15O4.20 [Arabidopsis thaliana]
  misc_feature (1)..(440): Homolog of NCBI NO: 18399786 NR Description: protein disulfide isomerase, putative
  misc_feature (21)..(359): Homolog of NCBI NO: 12056117 NR Description: protein disulfide isomerase [Triticum turgidum
  misc_feature (4)..(304): Homolog of NCBI NO: 17647799 NR Description: Protein disulfide isomerase CG6988-PA
  misc_feature (1)..(354): Homolog of NCBI NO: 31239469 NR Description: ENSANGP00000011666 [Anopheles gambiae]
  misc_feature (11)..(368): Homolog of NCBI NO: 11133775 NR Description: Protein disulfide isomerase precursor (PDI)
  misc_feature (4)..(304): Homolog of NCBI NO: 27819775 NR Description: RH09122p [Drosophila melanogaster]
  misc_feature (12)..(368): Homolog of NCBI NO: 15219086 NR Description: putative protein disulfide isomerase precursor
  misc_feature (12)..(368): Homolog of NCBI NO: 30687521 NR Description: protein disulfide isomerase, putative
  misc_feature (4)..(405): Homolog of NCBI NO: 38344940 NR Description: OSJNBa0084A10.16 [Oryza sativa (japonica
  misc_feature (1)..(429): Homolog of NCBI NO: 8778373 NR Description: F15O4.20 [Arabidopsis thaliana]
  misc_feature (1)..(440): Homolog of NCBI NO: 18399786 NR Description: protein disulfide isomerase, putative

SEQ ID NO: 29629 - protein, 330 aa, Arabidopsis thaliana; identical to SEQ ID NO: 29025
  peptide (1)..(330): Ceres Seq. ID no. 12371604
  misc_feature (1)..(249): Homolog of NCBI NO: 12056117 NR Description: protein disulfide isomerase [Triticum turgidum
  misc_feature (1)..(194): Homolog of NCBI NO: 17647799 NR Description: Protein disulfide isomerase CG6988-PA
  misc_feature (1)..(244): Homolog of NCBI NO: 31239469 NR Description: ENSANGP00000011666 [Anopheles gambiae]
  misc_feature (1)..(258): Homolog of NCBI NO: 11133775 NR Description: Protein disulfide isomerase precursor (PDI)
  misc_feature (1)..(194): Homolog of NCBI NO: 27819775 NR Description: RH09122p [Drosophila melanogaster]
  misc_feature (1)..(258): Homolog of NCBI NO: 15219086 NR Description: putative protein disulfide isomerase precursor
  misc_feature (1)..(258): Homolog of NCBI NO: 30687521 NR Description: protein disulfide isomerase, putative
  misc_feature (1)..(295): Homolog of NCBI NO: 38344940 NR Description: OSJNBa0084A10.16 [Oryza sativa (japonica
  misc_feature (1)..(319): Homolog of NCBI NO: 8778373 NR Description: F15O4.20 [Arabidopsis thaliana]
  misc_feature (1)..(330): Homolog of NCBI NO: 18399786 NR Description: protein disulfide isomerase, putative
  misc_feature (1)..(249): Homolog of NCBI NO: 12056117 NR Description: protein disulfide isomerase [Triticum turgidum
  misc_feature (1)..(194): Homolog of NCBI NO: 17647799 NR Description: Protein disulfide isomerase CG6988-PA
  misc_feature (1)..(244): Homolog of NCBI NO: 31239469 NR Description: ENSANGP00000011666 [Anopheles gambiae]
  misc_feature (1)..(258): Homolog of NCBI NO: 11133775 NR Description: Protein disulfide isomerase precursor (PDI)
  misc_feature (1)..(194): Homolog of NCBI NO: 27819775 NR Description: RH09122p [Drosophila melanogaster]
  misc_feature (1)..(258): Homolog of NCBI NO: 15219086 NR Description: putative protein disulfide isomerase precursor
  misc_feature (1)..(258): Homolog of NCBI NO: 30687521 NR Description: protein disulfide isomerase, putative
  misc_feature (1)..(295): Homolog of NCBI NO: 38344940 NR Description: OSJNBa0084A10.16 [Oryza sativa (japonica
  misc_feature (1)..(319): Homolog of NCBI NO: 8778373 NR Description: F15O4.20 [Arabidopsis thaliana]
  misc_feature (1)..(330): Homolog of NCBI NO: 18399786 NR Description: protein disulfide isomerase, putative

SEQ ID NO: 29630 - DNA, 557 bp, Arabidopsis thaliana
  misc_feature (1)..(557): Ceres Seq. ID no. 12332139
  misc_feature: MA Experiment ID: 108434 Result: Up-regulated in Transcription
  misc_feature: MA Experiment 108434 PARAMETER Experiment Name: At_Root_Tips_cDNA_P Parameter: Tissue Value: Root Tips
  misc_feature: MA Experiment ID: 20001451 Result: Up-regulated in Transcription
  misc_feature: MA Experiment 20001451 PARAMETER Experiment Name: At_Far-red-induction_P Parameter: Age (day) Value: 7
  misc_feature: MA Experiment 20001451 PARAMETER Experiment Name: At_Far-red-induction_P Parameter: Light Value: Far-red vs. White
  misc_feature: MA Experiment 20001451 PARAMETER Experiment Name: At_Far-red-induction_P Parameter: Organism Value: A. thaliana
  misc_feature: MA Experiment 20001451 PARAMETER Experiment Name: At_Far-red-induction_P Parameter: Plant Line Value: Columbia
  misc_feature: MA Experiment 20001451 PARAMETER Experiment Name: At_Far-red-induction_P Parameter: Timepoint (hr) Value: 24
  misc_feature: MA Experiment 20001451 PARAMETER Experiment Name: At_Far-red-induction_P Parameter: Tissue Value: Whole Plant
aaaaagccgtctttttgcttctctgtttctccgtcgagtctcccggagatttcatagaatccaatcgcctcaaatcgaatcgctaatctagttgaatcaagatggtttatatcgcatcgtgggacgaattcgttgatcgatctgttcagctttttcgagctgatccggaatctactcggtatgtgatgaagtatagacactgtgacggcaagttggttcttaaggttactgataacaaagagtgtctcaagttcaagacagaccaagcacaagaagcgaagaagatggagaaactgaataacatatttttcaccctcatggccagaggacctgatgtcgatctctcagaagtcaccgggaaagaacagatggagacacagcctgccaagaaaggaagaggaaggaagcaataagtctcaagatttgttttccgtttgtcttggtatcaagattttgatccatttttgtttgatattttgagatggtagggttgtcaagattcgttctaaagcttacgacttttttttacactttgatcgattaatcacttttggatt

SEQ ID NO: 29631 - protein, 103 aa, Arabidopsis thaliana
  peptide (1)..(103): Ceres Seq. ID no. 12332140
  misc_feature (2)..(78): Pfam Name: Signal recognition particle 9 kDa protein (SRP9) Pfam Description: Signal recognition particle 9 kDa protein (SRP9)
  misc_feature (1)..(67): Homolog of NCBI NO: 39585011 NR Description: Hypothetical protein CBG06800 [Caenorhabditis
  misc_feature (1)..(73): Homolog of NCBI NO: 6755662 NR Description: signal recognition particle; signal recognition
  misc_feature (1)..(73): Homolog of NCBI NO: 5107800 NR Description: Signal Recognition Particle Alu Rna Binding
  misc_feature (6)..(73): Homolog of NCBI NO: 11513832 NR Description: Chain A, Core Of The Alu Domain Of The Mammalian
  misc_feature (6)..(73): Homolog of NCBI NO: 4507217 NR Description: signal recognition particle 9kDa; signal
  misc_feature (1)..(73): Homolog of NCBI NO: 134890 NR Description: SIGNAL RECOGNITION PARTICLE 9 KD PROTEIN (SRP9)
  misc_feature (1)..(67): Homolog of NCBI NO: 17556953 NR Description: Signal recognition particle (8.8 kD)
  misc_feature (1)..(73): Homolog of NCBI NO: 29436534 NR Description: Similar to signal recognition particle 9kDa
  misc_feature (1)..(103): Homolog of NCBI NO: 12230624 NR Description: Signal recognition particle 9 kDa protein (SRP9)
  misc_feature (1)..(103): Homolog of NCBI NO: 15229083 NR Description: signal recognition particle subunit 9 - like
MVYIASWDEFVDRSVQLFRADPESTRYVMKYRHCDGKLVLKVTDNKECLKFKTDQAQEAKKMEKLNNIFFTLMARGPDVDLSEVTGKEQMETQPAKKGRGRKQ

SEQ ID NO: 29632 - protein, 75 aa, Arabidopsis thaliana
  peptide (1)..(75): Ceres Seq. ID no. 12332141
  misc_feature (1)..(39): Homolog of NCBI NO: 39585011 NR Description: Hypothetical protein CBG06800 [Caenorhabditis
  misc_feature (1)..(45): Homolog of NCBI NO: 6755662 NR Description: signal recognition particle; signal recognition
  misc_feature (1)..(45): Homolog of NCBI NO: 5107800 NR Description: Signal Recognition Particle Alu Rna Binding
  misc_feature (1)..(45): Homolog of NCBI NO: 11513832 NR Description: Chain A, Core Of The Alu Domain Of The Mammalian
  misc_feature (1)..(45): Homolog of NCBI NO: 4507217 NR Description: signal recognition particle 9kDa; signal
  misc_feature (1)..(45): Homolog of NCBI NO: 134890 NR Description: SIGNAL RECOGNITION PARTICLE 9 KD PROTEIN (SRP9)
  misc_feature (1)..(39): Homolog of NCBI NO: 17556953 NR Description: Signal recognition particle (8.8 kD)
  misc_feature (1)..(45): Homolog of NCBI NO: 29436534 NR Description: Similar to signal recognition particle 9kDa
  misc_feature (1)..(75): Homolog of NCBI NO: 12230624 NR Description: Signal recognition particle 9 kDa protein (SRP9)
  misc_feature (1)..(75): Homolog of NCBI NO: 15229083 NR Description: signal recognition particle subunit 9 - like
MKYRHCDGKLVLKVTDNKECLKFKTDQAQEAKKMEKLNNIFFTLMARGPDVDLSEVTGKEQMETQPAKKGRGRKQ

SEQ ID NO: 29633 - DNA, 2689 bp, Arabidopsis thaliana
  misc_feature (1)..(2689): Ceres Seq. ID no. 13490032
  misc_feature: MA Experiment ID: 108434 Result: Down-regulated in Transcription
  misc_feature: MA Experiment 108434 PARAMETER Experiment Name: At_Root_Tips_cDNA_P Parameter: Tissue Value: Root Tips
  misc_feature: MA Experiment ID: 108579 Result: Down-regulated in Transcription
  misc_feature: MA Experiment 108579 PARAMETER Experiment Name: At_4deg_Cold_cDNA_P Parameter: Temperature (deg C) Value: 4 vs. 22
  misc_feature: MA Experiment 108579 PARAMETER Experiment Name: At_4deg_Cold_cDNA_P Parameter: Timepoint (hr) Value: 6
  misc_feature: MA Experiment 108579 PARAMETER Experiment Name: At_4deg_Cold_cDNA_P Parameter: Tissue Value: Aerial
  misc_feature: MA Experiment ID: 20000184 Result: Down-regulated in Transcription
  misc_feature: MA Experiment 20000184 PARAMETER Experiment Name: At_Shoots__P Parameter: Age (day) Value: 7
  misc_feature: MA Experiment 20000184 PARAMETER Experiment Name: At_Shoots__P Parameter: Tissue Value: Shoots vs. Whole Plant
  misc_feature: MA Experiment ID: 20000495 Result: Up-regulated in Transcription
  misc_feature: MA Experiment 20000495 PARAMETER Experiment Name: At_Guard_Cells_P Parameter: Harvest Date Value: 8/2/2002
  misc_feature: MA Experiment 20000495 PARAMETER Experiment Name: At_Guard_Cells_P Parameter: Organism Value: A. thaliana
  misc_feature: MA Experiment 20000495 PARAMETER Experiment Name: At_Guard_Cells_P Parameter: Tissue Value: Guard Cells vs. Leaves
  misc_feature: MA Experiment ID: 20000794 Result: Up-regulated in Transcription
  misc_feature: MA Experiment 20000794 PARAMETER Experiment Name: At_Petals_P Parameter: Age (day) Value: 23-25 days
  misc_feature: MA Experiment 20000794 PARAMETER Experiment Name: At_Petals_P Parameter: Plant Line Value: WS
  misc_feature: MA Experiment 20000794 PARAMETER Experiment Name: At_Petals_P Parameter: Tissue Value: Petals vs. Whole plant
  misc_feature: MA Experiment ID: 20001757 Result: Down-regulated in Transcription
  misc_feature: MA Experiment 20001757 PARAMETER Experiment Name: At_50mM_NH4NO3_L-to-H_P Parameter: Timepoint (hr) Value: 6
  misc_feature: MA Experiment 20001757 PARAMETER Experiment Name: At_50mM_NH4NO3_L-to-H_P Parameter: Tissue Value: Leaf
  misc_feature: MA Experiment 20001757 PARAMETER Experiment Name: At_50mM_NH4NO3_L-to-H_P Parameter: Treatment Value: 50mM NH4NO3 vs 100mM Mannitol
  misc_feature: MA Experiment ID: 20001911 Result: Up-regulated in Transcription
  misc_feature: MA Experiment 20001911 PARAMETER Experiment Name: At_Drought_Reproduction_P Parameter: Age (day) Value: 40
  misc_feature: MA Experiment 20001911 PARAMETER Experiment Name: At_Drought_Reproduction_P Parameter: Organism Value: A. thaliana
  misc_feature: MA Experiment 20001911 PARAMETER Experiment Name: At_Drought_Reproduction_P Parameter: Plant Line Value: WS
  misc_feature: MA Experiment 20001911 PARAMETER Experiment Name: At_Drought_Reproduction_P Parameter: Timepoint (day) Value: 10
  misc_feature: MA Experiment 20001911 PARAMETER Experiment Name: At_Drought_Reproduction_P Parameter: Tissue Value: Flowers
  misc_feature: MA Experiment 20001911 PARAMETER Experiment Name: At_Drought_Reproduction_P Parameter: Treatment Value: Drought vs. No Drought
gacgaattttggttcgctgctgcataatttttacccatacatcttcctcatcttctctctccgtgttgactcttgaggcgatccaacaaacaacaacaacaacgccgcgattctcgagggaccaatccgttcagagagattaaagctgagctgagcttctccttataaaggaagatactgcttgttctacggaattttgagagatgcctcgggacttgtcaagatcgaggtcaccgtctccatcaccttcacgtcgtagaaagcactcgaggtctcccgtaaggcagaggcatagcaggaggagtagaagagacagaagcccttctccatactcatctcattcgtatagcaggtgatacccctagtgtttgttttttccgctattcgtttgccttagttatcattcgtttatacgaactgtaagaaacattggtggaacacggttatagatagacatgtaaagtttacagactcaagaattgcttttagtaaagttcctacttatagatatattttctacccttctctaaaagagagtgcaatgtctggatgctgctggctctgtatcgtaagcgttttttttgagtgatgctgcgtattggaaatatatcgtgtttatttggctgttgtgattaaatttgttgcaagagaatatgttttatgacctgagctttgtgatttttagaatgaaacctgtatattcggtaaagacataagttaagctgggataatagcactactgatagtctgatctagtttatattttaattgtatctgtagattattagttagaatcagttttaagagcgactatattatgttcttttaaatggagtttgttagcaatagtgatacaaaaccaccactattccttaggtaagataatatagtaatttgttgagaacatggctgagaagctaggaaaatgatacatgcgcttaccattataaaatagctcagtttcttcccgttcccacgggaggggaaatgagcagctgatggattgctcttaggtgttctttcattgatcccttgtctcgttagcttctcttcgtgtgataaaagttggagctgataattctttacagtgtatgaggtaactgcacatacttttgttttctttatgtgtaactgtgggctacctgatgcctagtcttcacgtgcgtggtacttcattagttccatctttttgcttactactttattttgggtaatgttcaggcgaaaaagtcgttctatttctcctaggcgccatcgaagtcgatctgttactcctaagagacgttctccaaccccaaaacgttacaaaagacaaaagagtaggagttcaactccatctcctgcaaaaagatctcccgccgcaacccttgagtcagccaaaaataggaatggagaaaaacttaaaagagaagaggaagaacgaaaaaggtaaatcaatacaaaattttgaagtaagatggatgttatggtgaaattaaggttttttgttctcaaatgttattttagtgtagtgtggaagtccttgattgttagtctcaaaagtgcgacaggttttatggtattctctcacaggctttgcttatggaagataagctatatttcgatttgtttatatttgatcctctggcacaaatgttcgtactatctcgatttgatgagttaccgtttgtcattacatggatcatgattgacttagagatgtaaatatgtccaaagcacaagaataatcttggtgaaggtttgcttgtgttatggtgacaaaaaagaaatttcttcacgaaatttaccattggtattgggaggagtgaaaatggaaacgatctcaacattttttacggatttgcaataaaattttggtcttttgctgttcaagattgaagacatcaggaaatgagaaagttcaggtgatattcaatattctgaacctgctgtggatgtcctctaatttttcactgtatttgctaccaggcgacagcgtgaagcagaactgaagctaatagaggaagaaactgtgaaacgggttgaagaagctattcgaaagaaggtcgaagaaagcttacagtctgagaaaatcaaaatggaaattctaacgctgttggaggaagggcgaaagagacttaatgaagaagtcgcggctcaacttgaggaggagaaagaggcttctcttattgaggctaaagaaaaagagggtgttatgcggtgtttgtcacaggaaagagagcaacaagagaaagaagagagggagagaatagcagaggagaacctaaagagagtggaagaagctcagagaaaagaagcaatggagaggcaaaggaaagaggaggaacggtatcgagagctagaggagctgcaacgacagaaagaagaagcgatgcgaaggaagaaagctgaagaggaagaagaacgtctcaaacagatgaaactgttgggtaaaaacaaatcacggcctaaattatcctttgccttaagctccaagtaaatgcgtgcatgcatgaagataaaaggattgatgtgatggatgatgatatgcatcttcttcctctcaaagatgctttatgattattgttattagtgcttcttgttggagcttaaactcttttatggcttttaattttttgtaattctatttttctcgttttgtaattttacgttaggttaatggtgatgaatgataatatagcaatgatcc

SEQ ID NO: 29634 - protein, 133 aa, Arabidopsis thaliana
  peptide (1)..(133): Ceres Seq. ID no. 13490033
  misc_feature (1)..(123): Pfam Name: Caldesmon Pfam Description: Caldesmon
  misc_feature (1)..(132): Homolog of NCBI NO: 28278343 NR Description: Unknown (protein for MGC:55548) [Danio rerio]
  misc_feature (1)..(130): Homolog of NCBI NO: 31234644 NR Description: ENSANGP00000022336 [Anopheles gambiae]
  misc_feature (1)..(132): Homolog of NCBI NO: 39795605 NR Description: Unknown (protein for MGC:76303) [Silurana
  misc_feature (1)..(133): Homolog of NCBI NO: 34879649 NR Description: similar to hypothetical protein FLJ10154 [Rattus
  misc_feature (1)..(133): Homolog of NCBI NO: 8922259 NR Description: hypothetical protein FLJ10154 [Homo sapiens]
  misc_feature (1)..(132): Homolog of NCBI NO: 27881860 NR Description: Unknown (protein for MGC:55375) [Danio rerio]
  misc_feature (1)..(132): Homolog of NCBI NO: 38541231 NR Description: Unknown (protein for MGC:77695) [Danio rerio]
  misc_feature (1)..(120): Homolog of NCBI NO: 37532486 NR Description: hypothetical protein [Oryza sativa (japonica
  misc_feature (1)..(130): Homolog of NCBI NO: 15240607 NR Description: hypothetical protein [Arabidopsis thaliana]
  misc_feature (1)..(133): Homolog of NCBI NO: 15220234 NR Description: F-box protein family [Arabidopsis thaliana]
MEILTLLEEGRKRLNEEVAAQLEEEKEASLIEAKEKEGVMRCLSQEREQQEKEERERIAEENLKRVEEAQRKEAMERQRKEEERYRELEELQRQKEEAMRRKKAEEEEERLKQMKLLGKNKSRPKLSFALSSK

SEQ ID NO: 29635 - protein, 94 aa, Arabidopsis thaliana
  peptide (1)..(94): Ceres Seq. ID no. 13490034
  misc_feature (1)..(84): Pfam Name: Caldesmon Pfam Description: Caldesmon
  misc_feature (1)..(93): Homolog of NCBI NO: 28278343 NR Description: Unknown (protein for MGC:55548) [Danio rerio]
  misc_feature (1)..(91): Homolog of NCBI NO: 31234644 NR Description: ENSANGP00000022336 [Anopheles gambiae]
  misc_feature (1)..(93): Homolog of NCBI NO: 39795605 NR Description: Unknown (protein for MGC:76303) [Silurana
  misc_feature (1)..(94): Homolog of NCBI NO: 34879649 NR Description: similar to hypothetical protein FLJ10154 [Rattus
  misc_feature (1)..(94): Homolog of NCBI NO: 8922259 NR Description: hypothetical protein FLJ10154 [Homo sapiens]
  misc_feature (1)..(93): Homolog of NCBI NO: 27881860 NR Description: Unknown (protein for MGC:55375) [Danio rerio]
  misc_feature (1)..(93): Homolog of NCBI NO: 38541231 NR Description: Unknown (protein for MGC:77695) [Danio rerio]
  misc_feature (1)..(81): Homolog of NCBI NO: 37532486 NR Description: hypothetical protein [Oryza sativa (japonica
  misc_feature (1)..(91): Homolog of NCBI NO: 15240607 NR Description: hypothetical protein [Arabidopsis thaliana]
  misc_feature (1)..(94): Homolog of NCBI NO: 15220234 NR Description: F-box protein family [Arabidopsis thaliana]
MRCLSQEREQQEKEERERIAEENLKRVEEAQRKEAMERQRKEEERYRELEELQRQKEEAMRRKKAEEEEERLKQMKLLGKNKSRPKLSFALSSK

SEQ ID NO: 29636 - protein, 76 aa, Arabidopsis thaliana
  peptide (1)..(76): Ceres Seq. ID no. 13490035
MDVMVKLRFFVLKCYFSVVWKSLIVSLKSATGFMVFSHRLCLWKISYISICLYLILWHKCSYYLDLMSYRLSLHGS

SEQ ID NO: 29637 - DNA, 344 bp, Arabidopsis thaliana
  misc_feature (1)..(344): Ceres Seq. ID no. 12422844
  misc_feature: MA Experiment ID: 108434 Result: Down-regulated in Transcription
  misc_feature: MA Experiment 108434 PARAMETER Experiment Name: At_Root_Tips_cDNA_P Parameter: Tissue Value: Root Tips
  misc_feature: MA Experiment ID: 108461 Result: Up-regulated in Transcription
  misc_feature: MA Experiment 108461 PARAMETER Experiment Name: At_Germinating_Seeds_cDNA_P Parameter: Age (day) Value: 1 vs. 0
  misc_feature: MA Experiment 108461 PARAMETER Experiment Name: At_Germinating_Seeds_cDNA_P Parameter: Tissue Value: Germinating Seeds
  misc_feature: MA Experiment ID: 108464 Result: Up-regulated in Transcription
  misc_feature: MA Experiment 108464 PARAMETER Experiment Name: At_Germinating_Seeds_cDNA_P Parameter: Age (day) Value: 4 vs. 0
  misc_feature: MA Experiment 108464 PARAMETER Experiment Name: At_Germinating_Seeds_cDNA_P Parameter: Tissue Value: Germinating Seeds
  misc_feature: MA Experiment ID: 108488 Result: Up-regulated in Transcription
  misc_feature: MA Experiment ID: 108595 Result: Down-regulated in Transcription
  misc_feature: MA Experiment 108595 PARAMETER Experiment Name: At_Ler-pi_Ovule_cDNA_P Parameter: Plant Line Value: null
  misc_feature: MA Experiment ID: 20000087 Result: Down-regulated in Transcription
  misc_feature: MA Experiment 20000087 PARAMETER Experiment Name: At_100uM_ABA_Mutants_cDNA_P Parameter: Plant Line Value: WS
  misc_feature: MA Experiment 20000087 PARAMETER Experiment Name: At_100uM_ABA_Mutants_cDNA_P Parameter: Timepoint (hr) Value: 6
  misc_feature: MA Experiment 20000087 PARAMETER Experiment Name: At_100uM_ABA_Mutants_cDNA_P Parameter: Tissue Value: Aerial
  misc_feature: MA Experiment 20000087 PARAMETER Experiment Name: At_100uM_ABA_Mutants_cDNA_P Parameter: Treatment Value: 100uM ABA vs. No Treatment
  misc_feature: MA Experiment ID: 20000179 Result: Up-regulated in Transcription
  misc_feature: MA Experiment 20000179 PARAMETER Experiment Name: At_Germinating_Seeds_P Parameter: Age (hr) Value: 6 vs. 0
  misc_feature: MA Experiment 20000179 PARAMETER Experiment Name: At_Germinating_Seeds_P Parameter: Tissue Value: Germinating Seeds
  misc_feature: MA Experiment ID: 20000180 Result: Up-regulated in Transcription
  misc_feature: MA Experiment 20000180 PARAMETER Experiment Name: At_Germinating_Seeds_P Parameter: Age (hr) Value: 24 vs. 0
  misc_feature: MA Experiment 20000180 PARAMETER Experiment Name: At_Germinating_Seeds_P Parameter: Tissue Value: Germinating Seeds
  misc_feature: MA Experiment ID: 20000185 Result: Down-regulated in Transcription
  misc_feature: MA Experiment 20000185 PARAMETER Experiment Name: At_Roots__P Parameter: Age (day) Value: 7 vs. 21
  misc_feature: MA Experiment 20000185 PARAMETER Experiment Name: At_Roots__P Parameter: Organism Value: A. thaliana
  misc_feature: MA Experiment 20000185 PARAMETER Experiment Name: At_Roots__P Parameter: Tissue Value: Roots vs. Whole Plant
  misc_feature: MA Experiment ID: 20000269 Result: Down-regulated in Transcription
  misc_feature: MA Experiment 20000269 PARAMETER Experiment Name: At_1mM_KNO3_L-vs-H_Roots_P Parameter: Age (day) Value: 7,10,12
  misc_feature: MA Experiment 20000269 PARAMETER Experiment Name: At_1mM_KNO3_L-vs-H_Roots_P Parameter: Organism Value: A. thaliana
  misc_feature: MA Experiment 20000269 PARAMETER Experiment Name: At_1mM_KNO3_L-vs-H_Roots_P Parameter: Plant Line Value: WS
  misc_feature: MA Experiment 20000269 PARAMETER Experiment Name: At_1mM_KNO3_L-vs-H_Roots_P Parameter: Timepoint (day) Value: 7,10,12
  misc_feature: MA Experiment 20000269 PARAMETER Experiment Name: At_1mM_KNO3_L-vs-H_Roots_P Parameter: Tissue Value: Roots
  misc_feature: MA Experiment 20000269 PARAMETER Experiment Name: At_1mM_KNO3_L-vs-H_Roots_P Parameter: Treatment Value: 1mM KNO3 vs. 50mM KNO3
  misc_feature: MA Experiment ID: 20000439 Result: Down-regulated in Transcription
  misc_feature: MA Experiment 20000439 PARAMETER Experiment Name: At_Roots__P Parameter: Age (day) Value: 14 vs. 21
  misc_feature: MA Experiment 20000439 PARAMETER Experiment Name: At_Roots__P Parameter: Organism Value: A. thaliana
  misc_feature: MA Experiment 20000439 PARAMETER Experiment Name: At_Roots__P Parameter: Tissue Value: Roots vs. Whole Plant
  misc_feature: MA Experiment ID: 20000794 Result: Down-regulated in Transcription
  misc_feature: MA Experiment 20000794 PARAMETER Experiment Name: At_Petals_P Parameter: Age (day) Value: 23-25 days
  misc_feature: MA Experiment 20000794 PARAMETER Experiment Name: At_Petals_P Parameter: Plant Line Value: WS
  misc_feature: MA Experiment 20000794 PARAMETER Experiment Name: At_Petals_P Parameter: Tissue Value: Petals vs. Whole plant
  misc_feature: MA Experiment ID: 20001557 Result: Down-regulated in Transcription
  misc_feature: MA Experiment 20001557 PARAMETER Experiment Name: At_Drought_Soil_Dry_P Parameter: Age (day) Value: 27
  misc_feature: MA Experiment 20001557 PARAMETER Experiment Name: At_Drought_Soil_Dry_P Parameter: Organism Value: A. thaliana
  misc_feature: MA Experiment 20001557 PARAMETER Experiment Name: At_Drought_Soil_Dry_P Parameter: Plant Line Value: WS
  misc_feature: MA Experiment 20001557 PARAMETER Experiment Name: At_Drought_Soil_Dry_P Parameter: Post Timepoint (hr) Value: 3
  misc_feature: MA Experiment 20001557 PARAMETER Experiment Name: At_Drought_Soil_Dry_P Parameter: Post-Treatment Value: Re-Water vs. No Drought
  misc_feature: MA Experiment 20001557 PARAMETER Experiment Name: At_Drought_Soil_Dry_P Parameter: Timepoint (day) Value: 13
  misc_feature: MA Experiment 20001557 PARAMETER Experiment Name: At_Drought_Soil_Dry_P Parameter: Treatment Value: Drought vs. No Drought
  misc_feature: MA Experiment ID: 20001757 Result: Up-regulated in Transcription
  misc_feature: MA Experiment 20001757 PARAMETER Experiment Name: At_50mM_NH4NO3_L-to-H_P Parameter: Timepoint (hr) Value: 6
  misc_feature: MA Experiment 20001757 PARAMETER Experiment Name: At_50mM_NH4NO3_L-to-H_P Parameter: Tissue Value: Leaf
  misc_feature: MA Experiment 20001757 PARAMETER Experiment Name: At_50mM_NH4NO3_L-to-H_P Parameter: Treatment Value: 50mM NH4NO3 vs 100mM Mannitol
  misc_feature: MA Experiment ID: 20001904 Result: Down-regulated in Transcription
  misc_feature: MA Experiment 20001904 PARAMETER Experiment Name: At_Drought_Reproduction_P Parameter: Age (day) Value: 37
  misc_feature: MA Experiment 20001904 PARAMETER Experiment Name: At_Drought_Reproduction_P Parameter: Organism Value: A. thaliana
  misc_feature: MA Experiment 20001904 PARAMETER Experiment Name: At_Drought_Reproduction_P Parameter: Plant Line Value: WS
  misc_feature: MA Experiment 20001904 PARAMETER Experiment Name: At_Drought_Reproduction_P Parameter: Timepoint (day) Value: 7
  misc_feature: MA Experiment 20001904 PARAMETER Experiment Name: At_Drought_Reproduction_P Parameter: Tissue Value: Rosettes
  misc_feature: MA Experiment 20001904 PARAMETER Experiment Name: At_Drought_Reproduction_P Parameter: Treatment Value: Drought vs. No Drought
  misc_feature: MA Experiment ID: 20001906 Result: Down-regulated in Transcription
  misc_feature: MA Experiment 20001906 PARAMETER Experiment Name: At_Drought_Reproduction_P Parameter: Age (day) Value: 35
  misc_feature: MA Experiment 20001906 PARAMETER Experiment Name: At_Drought_Reproduction_P Parameter: Organism Value: A. thaliana
  misc_feature: MA Experiment 20001906 PARAMETER Experiment Name: At_Drought_Reproduction_P Parameter: Plant Line Value: WS
  misc_feature: MA Experiment 20001906 PARAMETER Experiment Name: At_Drought_Reproduction_P Parameter: Timepoint (day) Value: 5
  misc_feature: MA Experiment 20001906 PARAMETER Experiment Name: At_Drought_Reproduction_P Parameter: Tissue Value: Siliques
  misc_feature: MA Experiment 20001906 PARAMETER Experiment Name: At_Drought_Reproduction_P Parameter: Treatment Value: Drought vs. No Drought
aaacttaatcacacacaaggagagaagagagaaagagagaaagagagacagagataatggcgtacagtgcgtgtttcctacaccagagcgcattggcttcatcagccgcacgatcatcatcttcctcctcatcccagcgtcacgtgtcgctctccaaacctgttcagatcatctgtaaagcacaagctggagacaagaggtggttcaagggagccaggaaatttgtcgagagcgcacgcacttctttcagtgttgcttgagtgaaagcaacacaacgtaacaatgctctgcttgctttcttcatttgtctcttgtaaaaaatggaaaatgaaactgagcttttg

SEQ ID NO: 29638 - protein, 67 aa, Arabidopsis thaliana
  peptide (1)..(67): Ceres Seq. ID no. 12422845
  misc_feature (13)..(67): Pfam Name: PsbP Pfam Description: PsbP
  misc_feature (1)..(66): Homolog of NCBI NO: 19896 NR Description: photosystem II 23 kDa polypeptide [Nicotiana
  misc_feature (15)..(67): Homolog of NCBI NO: 15222166 NR Description: photosystem II oxygen-evolving complex 23 (OEC23)
  misc_feature (13)..(67): Homolog of NCBI NO: 7443216 NR Description: photosystem II oxygen-evolving complex protein 2
  misc_feature (13)..(67): Homolog of NCBI NO: 417604 NR Description: 23 kDa polypeptide of water-oxidizing complex of
  misc_feature (13)..(67): Homolog of NCBI NO: 1345550 NR Description: 23-kDa ploypeptide of photosystem II
  misc_feature (13)..(67): Homolog of NCBI NO: 19898 NR Description: photosystem II 23 kDa polypeptide [Nicotiana
  misc_feature (1)..(43): Homolog of NCBI NO: 131391 NR Description: Oxygen-evolving enhancer protein 2, chloroplast (OEE2) (23 kDa subunit of oxygen evolving system of photosystem
  misc_feature (1)..(43): Homolog of NCBI NO: 11133887 NR Description: OXYGEN-EVOLVING ENHANCER PROTEIN 2-2, CHLOROPLAST (OEE2) (23 KDA SUBUNIT OF OXYGEN EVOLVING SYSTEM OF PHOTOSYSTEM
  misc_feature (1)..(43): Homolog of NCBI NO: 15224572 NR Description: photosystem II oxygen-evolving complex 23 (OEC23)
  misc_feature (1)..(43): Homolog of NCBI NO: 15222166 NR Description: photosystem II oxygen-evolving complex 23 (OEC23)
MAYSACFLHQSALASSAARSSSSSSSQRHVSLSKPVQIICKAQAGDKRWFKGARKFVESARTSFSVA

SEQ ID NO: 29639 - protein, 58 aa, Arabidopsis thaliana
  peptide (1)..(58): Ceres Seq. ID no. 12422846
NLITHKERREKERKRDRDNGVQCVFPTPERIGFISRTIIIFLLIPASRVALQTCSDHL

SEQ ID NO: 29640 - DNA, 539 bp, Arabidopsis thaliana
  misc_feature (1)..(539): Ceres Seq. ID no. 12561397
  misc_feature: MA Experiment ID: 108434 Result: Up-regulated in Transcription
  misc_feature: MA Experiment 108434 PARAMETER Experiment Name: At_Root_Tips_cDNA_P Parameter: Tissue Value: Root Tips
  misc_feature: MA Experiment ID: 108435 Result: Up-regulated in Transcription
  misc_feature: MA Experiment 108435 PARAMETER Experiment Name: At_stm_Mutants_cDNA_P Parameter: Plant Line Value: wt Landsburg vs stm
  misc_feature: MA Experiment 108435 PARAMETER Experiment Name: At_stm_Mutants_cDNA_P Parameter: Tissue Value: Shoot Apical Meristem Region
  misc_feature: MA Experiment ID: 108462 Result: Down-regulated in Transcription
  misc_feature: MA Experiment 108462 PARAMETER Experiment Name: At_Germinating_Seeds_cDNA_P Parameter: Age (day) Value: 2 vs. 0
  misc_feature: MA Experiment 108462 PARAMETER Experiment Name: At_Germinating_Seeds_cDNA_P Parameter: Tissue Value: Germinating Seeds
  misc_feature: MA Experiment ID: 108463 Result: Down-regulated in Transcription
  misc_feature: MA Experiment 108463 PARAMETER Experiment Name: At_Germinating_Seeds_cDNA_P Parameter: Age (day) Value: 3 vs. 0
  misc_feature: MA Experiment 108463 PARAMETER Experiment Name: At_Germinating_Seeds_cDNA_P Parameter: Tissue Value: Germinating Seeds
  misc_feature: MA Experiment ID: 108464 Result: Down-regulated in Transcription
  misc_feature: MA Experiment 108464 PARAMETER Experiment Name: At_Germinating_Seeds_cDNA_P Parameter: Age (day) Value: 4 vs. 0
  misc_feature: MA Experiment 108464 PARAMETER Experiment Name: At_Germinating_Seeds_cDNA_P Parameter: Tissue Value: Germinating Seeds
  misc_feature: MA Experiment ID: 108573 Result: Down-regulated in Transcription
  misc_feature: MA Experiment 108573 PARAMETER Experiment Name: At_Drought_cDNA_P Parameter: Timepoint (hr) Value: 6
  misc_feature: MA Experiment 108573 PARAMETER Experiment Name: At_Drought_cDNA_P Parameter: Tissue Value: Aerial
  misc_feature: MA Experiment 108573 PARAMETER Experiment Name: At_Drought_cDNA_P Parameter: Treatment Value: Drought vs. No Drought
  misc_feature: MA Experiment ID: 20000224 Result: Down-regulated in Transcription
  misc_feature: MA Experiment ID: 20000227 Result: Up-regulated in Transcription
  misc_feature: MA Experiment 20000227 PARAMETER Experiment Name: At_Root-Tips-vs-Tops_P Parameter: Tissue Value: Root Tips vs. Root Tops
  misc_feature: MA Experiment ID: 20000234 Result: Up-regulated in Transcription
  misc_feature: MA Experiment 20000234 PARAMETER Experiment Name: At_Siliques_P Parameter: Age (day) Value: 21
  misc_feature: MA Experiment 20000234 PARAMETER Experiment Name: At_Siliques_P Parameter: Organism Value: A. thaliana
  misc_feature: MA Experiment 20000234 PARAMETER Experiment Name: At_Siliques_P Parameter: Plant Line Value: WS
  misc_feature: MA Experiment 20000234 PARAMETER Experiment Name: At_Siliques_P Parameter: Tissue Value: Less Than 5mm Siliques vs. Whole Plant
  misc_feature: MA Experiment ID: 20000235 Result: Up-regulated in Transcription
  misc_feature: MA Experiment 20000235 PARAMETER Experiment Name: At_Siliques_P Parameter: Age (day) Value: 21
  misc_feature: MA Experiment 20000235 PARAMETER Experiment Name: At_Siliques_P Parameter: Organism Value: A. thaliana
  misc_feature: MA Experiment 20000235 PARAMETER Experiment Name: At_Siliques_P Parameter: Plant Line Value: WS
  misc_feature: MA Experiment 20000235 PARAMETER Experiment Name: At_Siliques_P Parameter: Tissue Value: 5-10mm Siliques vs. Whole Plant
  misc_feature: MA Experiment ID: 20000265 Result: Up-regulated in Transcription
  misc_feature: MA Experiment 20000265 PARAMETER Experiment Name: At_Open_Flower_P Parameter: Age (day) Value: 21
  misc_feature: MA Experiment 20000265 PARAMETER Experiment Name: At_Open_Flower_P Parameter: Plant Line Value: WS
  misc_feature: MA Experiment 20000265 PARAMETER Experiment Name: At_Open_Flower_P Parameter: Tissue Value: Closed Flower vs. Whole Plant
  misc_feature: MA Experiment ID: 20000436 Result: Down-regulated in Transcription
  misc_feature: MA Experiment 20000436 PARAMETER Experiment Name: At_Drought_P Parameter: Age (day) Value: 7
  misc_feature: MA Experiment 20000436 PARAMETER Experiment Name: At_Drought_P Parameter: Organism Value: A. thaliana
  misc_feature: MA Experiment 20000436 PARAMETER Experiment Name: At_Drought_P Parameter: Plant Line Value: WS
  misc_feature: MA Experiment 20000436 PARAMETER Experiment Name: At_Drought_P Parameter: Timepoint (hr) Value: 12
  misc_feature: MA Experiment 20000436 PARAMETER Experiment Name: At_Drought_P Parameter: Tissue Value: Whole Plant
  misc_feature: MA Experiment 20000436 PARAMETER Experiment Name: At_Drought_P Parameter: Treatment Value: Drought vs. No Drought
  misc_feature: MA Experiment ID: 20000437 Result: Down-regulated in Transcription
  misc_feature: MA Experiment 20000437 PARAMETER Experiment Name: At_Drought_P Parameter: Age (day) Value: 8
  misc_feature: MA Experiment 20000437 PARAMETER Experiment Name: At_Drought_P Parameter: Organism Value: A. thaliana
  misc_feature: MA Experiment 20000437 PARAMETER Experiment Name: At_Drought_P Parameter: Plant Line Value: WS
  misc_feature: MA Experiment 20000437 PARAMETER Experiment Name: At_Drought_P Parameter: Timepoint (hr) Value: 24
  misc_feature: MA Experiment 20000437 PARAMETER Experiment Name: At_Drought_P Parameter: Tissue Value: Whole Plant
  misc_feature: MA Experiment 20000437 PARAMETER Experiment Name: At_Drought_P Parameter: Treatment Value: Drought vs. No Drought
  misc_feature: MA Experiment ID: 20000794 Result: Down-regulated in Transcription
  misc_feature: MA Experiment 20000794 PARAMETER Experiment Name: At_Petals_P Parameter: Age (day) Value: 23-25 days
  misc_feature: MA Experiment 20000794 PARAMETER Experiment Name: At_Petals_P Parameter: Plant Line Value: WS
  misc_feature: MA Experiment 20000794 PARAMETER Experiment Name: At_Petals_P Parameter: Tissue Value: Petals vs. Whole plant
  misc_feature: MA Experiment ID: 20001557 Result: Up-regulated in Transcription
  misc_feature: MA Experiment 20001557 PARAMETER Experiment Name: At_Drought_Soil_Dry_P Parameter: Age (day) Value: 27
  misc_feature: MA Experiment 20001557 PARAMETER Experiment Name: At_Drought_Soil_Dry_P Parameter: Organism Value: A. thaliana
  misc_feature: MA Experiment 20001557 PARAMETER Experiment Name: At_Drought_Soil_Dry_P Parameter: Plant Line Value: WS
  misc_feature: MA Experiment 20001557 PARAMETER Experiment Name: At_Drought_Soil_Dry_P Parameter: Post Timepoint (hr) Value: 3
  misc_feature: MA Experiment 20001557 PARAMETER Experiment Name: At_Drought_Soil_Dry_P Parameter: Post-Treatment Value: Re-Water vs. No Drought
  misc_feature: MA Experiment 20001557 PARAMETER Experiment Name: At_Drought_Soil_Dry_P Parameter: Timepoint (day) Value: 13
  misc_feature: MA Experiment 20001557 PARAMETER Experiment Name: At_Drought_Soil_Dry_P Parameter: Treatment Value: Drought vs. No Drought
  misc_feature: MA Experiment ID: 20001558 Result: Up-regulated in Transcription
  misc_feature: MA Experiment 20001558 PARAMETER Experiment Name: At_Drought_Soil_Dry_P Parameter: Age (day) Value: 27
  misc_feature: MA Experiment 20001558 PARAMETER Experiment Name: At_Drought_Soil_Dry_P Parameter: Organism Value: A. thaliana
  misc_feature: MA Experiment 20001558 PARAMETER Experiment Name: At_Drought_Soil_Dry_P Parameter: Plant Line Value: WS
  misc_feature: MA Experiment 20001558 PARAMETER Experiment Name: At_Drought_Soil_Dry_P Parameter: Post Timepoint (hr) Value: 6
  misc_feature: MA Experiment 20001558 PARAMETER Experiment Name: At_Drought_Soil_Dry_P Parameter: Post-Treatment Value: Re-Water vs. No Drought
  misc_feature: MA Experiment 20001558 PARAMETER Experiment Name: At_Drought_Soil_Dry_P Parameter: Timepoint (day) Value: 13
  misc_feature: MA Experiment 20001558 PARAMETER Experiment Name: At_Drought_Soil_Dry_P Parameter: Treatment Value: Drought vs. No Drought
  misc_feature: MA Experiment ID: 20001560 Result: Up-regulated in Transcription
  misc_feature: MA Experiment 20001560 PARAMETER Experiment Name: At_Drought_Soil_Dry_P Parameter: Age (day) Value: 28
  misc_feature: MA Experiment 20001560 PARAMETER Experiment Name: At_Drought_Soil_Dry_P Parameter: Organism Value: A. thaliana
  misc_feature: MA Experiment 20001560 PARAMETER Experiment Name: At_Drought_Soil_Dry_P Parameter: Plant Line Value: WS
  misc_feature: MA Experiment 20001560 PARAMETER Experiment Name: At_Drought_Soil_Dry_P Parameter: Post Timepoint (hr) Value: None
  misc_feature: MA Experiment 20001560 PARAMETER Experiment Name: At_Drought_Soil_Dry_P Parameter: Post-Treatment Value: None
  misc_feature: MA Experiment 20001560 PARAMETER Experiment Name: At_Drought_Soil_Dry_P Parameter: Timepoint (day) Value: 14
  misc_feature: MA Experiment 20001560 PARAMETER Experiment Name: At_Drought_Soil_Dry_P Parameter: Treatment Value: Drought vs. No Drought
  misc_feature: MA Experiment ID: 20001757 Result: Up-regulated in Transcription
  misc_feature: MA Experiment 20001757 PARAMETER Experiment Name: At_50mM_NH4NO3_L-to-H_P Parameter: Timepoint (hr) Value: 6
  misc_feature: MA Experiment 20001757 PARAMETER Experiment Name: At_50mM_NH4NO3_L-to-H_P Parameter: Tissue Value: Leaf
  misc_feature: MA Experiment 20001757 PARAMETER Experiment Name: At_50mM_NH4NO3_L-to-H_P Parameter: Treatment Value: 50mM NH4NO3 vs 100mM Mannitol
aagctgtcataaaattgagcttcttcttctctgaagccgtatcctagggttttctttgcacactactcgctccaatgggaaagggaacagggagtttcggtaagaggaggaacaagagtcacacactctgtgtgagatgtggtcgtcgtagtttccacatccagaagagtcgttgctcggcttgtgcttacccagctgctcgcaagaggacttacaactggagtgtgaaggccatcaggaggaagactactggtaccggaaggatgaggtatctccgtaatgttcctcgtcggttcaagactggattcagagaaggtactgaagccaagccaaggagcaaggcatcagcttcatcagcttaaagagccagttcgagtagtctctcaggaaggactaaagcttagcattttttgcattcaactagttgaagattacttttcatgtggatctcatacattatgttatgtgggttttgtttcttttgttattcacttataaagttttgaacttggtttaaatatcatcttacatttgcaacc

SEQ ID NO: 29641 - protein, 95 aa, Arabidopsis thaliana
  peptide (1)..(95): Ceres Seq. ID no. 12561398
  misc_feature (2)..(55): Pfam Name: Ribosomal protein L37e Pfam Description: Ribosomal protein L37e
  misc_feature (1)..(95): Homolog of NCBI NO: 4506641 NR Description: ribosomal protein L37; 60S ribosomal protein L37;
  misc_feature (1)..(89): Homolog of NCBI NO: 39583062 NR Description: Hypothetical protein CBG04239 [Caenorhabditis
  misc_feature (1)..(95): Homolog of NCBI NO: 20139516 NR Description: 60S ribosomal protein L37
  misc_feature (1)..(95): Homolog of NCBI NO: 19852052 NR Description: 60S ribosomal protein L37 [Aplysia californica]
  misc_feature (1)..(87): Homolog of NCBI NO: 38047707 NR Description: similar to Drosophila melanogaster CG9091
  misc_feature (1)..(85): Homolog of NCBI NO: 27948818 NR Description: ribosomal protein L37A [Kluyveromyces delphensis]
  misc_feature (1)..(93): Homolog of NCBI NO: 24642107 NR Description: CG9091-PA [Drosophila melanogaster]
  misc_feature (1)..(95): Homolog of NCBI NO: 15218094 NR Description: putative 60s ribosomal protein L37
  misc_feature (1)..(95): Homolog of NCBI NO: 15218208 NR Description: 60S ribosomal protein L37, putative
  misc_feature (1)..(95): Homolog of NCBI NO: 18401007 NR Description: putative ribosomal protein
MGKGTGSFGKRRNKSHTLCVRCGRRSFHIQKSRCSACAYPAARKRTYNWSVKAIRRKTTGTGRMRYLRNVPRRFKTGFREGTEAKPRSKASASSA

SEQ ID NO: 29642 - protein, 72 aa, Arabidopsis thaliana
  peptide (1)..(72): Ceres Seq. ID no. 12561399
  misc_feature (11)..(72): Homolog of NCBI NO: 9294455 NR Description: gene_id:MSL1.12~unknown protein [Arabidopsis
MFLVGSRLDSEKVLKPSQGARHQLHQLKEPVRVVSQEGLKLSIFCIQLVEDYFSCGSHTLCYVGFVSFVIHL

SEQ ID NO: 29643 - DNA, 1058 bp, Arabidopsis thaliana
  misc_feature (1)..(1058): Ceres Seq. ID no. 12333067
  misc_feature: MA Experiment ID: 108595 Result: Down-regulated in Transcription
  misc_feature: MA Experiment 108595 PARAMETER Experiment Name: At_Ler-pi_Ovule_cDNA_P Parameter: Plant Line Value: null
  misc_feature: MA Experiment ID: 20000173 Result: Down-regulated in Transcription
  misc_feature: MA Experiment 20000173 PARAMETER Experiment Name: At_42deg_Heat_P Parameter: Age (day) Value: 14
  misc_feature: MA Experiment 20000173 PARAMETER Experiment Name: At_42deg_Heat_P Parameter: Organism Value: A. thaliana
  misc_feature: MA Experiment 20000173 PARAMETER Experiment Name: At_42deg_Heat_P Parameter: Plant Line Value: WS
  misc_feature: MA Experiment 20000173 PARAMETER Experiment Name: At_42deg_Heat_P Parameter: Temperature (deg C) Value: 42 vs. 22
  misc_feature: MA Experiment 20000173 PARAMETER Experiment Name: At_42deg_Heat_P Parameter: Timepoint (hr) Value: 6
  misc_feature: MA Experiment 20000173 PARAMETER Experiment Name: At_42deg_Heat_P Parameter: Tissue Value: Aerial
gtcgaccttttttctctcacttacccaataagagcttttttcgcgttttccaccgcaaccaccgtcaccttcaaccgccggagccgccgcaaggaaggctcatcatccgccgtggcaattttttgaggtgtacaaagcattgcctatttgacgaaccaggaaatggttaaaaggcatggagagttttgatttacaagatatatcatgtcgcagtgcatagacggtttcaagcatgtatgctcctcttttttccggtgttttgatatcgatatttacaaacaatctggaggccttggtgaccctgaacttcttgcgagagagacagtttttagcgtgagtgaaatagaggctctctatgagctgtttaagaaaatcagcagtgctgtgattgatgatgggctaataaacaaggaagaatttcagttagccttgttcaagacaaataaaaaagagagcttgtttgcagaccggtaccaatcacaggtattcgatttgtttgacacaaagcataatggaatactggggtttgaggagtttgcgcgtgctctctctgtctttcatccaaatgctcccatagaagacaagattgacttttcgtttcagctatatgatcttaagcagcaaggtttcatagagaggcaagaggtgaagcaaatggtggtggctactcttgctgagtccggcatgaacctgtcagacgaaatcatagagagtataatcgacaagacatttgaggaagctgatacaaaacatgacgggaggatcgataaggaagagtggagaacccttgttctcaggcatccttcccttctaaagaatatgactctccagtatcttaaggatataacaactacatttccgagctttgtgttccactcgcaggtggaagatacctgagaaaaacaatagcatattagcagaggagacaatttgggaattgtgtttgttttctgattatgtatcatgtctatttgtttcaatctctctgaacattttcaagattttgttgttacttgtgtgaattaaaagtaaagaaaacaaatctgtatttttgctac

SEQ ID NO: 29644 - protein, 230 aa, Arabidopsis thaliana
  peptide (1)..(230): Ceres Seq. ID no. 12333068
  misc_feature (171)..(199): Pfam Name: EF hand Pfam Description: EF hand
  misc_feature (18)..(229): Homolog of NCBI NO: 18414931 NR Description: calcineurin B-like protein 1
  misc_feature (1)..(230): Homolog of NCBI NO: 13448027 NR Description: SOS3-like calcium binding protein [Arabidopsis
  misc_feature (1)..(230): Homolog of NCBI NO: 18414640 NR Description: expressed protein
  misc_feature (32)..(224): Homolog of NCBI NO: 38493047 NR Description: Chain A, The Crystal Structure Of The Calcium
  misc_feature (1)..(230): Homolog of NCBI NO: 16924116 NR Description: putative calcineurin B-like protein [Oryza sativa]
  misc_feature (1)..(230): Homolog of NCBI NO: 22137326 NR Description: calcineurin B [Pisum sativum]
  misc_feature (1)..(230): Homolog of NCBI NO: 21593228 NR Description: calcineurin B-like protein 2 [Arabidopsis
  misc_feature (1)..(230): Homolog of NCBI NO: 15241101 NR Description: calcineurin B-like protein 2 (gb|AAC26009.1)
  misc_feature (1)..(230): Homolog of NCBI NO: 15236778 NR Description: calcineurin B-like protein 3
  misc_feature (1)..(230): Homolog of NCBI NO: 30687272 NR Description: calcineurin B-like protein 3 (CBL3) [Arabidopsis
MSQCIDGFKHVCSSFFRCFDIDIYKQSGGLGDPELLARETVFSVSEIEALYELFKKISSAVIDDGLINKEEFQLALFKTNKKESLFADRYQSQVFDLFDTKHNGILGFEEFARALSVFHPNAPIEDKIDFSFQLYDLKQQGFIERQEVKQMVVATLAESGMNLSDEIIESIIDKTFEEADTKHDGRIDKEEWRTLVLRHPSLLKNMTLQYLKDITTTFPSFVFHSQVEDT

SEQ ID NO: 29645 - DNA, 638 bp, Arabidopsis thaliana
  misc_feature (1)..(638): Ceres Seq. ID no. 13489850
  misc_feature: MA Experiment ID: 108434 Result: Up-regulated in Transcription
  misc_feature: MA Experiment 108434 PARAMETER Experiment Name: At_Root_Tips_cDNA_P Parameter: Tissue Value: Root Tips
  misc_feature: MA Experiment ID: 108462 Result: Down-regulated in Transcription
  misc_feature: MA Experiment 108462 PARAMETER Experiment Name: At_Germinating_Seeds_cDNA_P Parameter: Age (day) Value: 2 vs. 0
  misc_feature: MA Experiment 108462 PARAMETER Experiment Name: At_Germinating_Seeds_cDNA_P Parameter: Tissue Value: Germinating Seeds
  misc_feature: MA Experiment ID: 108463 Result: Down-regulated in Transcription
  misc_feature: MA Experiment 108463 PARAMETER Experiment Name: At_Germinating_Seeds_cDNA_P Parameter: Age (day) Value: 3 vs. 0
  misc_feature: MA Experiment 108463 PARAMETER Experiment Name: At_Germinating_Seeds_cDNA_P Parameter: Tissue Value: Germinating Seeds
  misc_feature: MA Experiment ID: 108464 Result: Down-regulated in Transcription
  misc_feature: MA Experiment 108464 PARAMETER Experiment Name: At_Germinating_Seeds_cDNA_P Parameter: Age (day) Value: 4 vs. 0
  misc_feature: MA Experiment 108464 PARAMETER Experiment Name: At_Germinating_Seeds_cDNA_P Parameter: Tissue Value: Germinating Seeds
  misc_feature: MA Experiment ID: 108573 Result: Down-regulated in Transcription
  misc_feature: MA Experiment 108573 PARAMETER Experiment Name: At_Drought_cDNA_P Parameter: Timepoint (hr) Value: 6
  misc_feature: MA Experiment 108573 PARAMETER Experiment Name: At_Drought_cDNA_P Parameter: Tissue Value: Aerial
  misc_feature: MA Experiment 108573 PARAMETER Experiment Name: At_Drought_cDNA_P Parameter: Treatment Value: Drought vs. No Drought
  misc_feature: MA Experiment ID: 20000111 Result: Down-regulated in Transcription
  misc_feature: MA Experiment 20000111 PARAMETER Experiment Name: At_42deg_Heat_cDNA_P Parameter: Temperature (deg C) Value: 42 vs. 22
  misc_feature: MA Experiment 20000111 PARAMETER Experiment Name: At_42deg_Heat_cDNA_P Parameter: Timepoint (hr) Value: 6
  misc_feature: MA Experiment 20000111 PARAMETER Experiment Name: At_42deg_Heat_cDNA_P Parameter: Tissue Value: Aerial
gaaaagattctgacgctggtagtggtgagtggtgagcacggccaaaaggattttggtattgaaaaatggcatcaaaattggttcaacttcaatcaaaggcatgtcaggcttcaaagtttgtggccaagcatgggaattcgtactacaagcaattgttggagcagaacaagcaatacatccaagagcctgcaactatagagaagtgcagtgaattgtctaaacaattgctctacactcgtcttgctagcattcccgggcgctacgaaacatttaggaaagaagtagactacgcaaagaacttattgaagaacagagcgaatctgaaggtggaagatgcaggaatcgctgcattgtttggcttagaatgctttgcttggttttgcgcaggtgaaatcgtcggcagaggattcactttcaccggctactacccttgaaattgagacaacaaacaaccaggtcgccggaatattcttcctgacgcttgtaactccctccatatgattcctcacttgaactatatatacttcctcgaatccatttatattttcagttttttcctgaaacagaagtgttggagctaagggaaaaaaaaacattttggtaaagctcttaataagttgagaaaaatgcatttgatg

SEQ ID NO: 29646 - protein, 122 aa, Arabidopsis thaliana
  peptide (1)..(122): Ceres Seq. ID no. 13489851
  misc_feature (8)..(122): Pfam Name: Mitochondrial ATP synthase g subunit Pfam Description: Mitochondrial ATP synthase g subunit
  misc_feature (8)..(122): Pfam Name: Mitochondrial ATP synthase g subunit Pfam Description: Mitochondrial ATP synthase g subunit
  misc_feature (1)..(120): Homolog of NCBI NO: 34912342 NR Description: P0518F01.5 [Oryza sativa (japonica
  misc_feature (1)..(122): Homolog of NCBI NO: 15236143 NR Description: expressed protein [Arabidopsis thaliana]
  misc_feature (1)..(120): Homolog of NCBI NO: 34912342 NR Description: P0518F01.5 [Oryza sativa (japonica
  misc_feature (1)..(122): Homolog of NCBI NO: 15233603 NR Description: expressed protein [Arabidopsis thaliana]
  misc_feature (1)..(122): Homolog of NCBI NO: 15224821 NR Description: copia-related retroelement pol polyprotein
  misc_feature (1)..(122): Homolog of NCBI NO: 15236143 NR Description: expressed protein [Arabidopsis thaliana]
  misc_feature (1)..(122): Homolog of NCBI NO: 15233603 NR Description: expressed protein [Arabidopsis thaliana]
  misc_feature (1)..(122): Homolog of NCBI NO: 15224821 NR Description: copia-related retroelement pol polyprotein
MASKLVQLQSKACQASKFVAKHGNSYYKQLLEQNKQYIQEPATIEKCSELSKQLLYTRLASIPGRYETFRKEVDYAKNLLKNRANLKVEDAGIAALFGLECFAWFCAGEIVGRGFTFTGYYP

SEQ ID NO: 29647 - protein, 65 aa, Arabidopsis thaliana
  peptide (1)..(65): Ceres Seq. ID no. 13489852
EKILTLVVVSGEHGQKDFGIEKWHQNWFNFNQRHVRLQSLWPSMGIRTTSNCWSRTSNTSKSLQL

SEQ ID NO: 29648 - DNA, 732 bp, Arabidopsis thaliana
  misc_feature (1)..(732): Ceres Seq. ID no. 12476429
  misc_feature: MA Experiment ID: 108434 Result: Down-regulated in Transcription
  misc_feature: MA Experiment 108434 PARAMETER Experiment Name: At_Root_Tips_cDNA_P Parameter: Tissue Value: Root Tips
  misc_feature: MA Experiment ID: 108469 Result: Up-regulated in Transcription
  misc_feature: MA Experiment ID: 108488 Result: Down-regulated in Transcription
  misc_feature: MA Experiment ID: 108501 Result: Down-regulated in Transcription
  misc_feature: MA Experiment 108501 PARAMETER Experiment Name: At_ap2_floral_buds_cDNA_P Parameter: Plant Line Value: ap2 (Ler.)
  misc_feature: MA Experiment 108501 PARAMETER Experiment Name: At_ap2_floral_buds_cDNA_P Parameter: Tissue Value: Closed Flower
  misc_feature: MA Experiment ID: 108561 Result: Up-regulated in Transcription
  misc_feature: MA Experiment 108561 PARAMETER Experiment Name: At_100uM_ABA_cDNA_P Parameter: Timepoint (hr) Value: 6
  misc_feature: MA Experiment 108561 PARAMETER Experiment Name: At_100uM_ABA_cDNA_P Parameter: Tissue Value: Aerial
  misc_feature: MA Experiment 108561 PARAMETER Experiment Name: At_100uM_ABA_cDNA_P Parameter: Treatment Value: 100uM ABA vs. No Treatment
  misc_feature: MA Experiment ID: 108573 Result: Up-regulated in Transcription
  misc_feature: MA Experiment 108573 PARAMETER Experiment Name: At_Drought_cDNA_P Parameter: Timepoint (hr) Value: 6
  misc_feature: MA Experiment 108573 PARAMETER Experiment Name: At_Drought_cDNA_P Parameter: Tissue Value: Aerial
  misc_feature: MA Experiment 108573 PARAMETER Experiment Name: At_Drought_cDNA_P Parameter: Treatment Value: Drought vs. No Drought
  misc_feature: MA Experiment ID: 108576 Result: Up-regulated in Transcription
  misc_feature: MA Experiment 108576 PARAMETER Experiment Name: At_42deg_Heat_cDNA_P Parameter: Temperature (deg C) Value: 42 vs. 22
  misc_feature: MA Experiment 108576 PARAMETER Experiment Name: At_42deg_Heat_cDNA_P Parameter: Timepoint (hr) Value: 1
  misc_feature: MA Experiment 108576 PARAMETER Experiment Name: At_42deg_Heat_cDNA_P Parameter: Tissue Value: Aerial
  misc_feature: MA Experiment ID: 108579 Result: Down-regulated in Transcription
  misc_feature: MA Experiment 108579 PARAMETER Experiment Name: At_4deg_Cold_cDNA_P Parameter: Temperature (deg C) Value: 4 vs. 22
  misc_feature: MA Experiment 108579 PARAMETER Experiment Name: At_4deg_Cold_cDNA_P Parameter: Timepoint (hr) Value: 6
  misc_feature: MA Experiment 108579 PARAMETER Experiment Name: At_4deg_Cold_cDNA_P Parameter: Tissue Value: Aerial
  misc_feature: MA Experiment ID: 108585 Result: Up-regulated in Transcription
  misc_feature: MA Experiment 108585 PARAMETER Experiment Name: At_5mM_NaNP_cDNA_P Parameter: Timepoint (hr) Value: 6
  misc_feature: MA Experiment 108585 PARAMETER Experiment Name: At_5mM_NaNP_cDNA_P Parameter: Tissue Value: Aerial
  misc_feature: MA Experiment 108585 PARAMETER Experiment Name: At_5mM_NaNP_cDNA_P Parameter: Treatment Value: null
  misc_feature: MA Experiment ID: 108605 Result: Up-regulated in Transcription
  misc_feature: MA Experiment 108605 PARAMETER Experiment Name: At_100uM_ABA_cDNA_P Parameter: Timepoint (hr) Value: 6
  misc_feature: MA Experiment 108605 PARAMETER Experiment Name: At_100uM_ABA_cDNA_P Parameter: Tissue Value: Aerial
  misc_feature: MA Experiment 108605 PARAMETER Experiment Name: At_100uM_ABA_cDNA_P Parameter: Treatment Value: 100uM ABA vs. No Treatment
  misc_feature: MA Experiment ID: 108607 Result: Up-regulated in Transcription
  misc_feature: MA Experiment 108607 PARAMETER Experiment Name: At_100uM_ABA_cDNA_P Parameter: Timepoint (hr) Value: 4
  misc_feature: MA Experiment 108607 PARAMETER Experiment Name: At_100uM_ABA_cDNA_P Parameter: Tissue Value: Aerial
  misc_feature: MA Experiment 108607 PARAMETER Experiment Name: At_100uM_ABA_cDNA_P Parameter: Treatment Value: 100uM ABA vs. No Treatment
  misc_feature: MA Experiment ID: 108668 Result: Up-regulated in Transcription
  misc_feature: MA Experiment 108668 PARAMETER Experiment Name: At_2mM_SA_cDNA_P Parameter: Plant Line Value: WS
  misc_feature: MA Experiment 108668 PARAMETER Experiment Name: At_2mM_SA_cDNA_P Parameter: Timepoint (hr) Value: 6
  misc_feature: MA Experiment 108668 PARAMETER Experiment Name: At_2mM_SA_cDNA_P Parameter: Treatment Value: 2mM SA vs. No Treatment
  misc_feature: MA Experiment ID: 20000069 Result: Up-regulated in Transcription
  misc_feature: MA Experiment 20000069 PARAMETER Experiment Name: At_100uM_ABA_Mutants_cDNA_P Parameter: Plant Line Value: CS23
  misc_feature: MA Experiment 20000069 PARAMETER Experiment Name: At_100uM_ABA_Mutants_cDNA_P Parameter: Timepoint (hr) Value: 6
  misc_feature: MA Experiment 20000069 PARAMETER Experiment Name: At_100uM_ABA_Mutants_cDNA_P Parameter: Tissue Value: Aerial
  misc_feature: MA Experiment 20000069 PARAMETER Experiment Name: At_100uM_ABA_Mutants_cDNA_P Parameter: Treatment Value: 100uM ABA vs. No Treatment
  misc_feature: MA Experiment ID: 20000070 Result: Up-regulated in Transcription
  misc_feature: MA Experiment 20000070 PARAMETER Experiment Name: At_100uM_ABA_Mutants_cDNA_P Parameter: Plant Line Value: CS24
  misc_feature: MA Experiment 20000070 PARAMETER Experiment Name: At_100uM_ABA_Mutants_cDNA_P Parameter: Timepoint (hr) Value: 6
  misc_feature: MA Experiment 20000070 PARAMETER Experiment Name: At_100uM_ABA_Mutants_cDNA_P Parameter: Tissue Value: Aerial
  misc_feature: MA Experiment 20000070 PARAMETER Experiment Name: At_100uM_ABA_Mutants_cDNA_P Parameter: Treatment Value: 100uM ABA vs. No Treatment
  misc_feature: MA Experiment ID: 20000071 Result: Up-regulated in Transcription
  misc_feature: MA Experiment 20000071 PARAMETER Experiment Name: At_100uM_ABA_Mutants_cDNA_P Parameter: Plant Line Value: CS8104
  misc_feature: MA Experiment 20000071 PARAMETER Experiment Name: At_100uM_ABA_Mutants_cDNA_P Parameter: Timepoint (hr) Value: 6
  misc_feature: MA Experiment 20000071 PARAMETER Experiment Name: At_100uM_ABA_Mutants_cDNA_P Parameter: Tissue Value: Aerial
  misc_feature: MA Experiment 20000071 PARAMETER Experiment Name: At_100uM_ABA_Mutants_cDNA_P Parameter: Treatment Value: 100uM ABA vs. No Treatment
  misc_feature: MA Experiment ID: 20000072 Result: Up-regulated in Transcription
  misc_feature: MA Experiment 20000072 PARAMETER Experiment Name: At_100uM_ABA_Mutants_cDNA_P Parameter: Plant Line Value: CS8105
  misc_feature: MA Experiment 20000072 PARAMETER Experiment Name: At_100uM_ABA_Mutants_cDNA_P Parameter: Timepoint (hr) Value: 6
  misc_feature: MA Experiment 20000072 PARAMETER Experiment Name: At_100uM_ABA_Mutants_cDNA_P Parameter: Tissue Value: Aerial
  misc_feature: MA Experiment 20000072 PARAMETER Experiment Name: At_100uM_ABA_Mutants_cDNA_P Parameter: Treatment Value: 100uM ABA vs. No Treatment
  misc_feature: MA Experiment ID: 20000086 Result: Up-regulated in Transcription
  misc_feature: MA Experiment 20000086 PARAMETER Experiment Name: At_100uM_ABA_Mutants_cDNA_P Parameter: Plant Line Value: CS22
  misc_feature: MA Experiment 20000086 PARAMETER Experiment Name: At_100uM_ABA_Mutants_cDNA_P Parameter: Timepoint (hr) Value: 6
  misc_feature: MA Experiment 20000086 PARAMETER Experiment Name: At_100uM_ABA_Mutants_cDNA_P Parameter: Tissue Value: Aerial
  misc_feature: MA Experiment 20000086 PARAMETER Experiment Name: At_100uM_ABA_Mutants_cDNA_P Parameter: Treatment Value: 100uM ABA vs. No Treatment
  misc_feature: MA Experiment ID: 20000087 Result: Up-regulated in Transcription
  misc_feature: MA Experiment 20000087 PARAMETER Experiment Name: At_100uM_ABA_Mutants_cDNA_P Parameter: Plant Line Value: WS
  misc_feature: MA Experiment 20000087 PARAMETER Experiment Name: At_100uM_ABA_Mutants_cDNA_P Parameter: Timepoint (hr) Value: 6
  misc_feature: MA Experiment 20000087 PARAMETER Experiment Name: At_100uM_ABA_Mutants_cDNA_P Parameter: Tissue Value: Aerial
  misc_feature: MA Experiment 20000087 PARAMETER Experiment Name: At_100uM_ABA_Mutants_cDNA_P Parameter: Treatment Value: 100uM ABA vs. No Treatment
  misc_feature: MA Experiment ID: 20000088 Result: Up-regulated in Transcription
  misc_feature: MA Experiment 20000088 PARAMETER Experiment Name: At_100uM_ABA_Mutants_cDNA_P Parameter: Plant Line Value: Landsberg
  misc_feature: MA Experiment 20000088 PARAMETER Experiment Name: At_100uM_ABA_Mutants_cDNA_P Parameter: Timepoint (hr) Value: 6
  misc_feature: MA Experiment 20000088 PARAMETER Experiment Name: At_100uM_ABA_Mutants_cDNA_P Parameter: Tissue Value: Aerial
  misc_feature: MA Experiment 20000088 PARAMETER Experiment Name: At_100uM_ABA_Mutants_cDNA_P Parameter: Treatment Value: 100uM ABA vs. No Treatment
  misc_feature: MA Experiment ID: 20000111 Result: Up-regulated in Transcription
  misc_feature: MA Experiment 20000111 PARAMETER Experiment Name: At_42deg_Heat_cDNA_P Parameter: Temperature (deg C) Value: 42 vs. 22
  misc_feature: MA Experiment 20000111 PARAMETER Experiment Name: At_42deg_Heat_cDNA_P Parameter: Timepoint (hr) Value: 6
  misc_feature: MA Experiment 20000111 PARAMETER Experiment Name: At_42deg_Heat_cDNA_P Parameter: Tissue Value: Aerial
  misc_feature: MA Experiment ID: 20000112 Result: Up-regulated in Transcription
  misc_feature: MA Experiment 20000112 PARAMETER Experiment Name: At_42deg_Heat_cDNA_P Parameter: Temperature (deg C) Value: 42 vs. 22
  misc_feature: MA Experiment 20000112 PARAMETER Experiment Name: At_42deg_Heat_cDNA_P Parameter: Timepoint (hr) Value: 2
  misc_feature: MA Experiment 20000112 PARAMETER Experiment Name: At_42deg_Heat_cDNA_P Parameter: Tissue Value: Aerial
  misc_feature: MA Experiment ID: 20000117 Result: Up-regulated in Transcription
  misc_feature: MA Experiment 20000117 PARAMETER Experiment Name: At_100uM_ABA_Mutants_cDNA_P Parameter: Plant Line Value: Columbia
  misc_feature: MA Experiment 20000117 PARAMETER Experiment Name: At_100uM_ABA_Mutants_cDNA_P Parameter: Timepoint (hr) Value: 6
  misc_feature: MA Experiment 20000117 PARAMETER Experiment Name: At_100uM_ABA_Mutants_cDNA_P Parameter: Tissue Value: Aerial
  misc_feature: MA Experiment 20000117 PARAMETER Experiment Name: At_100uM_ABA_Mutants_cDNA_P Parameter: Treatment Value: 100uM ABA vs. No Treatment
  misc_feature: MA Experiment ID: 20000144 Result: Up-regulated in Transcription
  misc_feature: MA Experiment 20000144 PARAMETER Experiment Name: At_42deg_Heat_cDNA_P Parameter: Temperature (deg C) Value: 42 vs. 22
  misc_feature: MA Experiment 20000144 PARAMETER Experiment Name: At_42deg_Heat_cDNA_P Parameter: Timepoint (hr) Value: 1
  misc_feature: MA Experiment 20000144 PARAMETER Experiment Name: At_42deg_Heat_cDNA_P Parameter: Tissue Value: Aerial
  misc_feature: MA Experiment ID: 20000169 Result: Up-regulated in Transcription
  misc_feature: MA Experiment 20000169 PARAMETER Experiment Name: At_100uM_ABA_P Parameter: Age (day) Value: 14
  misc_feature: MA Experiment 20000169 PARAMETER Experiment Name: At_100uM_ABA_P Parameter: Organism Value: A. thaliana
  misc_feature: MA Experiment 20000169 PARAMETER Experiment Name: At_100uM_ABA_P Parameter: Plant Line Value: WS
  misc_feature: MA Experiment 20000169 PARAMETER Experiment Name: At_100uM_ABA_P Parameter: Timepoint (hr) Value: 6
  misc_feature: MA Experiment 20000169 PARAMETER Experiment Name: At_100uM_ABA_P Parameter: Tissue Value: Aerial
  misc_feature: MA Experiment 20000169 PARAMETER Experiment Name: At_100uM_ABA_P Parameter: Treatment Value: 100uM ABA vs. No Treatment
  misc_feature: MA Experiment ID: 20000171 Result: Up-regulated in Transcription
  misc_feature: MA Experiment 20000171 PARAMETER Experiment Name: At_42deg_Heat_P Parameter: Age (day) Value: 14
  misc_feature: MA Experiment 20000171 PARAMETER Experiment Name: At_42deg_Heat_P Parameter: Organism Value: A. thaliana
  misc_feature: MA Experiment 20000171 PARAMETER Experiment Name: At_42deg_Heat_P Parameter: Plant Line Value: WS
  misc_feature: MA Experiment 20000171 PARAMETER Experiment Name: At_42deg_Heat_P Parameter: Temperature (deg C) Value: 42 vs. 22
  misc_feature: MA Experiment 20000171 PARAMETER Experiment Name: At_42deg_Heat_P Parameter: Timepoint (hr) Value: 1
  misc_feature: MA Experiment 20000171 PARAMETER Experiment Name: At_42deg_Heat_P Parameter: Tissue Value: Aerial
  misc_feature: MA Experiment ID: 20000182 Result: Up-regulated in Transcription
  misc_feature: MA Experiment 20000182 PARAMETER Experiment Name: At_2mM_SA_P Parameter: Age (day) Value: 14
  misc_feature: MA Experiment 20000182 PARAMETER Experiment Name: At_2mM_SA_P Parameter: Organism Value: A. thaliana
  misc_feature: MA Experiment 20000182 PARAMETER Experiment Name: At_2mM_SA_P Parameter: Plant Line Value: WS
  misc_feature: MA Experiment 20000182 PARAMETER Experiment Name: At_2mM_SA_P Parameter: Timepoint (hr) Value: 6
  misc_feature: MA Experiment 20000182 PARAMETER Experiment Name: At_2mM_SA_P Parameter: Tissue Value: Aerial
  misc_feature: MA Experiment 20000182 PARAMETER Experiment Name: At_2mM_SA_P Parameter: Treatment Value: 2mM SA vs. No Treatment
  misc_feature: MA Experiment ID: 20000224 Result: Down-regulated in Transcription
  misc_feature: MA Experiment ID: 20000234 Result: Down-regulated in Transcription
  misc_feature: MA Experiment 20000234 PARAMETER Experiment Name: At_Siliques_P Parameter: Age (day) Value: 21
  misc_feature: MA Experiment 20000234 PARAMETER Experiment Name: At_Siliques_P Parameter: Organism Value: A. thaliana
  misc_feature: MA Experiment 20000234 PARAMETER Experiment Name: At_Siliques_P Parameter: Plant Line Value: WS
  misc_feature: MA Experiment 20000234 PARAMETER Experiment Name: At_Siliques_P Parameter: Tissue Value: Less Than 5mm Siliques vs. Whole Plant
  misc_feature: MA Experiment ID: 20000235 Result: Down-regulated in Transcription
  misc_feature: MA Experiment 20000235 PARAMETER Experiment Name: At_Siliques_P Parameter: Age (day) Value: 21
  misc_feature: MA Experiment 20000235 PARAMETER Experiment Name: At_Siliques_P Parameter: Organism Value: A. thaliana
  misc_feature: MA Experiment 20000235 PARAMETER Experiment Name: At_Siliques_P Parameter: Plant Line Value: WS
  misc_feature: MA Experiment 20000235 PARAMETER Experiment Name: At_Siliques_P Parameter: Tissue Value: 5-10mm Siliques vs. Whole Plant
  misc_feature: MA Experiment ID: 20000437 Result: Up-regulated in Transcription
  misc_feature: MA Experiment 20000437 PARAMETER Experiment Name: At_Drought_P Parameter: Age (day) Value: 8
  misc_feature: MA Experiment 20000437 PARAMETER Experiment Name: At_Drought_P Parameter: Organism Value: A. thaliana
  misc_feature: MA Experiment 20000437 PARAMETER Experiment Name: At_Drought_P Parameter: Plant Line Value: WS
  misc_feature: MA Experiment 20000437 PARAMETER Experiment Name: At_Drought_P Parameter: Timepoint (hr) Value: 24
  misc_feature: MA Experiment 20000437 PARAMETER Experiment Name: At_Drought_P Parameter: Tissue Value: Whole Plant
  misc_feature: MA Experiment 20000437 PARAMETER Experiment Name: At_Drought_P Parameter: Treatment Value: Drought vs. No Drought
  misc_feature: MA Experiment ID: 20000453 Result: Up-regulated in Transcription
  misc_feature: MA Experiment 20000453 PARAMETER Experiment Name: At_100uM_ABA_P Parameter: Age (day) Value: 15
  misc_feature: MA Experiment 20000453 PARAMETER Experiment Name: At_100uM_ABA_P Parameter: Organism Value: A. thaliana
  misc_feature: MA Experiment 20000453 PARAMETER Experiment Name: At_100uM_ABA_P Parameter: Plant Line Value: WS
  misc_feature: MA Experiment 20000453 PARAMETER Experiment Name: At_100uM_ABA_P Parameter: Timepoint (hr) Value: 24
  misc_feature: MA Experiment 20000453 PARAMETER Experiment Name: At_100uM_ABA_P Parameter: Tissue Value: Aerial
  misc_feature: MA Experiment 20000453 PARAMETER Experiment Name: At_100uM_ABA_P Parameter: Treatment Value: 100uM ABA vs. No Treatment
  misc_feature: MA Experiment ID: 20000794 Result: Up-regulated in Transcription
  misc_feature: MA Experiment 20000794 PARAMETER Experiment Name: At_Petals_P Parameter: Age (day) Value: 23-25 days
  misc_feature: MA Experiment 20000794 PARAMETER Experiment Name: At_Petals_P Parameter: Plant Line Value: WS
  misc_feature: MA Experiment 20000794 PARAMETER Experiment Name: At_Petals_P Parameter: Tissue Value: Petals vs. Whole plant
  misc_feature: MA Experiment ID: 20001450 Result: Up-regulated in Transcription
  misc_feature: MA Experiment 20001450 PARAMETER Experiment Name: At_Far-red-induction_P Parameter: Age (day) Value: 7
  misc_feature: MA Experiment 20001450 PARAMETER Experiment Name: At_Far-red-induction_P Parameter: Light Value: Far-red vs. White
  misc_feature: MA Experiment 20001450 PARAMETER Experiment Name: At_Far-red-induction_P Parameter: Organism Value: A. thaliana
  misc_feature: MA Experiment 20001450 PARAMETER Experiment Name: At_Far-red-induction_P Parameter: Plant Line Value: Columbia
  misc_feature: MA Experiment 20001450 PARAMETER Experiment Name: At_Far-red-induction_P Parameter: Timepoint (hr) Value: 8
  misc_feature: MA Experiment 20001450 PARAMETER Experiment Name: At_Far-red-induction_P Parameter: Tissue Value: Whole Plant
  misc_feature: MA Experiment ID: 20001451 Result: Up-regulated in Transcription
  misc_feature: MA Experiment 20001451 PARAMETER Experiment Name: At_Far-red-induction_P Parameter: Age (day) Value: 7
  misc_feature: MA Experiment 20001451 PARAMETER Experiment Name: At_Far-red-induction_P Parameter: Light Value: Far-red vs. White
  misc_feature: MA Experiment 20001451 PARAMETER Experiment Name: At_Far-red-induction_P Parameter: Organism Value: A. thaliana
  misc_feature: MA Experiment 20001451 PARAMETER Experiment Name: At_Far-red-induction_P Parameter: Plant Line Value: Columbia
  misc_feature: MA Experiment 20001451 PARAMETER Experiment Name: At_Far-red-induction_P Parameter: Timepoint (hr) Value: 24
  misc_feature: MA Experiment 20001451 PARAMETER Experiment Name: At_Far-red-induction_P Parameter: Tissue Value: Whole Plant
  misc_feature: MA Experiment ID: 20001557 Result: Down-regulated in Transcription
  misc_feature: MA Experiment 20001557 PARAMETER Experiment Name: At_Drought_Soil_Dry_P Parameter: Age (day) Value: 27
  misc_feature: MA Experiment 20001557 PARAMETER Experiment Name: At_Drought_Soil_Dry_P Parameter: Organism Value: A. thaliana
  misc_feature: MA Experiment 20001557 PARAMETER Experiment Name: At_Drought_Soil_Dry_P Parameter: Plant Line Value: WS
  misc_feature: MA Experiment 20001557 PARAMETER Experiment Name: At_Drought_Soil_Dry_P Parameter: Post Timepoint (hr) Value: 3
  misc_feature: MA Experiment 20001557 PARAMETER Experiment Name: At_Drought_Soil_Dry_P Parameter: Post-Treatment Value: Re-Water vs. No Drought
  misc_feature: MA Experiment 20001557 PARAMETER Experiment Name: At_Drought_Soil_Dry_P Parameter: Timepoint (day) Value: 13
  misc_feature: MA Experiment 20001557 PARAMETER Experiment Name: At_Drought_Soil_Dry_P Parameter: Treatment Value: Drought vs. No Drought
  misc_feature: MA Experiment ID: 20001558 Result: Down-regulated in Transcription
  misc_feature: MA Experiment 20001558 PARAMETER Experiment Name: At_Drought_Soil_Dry_P Parameter: Age (day) Value: 27
  misc_feature: MA Experiment 20001558 PARAMETER Experiment Name: At_Drought_Soil_Dry_P Parameter: Organism Value: A. thaliana
  misc_feature: MA Experiment 20001558 PARAMETER Experiment Name: At_Drought_Soil_Dry_P Parameter: Plant Line Value: WS
  misc_feature: MA Experiment 20001558 PARAMETER Experiment Name: At_Drought_Soil_Dry_P Parameter: Post Timepoint (hr) Value: 6
  misc_feature: MA Experiment 20001558 PARAMETER Experiment Name: At_Drought_Soil_Dry_P Parameter: Post-Treatment Value: Re-Water vs. No Drought
  misc_feature: MA Experiment 20001558 PARAMETER Experiment Name: At_Drought_Soil_Dry_P Parameter: Timepoint (day) Value: 13
  misc_feature: MA Experiment 20001558 PARAMETER Experiment Name: At_Drought_Soil_Dry_P Parameter: Treatment Value: Drought vs. No Drought
  misc_feature: MA Experiment ID: 20001904 Result: Up-regulated in Transcription
  misc_feature: MA Experiment 20001904 PARAMETER Experiment Name: At_Drought_Reproduction_P Parameter: Age (day) Value: 37
  misc_feature: MA Experiment 20001904 PARAMETER Experiment Name: At_Drought_Reproduction_P Parameter: Organism Value: A. thaliana
  misc_feature: MA Experiment 20001904 PARAMETER Experiment Name: At_Drought_Reproduction_P Parameter: Plant Line Value: WS
  misc_feature: MA Experiment 20001904 PARAMETER Experiment Name: At_Drought_Reproduction_P Parameter: Timepoint (day) Value: 7
  misc_feature: MA Experiment 20001904 PARAMETER Experiment Name: At_Drought_Reproduction_P Parameter: Tissue Value: Rosettes
  misc_feature: MA Experiment 20001904 PARAMETER Experiment Name: At_Drought_Reproduction_P Parameter: Treatment Value: Drought vs. No Drought
agaaacagttccgtgtaggcaaccattaggaaaaccctaactaaattccattattaatttcttttataatccctttctcttgacattgacttctctctctcgattcttcttctccagtttcaatcaaactcaatttcttctcaacgaaccctaatttccaacaaatcggattcagtttcttcttcggagactaatcgaatcgcaatggctaagagttccttcaagatctctaaccctctcgaggcaaggatgagtgaatcttctcgaatcagagagaagtaccctgacagaattcccgtgattgtggagaaggctggacaaagtgatgttcctgacattgacaagaagaagtatcttgtaccagctgatctaacagtgggacaatttgtatacgtggttcgtaaaagaatcaagcttggagctgagaaagctatttttgtctttgttaagaacacattgcctccaactgctgcattgatgtctgcgatctatgaagaacacaaagatgaggatgggttcctctacatgacttacagtggagagaacacttttggatctcttaccgttgcttgaataaaaatcgatctttggatgactttgatgtacatacataaatcaggaagataaagatgtacattgcttccttcttttctctggcttttaactttgctttggatgtttggatatctttccctttgggtttattaatcgtcagaaacttctccttttctt

SEQ ID NO: 29649 - protein, 122 aa, Arabidopsis thaliana
  peptide (1)..(122): Ceres Seq. ID no. 12476430
  misc_feature (14)..(117): Pfam Name: Microtubule associated protein 1A/1B, light chain 3 Pfam Description: Microtubule associated protein 1A/1B, light
  misc_feature (1)..(117): Homolog of NCBI NO: 21592920 NR Description: putative microtubule-associated protein
  misc_feature (1)..(119): Homolog of NCBI NO: 38344173 NR Description: OSJNBa0053K19.12 [Oryza sativa (japonica
  misc_feature (1)..(118): Homolog of NCBI NO: 33146967 NR Description: putative microtubule associated protein
  misc_feature (1)..(117): Homolog of NCBI NO: 15220686 NR Description: symbiosis-related protein, putative
  misc_feature (1)..(117): Homolog of NCBI NO: 40253647 NR Description: putative microtubial binding protein
  misc_feature (1)..(118): Homolog of NCBI NO: 34595981 NR Description: microtubule-associated protein 1 light chain 3
  misc_feature (16)..(122): Homolog of NCBI NO: 11279074 NR Description: symbiosis-related like protein - Arabidopsis
  misc_feature (1)..(117): Homolog of NCBI NO: 15233593 NR Description: putative symbiosis-related protein
  misc_feature (1)..(122): Homolog of NCBI NO: 21553487 NR Description: symbiosis-related like protein [Arabidopsis
  misc_feature (1)..(122): Homolog of NCBI NO: 18415813 NR Description: symbiosis-related like protein
MAKSSFKISNPLEARMSESSRIREKYPDRIPVIVEKAGQSDVPDIDKKKYLVPADLTVGQFVYVVRKRIKLGAEKAIFVFVKNTLPPTAALMSAIYEEHKDEDGFLYMTYSGENTFGSLTVA

SEQ ID NO: 29650 - protein, 107 aa, Arabidopsis thaliana
  peptide (1)..(107): Ceres Seq. ID no. 12476431
  misc_feature (1)..(102): Pfam Name: Microtubule associated protein 1A/1B, light chain 3 Pfam Description: Microtubule associated protein 1A/1B, light
  misc_feature (1)..(102): Homolog of NCBI NO: 21592920 NR Description: putative microtubule-associated protein
  misc_feature (1)..(104): Homolog of NCBI NO: 38344173 NR Description: OSJNBa0053K19.12 [Oryza sativa (japonica
  misc_feature (1)..(103): Homolog of NCBI NO: 33146967 NR Description: putative microtubule associated protein
  misc_feature (1)..(102): Homolog of NCBI NO: 15220686 NR Description: symbiosis-related protein, putative
  misc_feature (1)..(102): Homolog of NCBI NO: 40253647 NR Description: putative microtubial binding protein
  misc_feature (1)..(103): Homolog of NCBI NO: 34595981 NR Description: microtubule-associated protein 1 light chain 3
  misc_feature (1)..(107): Homolog of NCBI NO: 11279074 NR Description: symbiosis-related like protein - Arabidopsis
  misc_feature (1)..(102): Homolog of NCBI NO: 15233593 NR Description: putative symbiosis-related protein
  misc_feature (1)..(107): Homolog of NCBI NO: 21553487 NR Description: symbiosis-related like protein [Arabidopsis
  misc_feature (1)..(107): Homolog of NCBI NO: 18415813 NR Description: symbiosis-related like protein
MSESSRIREKYPDRIPVIVEKAGQSDVPDIDKKKYLVPADLTVGQFVYVVRKRIKLGAEKAIFVFVKNTLPPTAALMSAIYEEHKDEDGFLYMTYSGENTFGSLTVA

SEQ ID NO: 29651 - DNA, 537 bp, Arabidopsis thaliana
  misc_feature (1)..(537): Ceres Seq. ID no. 13491058
  misc_feature: MA Experiment ID: 108434 Result: Up-regulated in Transcription
  misc_feature: MA Experiment 108434 PARAMETER Experiment Name: At_Root_Tips_cDNA_P Parameter: Tissue Value: Root Tips
  misc_feature: MA Experiment ID: 108462 Result: Down-regulated in Transcription
  misc_feature: MA Experiment 108462 PARAMETER Experiment Name: At_Germinating_Seeds_cDNA_P Parameter: Age (day) Value: 2 vs. 0
  misc_feature: MA Experiment 108462 PARAMETER Experiment Name: At_Germinating_Seeds_cDNA_P Parameter: Tissue Value: Germinating Seeds
  misc_feature: MA Experiment ID: 108463 Result: Down-regulated in Transcription
  misc_feature: MA Experiment 108463 PARAMETER Experiment Name: At_Germinating_Seeds_cDNA_P Parameter: Age (day) Value: 3 vs. 0
  misc_feature: MA Experiment 108463 PARAMETER Experiment Name: At_Germinating_Seeds_cDNA_P Parameter: Tissue Value: Germinating Seeds
  misc_feature: MA Experiment ID: 108464 Result: Down-regulated in Transcription
  misc_feature: MA Experiment 108464 PARAMETER Experiment Name: At_Germinating_Seeds_cDNA_P Parameter: Age (day) Value: 4 vs. 0
  misc_feature: MA Experiment 108464 PARAMETER Experiment Name: At_Germinating_Seeds_cDNA_P Parameter: Tissue Value: Germinating Seeds
acgaacaacggaagaacaaaactctgagcgaatcaatcaatcggaaaaaggagataggtttcgcgaaaatggcggagaaaaaggatagtgtgccaccggaatacgatgtgaatgctaagtgggacgcatgtctcgatctcactgtccgccgcttcgtttactcttccctcggcggcgcatttgccggtcttctgttcttcaggagtcctgttacaagatgggcatcgattgctttaggtgctggaattggtattggctctgcatattcagattgttctcgtgcttttgattcaccttcttcatcttcagctaatttagcagctcccaagaataatattacagagacttctcctgtatctcaggctgcagacgagtagacaatgtcgataaagtggaagttagtaacacatccaatgatcggggtgttcagaaacagagctattatcatgcaatgctttgttgaattgtttcctaaacctgcaaagacaagagtctattgagataatgtcaaatgtaaaaacctttttttattcgctc

SEQ ID NO: 29652 - protein, 124 aa, Arabidopsis thaliana
  peptide (1)..(124): Ceres Seq. ID no. 13491059
  misc_feature (23)..(96): Pfam Name: Domain of unknown function (DUF543) Pfam Description: Domain of unknown function (DUF543)
  misc_feature (25)..(124): Homolog of NCBI NO: 18395129 NR Description: expressed protein [Arabidopsis thaliana]
  misc_feature (23)..(120): Homolog of NCBI NO: 25406151 NR Description: unknown protein T9N14.2 [imported] - Arabidopsis
  misc_feature (23)..(124): Homolog of NCBI NO: 21553491 NR Description: unknown [Arabidopsis thaliana]
  misc_feature (23)..(124): Homolog of NCBI NO: 18410008 NR Description: expressed protein [Arabidopsis thaliana]
EQRKNKTLSESINRKKEIGFAKMAEKKDSVPPEYDVNAKWDACLDLTVRRFVYSSLGGAFAGLLFFRSPVTRWASIALGAGIGIGSAYSDCSRAFDSPSSSSANLAAPKNNITETSPVSQAADE

SEQ ID NO: 29653 - protein, 102 aa, Arabidopsis thaliana
  peptide (1)..(102): Ceres Seq. ID no. 13491060
  misc_feature (1)..(74): Pfam Name: Domain of unknown function (DUF543) Pfam Description: Domain of unknown function (DUF543)
  misc_feature (3)..(102): Homolog of NCBI NO: 18395129 NR Description: expressed protein [Arabidopsis thaliana]
  misc_feature (1)..(98): Homolog of NCBI NO: 25406151 NR Description: unknown protein T9N14.2 [imported] - Arabidopsis
  misc_feature (1)..(102): Homolog of NCBI NO: 21553491 NR Description: unknown [Arabidopsis thaliana]
  misc_feature (1)..(102): Homolog of NCBI NO: 18410008 NR Description: expressed protein [Arabidopsis thaliana]
MAEKKDSVPPEYDVNAKWDACLDLTVRRFVYSSLGGAFAGLLFFRSPVTRWASIALGAGIGIGSAYSDCSRAFDSPSSSSANLAAPKNNITETSPVSQAADE

SEQ ID NO: 29654 - DNA, 857 bp, Arabidopsis thaliana
  misc_feature (1)..(857): Ceres Seq. ID no. 12332793
  misc_feature: MA Experiment ID: 108433 Result: Up-regulated in Transcription
  misc_feature: MA Experiment 108433 PARAMETER Experiment Name: At_rhl_Mutant2_cDNA_P Parameter: Age (day) Value: 7
  misc_feature: MA Experiment 108433 PARAMETER Experiment Name: At_rhl_Mutant2_cDNA_P Parameter: Organism Value: A. thaliana
  misc_feature: MA Experiment 108433 PARAMETER Experiment Name: At_rhl_Mutant2_cDNA_P Parameter: Plant Line Value: rhl Mutant vs. wt landsburg
  misc_feature: MA Experiment 108433 PARAMETER Experiment Name: At_rhl_Mutant2_cDNA_P Parameter: Tissue Value: Roots
  misc_feature: MA Experiment ID: 108434 Result: Down-regulated in Transcription
  misc_feature: MA Experiment 108434 PARAMETER Experiment Name: At_Root_Tips_cDNA_P Parameter: Tissue Value: Root Tips
  misc_feature: MA Experiment ID: 108435 Result: Down-regulated in Transcription
  misc_feature: MA Experiment 108435 PARAMETER Experiment Name: At_stm_Mutants_cDNA_P Parameter: Plant Line Value: wt Landsburg vs stm
  misc_feature: MA Experiment 108435 PARAMETER Experiment Name: At_stm_Mutants_cDNA_P Parameter: Tissue Value: Shoot Apical Meristem Region
  misc_feature: MA Experiment ID: 108462 Result: Up-regulated in Transcription
  misc_feature: MA Experiment 108462 PARAMETER Experiment Name: At_Germinating_Seeds_cDNA_P Parameter: Age (day) Value: 2 vs. 0
  misc_feature: MA Experiment 108462 PARAMETER Experiment Name: At_Germinating_Seeds_cDNA_P Parameter: Tissue Value: Germinating Seeds
  misc_feature: MA Experiment ID: 108463 Result: Up-regulated in Transcription
  misc_feature: MA Experiment 108463 PARAMETER Experiment Name: At_Germinating_Seeds_cDNA_P Parameter: Age (day) Value: 3 vs. 0
  misc_feature: MA Experiment 108463 PARAMETER Experiment Name: At_Germinating_Seeds_cDNA_P Parameter: Tissue Value: Germinating Seeds
  misc_feature: MA Experiment ID: 108464 Result: Up-regulated in Transcription
  misc_feature: MA Experiment 108464 PARAMETER Experiment Name: At_Germinating_Seeds_cDNA_P Parameter: Age (day) Value: 4 vs. 0
  misc_feature: MA Experiment 108464 PARAMETER Experiment Name: At_Germinating_Seeds_cDNA_P Parameter: Tissue Value: Germinating Seeds
  misc_feature: MA Experiment ID: 108488 Result: Down-regulated in Transcription
  misc_feature: MA Experiment ID: 108577 Result: Down-regulated in Transcription
  misc_feature: MA Experiment 108577 PARAMETER Experiment Name: At_42deg_Heat_cDNA_P Parameter: Temperature (deg C) Value: 42 vs. 22
  misc_feature: MA Experiment 108577 PARAMETER Experiment Name: At_42deg_Heat_cDNA_P Parameter: Timepoint (hr) Value: 6
  misc_feature: MA Experiment 108577 PARAMETER Experiment Name: At_42deg_Heat_cDNA_P Parameter: Tissue Value: Aerial
  misc_feature: MA Experiment ID: 20000090 Result: Up-regulated in Transcription
  misc_feature: MA Experiment ID: 20000111 Result: Down-regulated in Transcription
  misc_feature: MA Experiment 20000111 PARAMETER Experiment Name: At_42deg_Heat_cDNA_P Parameter: Temperature (deg C) Value: 42 vs. 22
  misc_feature: MA Experiment 20000111 PARAMETER Experiment Name: At_42deg_Heat_cDNA_P Parameter: Timepoint (hr) Value: 6
  misc_feature: MA Experiment 20000111 PARAMETER Experiment Name: At_42deg_Heat_cDNA_P Parameter: Tissue Value: Aerial
  misc_feature: MA Experiment ID: 20000113 Result: Down-regulated in Transcription
  misc_feature: MA Experiment 20000113 PARAMETER Experiment Name: At_42deg_Heat_cDNA_P Parameter: Temperature (deg C) Value: 42 vs. 22
  misc_feature: MA Experiment 20000113 PARAMETER Experiment Name: At_42deg_Heat_cDNA_P Parameter: Timepoint (hr) Value: 8
  misc_feature: MA Experiment 20000113 PARAMETER Experiment Name: At_42deg_Heat_cDNA_P Parameter: Tissue Value: Aerial
acggcataataagaccaagaagaaaaagaaaacattaatttcaaccaaagcaaaacagagagaaaaaaatagagagagtgaatcaatttcggtggagaaagagaagaatggagcagccgtacgtgtacgcatacccgcaaggtagtggcccctcgggagctccgactccacaagccggaggagtggtagtggatccaaggtactgcgctccttaccctatagatatggcgatcgtacggaagatgatgtcgttgacggacggtaatttcgtgataacggacgtcaacggaaacctgctgttcaaggtgaaggaaccggtgtttggtctccacgacaagagggtcttgctggatggttctggtactccggtcgtcactttgagagaaaagatggtgagcatgcatgacaggtggcaagtgtttagaggagggagtacggcagcagcgtgatctgctgtacacggtgaaaagatcgtcgatgcttcagctaaagaccaaactcgatgtgtttttgggacacaacaaagatgagaagagatgtgatttcagagtcaaagggagttggctcgagcgttcttgtgttgtttacgccggcgaatctgacgccattgttgcccaagtatactatctctaactctctttccttcattaagggcccatccatctcatttatcaatgcatctcacatgtctctacacagtacacatttattagcaatgttttaatctggttttggtctactgctttagaatccggttttgatggacaggtttaggtagtttttgatttcggtttagatcaaaagatacatttatcttagcccatatattgtatgtttgatgaaattgggaagatttg

SEQ ID NO: 29655 - protein, 113 aa, Arabidopsis thaliana
  peptide (1)..(113): Ceres Seq. ID no. 12332794
  misc_feature (25)..(110): Pfam Name: Protein of unknown function (DUF567) Pfam Description: Protein of unknown function (DUF567)
  misc_feature (26)..(110): Homolog of NCBI NO: 17979321 NR Description: unknown protein [Arabidopsis thaliana]
  misc_feature (27)..(107): Homolog of NCBI NO: 15228906 NR Description: hypothetical protein; protein id: At3g16900.1
  misc_feature (18)..(109): Homolog of NCBI NO: 27818079 NR Description: OSJNBa0086N05.7 [Oryza sativa (japonica
  misc_feature (27)..(93): Homolog of NCBI NO: 15229837 NR Description: hypothetical protein; protein id: At3g11740.1
  misc_feature (26)..(110): Homolog of NCBI NO: 15217694 NR Description: unknown protein; protein id: At1g33840.1
  misc_feature (1)..(110): Homolog of NCBI NO: 9665105 NR Description: Hypothetical protein [Arabidopsis thaliana]
  misc_feature (1)..(110): Homolog of NCBI NO: 25352417 NR Description: hypothetical protein T3M13.14 - Arabidopsis
  misc_feature (1)..(110): Homolog of NCBI NO: 30679390 NR Description: expressed protein [Arabidopsis thaliana]
  misc_feature (1)..(110): Homolog of NCBI NO: 18413737 NR Description: expressed protein
  misc_feature (1)..(110): Homolog of NCBI NO: 21553506 NR Description: unknown [Arabidopsis thaliana]
MEQPYVYAYPQGSGPSGAPTPQAGGVVVDPRYCAPYPIDMAIVRKMMSLTDGNFVITDVNGNLLFKVKEPVFGLHDKRVLLDGSGTPVVTLREKMVSMHDRWQVFRGGSTAAA

SEQ ID NO: 29656 - protein, 76 aa, Arabidopsis thaliana
  peptide (1)..(76): Ceres Seq. ID no. 12332795
  misc_feature (10)..(73): Pfam Name: Protein of unknown function (DUF567) Pfam Description: Protein of unknown function (DUF567)
  misc_feature (12)..(76): Homolog of NCBI NO: 30694393 NR Description: expressed protein [Arabidopsis thaliana]
  misc_feature (16)..(74): Homolog of NCBI NO: 15228906 NR Description: hypothetical protein; protein id: At3g16900.1
  misc_feature (16)..(73): Homolog of NCBI NO: 27818079 NR Description: OSJNBa0086N05.7 [Oryza sativa (japonica
  misc_feature (27)..(74): Homolog of NCBI NO: 15229837 NR Description: hypothetical protein; protein id: At3g11740.1
  misc_feature (10)..(73): Homolog of NCBI NO: 15217694 NR Description: unknown protein; protein id: At1g33840.1
  misc_feature (10)..(73): Homolog of NCBI NO: 9665105 NR Description: Hypothetical protein [Arabidopsis thaliana]
  misc_feature (10)..(76): Homolog of NCBI NO: 25352417 NR Description: hypothetical protein T3M13.14 - Arabidopsis
  misc_feature (10)..(74): Homolog of NCBI NO: 30679390 NR Description: expressed protein [Arabidopsis thaliana]
  misc_feature (10)..(76): Homolog of NCBI NO: 18413737 NR Description: expressed protein
  misc_feature (10)..(76): Homolog of NCBI NO: 21553506 NR Description: unknown [Arabidopsis thaliana]
MTGGKCLEEGVRQQRDLLYTVKRSSMLQLKTKLDVFLGHNKDEKRCDFRVKGSWLERSCVVYAGESDAIVAQVYYL

SEQ ID NO: 29657 - protein, 74 aa, Arabidopsis thaliana
  peptide (1)..(74): Ceres Seq. ID no. 12332796
  misc_feature (1)..(71): Pfam Name: Protein of unknown function (DUF567) Pfam Description: Protein of unknown function (DUF567)
  misc_feature (1)..(71): Homolog of NCBI NO: 17979321 NR Description: unknown protein [Arabidopsis thaliana]
  misc_feature (1)..(68): Homolog of NCBI NO: 15228906 NR Description: hypothetical protein; protein id: At3g16900.1
  misc_feature (1)..(70): Homolog of NCBI NO: 27818079 NR Description: OSJNBa0086N05.7 [Oryza sativa (japonica
  misc_feature (1)..(54): Homolog of NCBI NO: 15229837 NR Description: hypothetical protein; protein id: At3g11740.1
  misc_feature (1)..(71): Homolog of NCBI NO: 15217694 NR Description: unknown protein; protein id: At1g33840.1
  misc_feature (1)..(71): Homolog of NCBI NO: 9665105 NR Description: Hypothetical protein [Arabidopsis thaliana]
  misc_feature (1)..(71): Homolog of NCBI NO: 25352417 NR Description: hypothetical protein T3M13.14 - Arabidopsis
  misc_feature (1)..(71): Homolog of NCBI NO: 30679390 NR Description: expressed protein [Arabidopsis thaliana]
  misc_feature (1)..(71): Homolog of NCBI NO: 18413737 NR Description: expressed protein
  misc_feature (1)..(71): Homolog of NCBI NO: 21553506 NR Description: unknown [Arabidopsis thaliana]
MAIVRKMMSLTDGNFVITDVNGNLLFKVKEPVFGLHDKRVLLDGSGTPVVTLREKMVSMHDRWQVFRGGSTAAA

SEQ ID NO: 29658 - DNA, 1558 bp, Arabidopsis thaliana; identical to SEQ ID NO: 22226
  misc_feature (1)..(1558): Ceres Seq. ID no. 13487458
  misc_feature: MA Experiment ID: 108434 Result: Up-regulated in Transcription
  misc_feature: MA Experiment 108434 PARAMETER Experiment Name: At_Root_Tips_cDNA_P Parameter: Tissue Value: Root Tips
  misc_feature: MA Experiment ID: 108462 Result: Down-regulated in Transcription
  misc_feature: MA Experiment 108462 PARAMETER Experiment Name: At_Germinating_Seeds_cDNA_P Parameter: Age (day) Value: 2 vs. 0
  misc_feature: MA Experiment 108462 PARAMETER Experiment Name: At_Germinating_Seeds_cDNA_P Parameter: Tissue Value: Germinating Seeds
  misc_feature: MA Experiment ID: 108463 Result: Down-regulated in Transcription
  misc_feature: MA Experiment 108463 PARAMETER Experiment Name: At_Germinating_Seeds_cDNA_P Parameter: Age (day) Value: 3 vs. 0
  misc_feature: MA Experiment 108463 PARAMETER Experiment Name: At_Germinating_Seeds_cDNA_P Parameter: Tissue Value: Germinating Seeds
  misc_feature: MA Experiment ID: 108464 Result: Down-regulated in Transcription
  misc_feature: MA Experiment 108464 PARAMETER Experiment Name: At_Germinating_Seeds_cDNA_P Parameter: Age (day) Value: 4 vs. 0
  misc_feature: MA Experiment 108464 PARAMETER Experiment Name: At_Germinating_Seeds_cDNA_P Parameter: Tissue Value: Germinating Seeds
  misc_feature: MA Experiment ID: 108573 Result: Down-regulated in Transcription
  misc_feature: MA Experiment 108573 PARAMETER Experiment Name: At_Drought_cDNA_P Parameter: Timepoint (hr) Value: 6
  misc_feature: MA Experiment 108573 PARAMETER Experiment Name: At_Drought_cDNA_P Parameter: Tissue Value: Aerial
  misc_feature: MA Experiment 108573 PARAMETER Experiment Name: At_Drought_cDNA_P Parameter: Treatment Value: Drought vs. No Drought
  misc_feature: MA Experiment ID: 20000224 Result: Up-regulated in Transcription
  misc_feature: MA Experiment ID: 20001451 Result: Up-regulated in Transcription
  misc_feature: MA Experiment 20001451 PARAMETER Experiment Name: At_Far-red-induction_P Parameter: Age (day) Value: 7
  misc_feature: MA Experiment 20001451 PARAMETER Experiment Name: At_Far-red-induction_P Parameter: Light Value: Far-red vs. White
  misc_feature: MA Experiment 20001451 PARAMETER Experiment Name: At_Far-red-induction_P Parameter: Organism Value: A. thaliana
  misc_feature: MA Experiment 20001451 PARAMETER Experiment Name: At_Far-red-induction_P Parameter: Plant Line Value: Columbia
  misc_feature: MA Experiment 20001451 PARAMETER Experiment Name: At_Far-red-induction_P Parameter: Timepoint (hr) Value: 24
  misc_feature: MA Experiment 20001451 PARAMETER Experiment Name: At_Far-red-induction_P Parameter: Tissue Value: Whole Plant
  misc_feature: MA Experiment ID: 20001557 Result: Up-regulated in Transcription
  misc_feature: MA Experiment 20001557 PARAMETER Experiment Name: At_Drought_Soil_Dry_P Parameter: Age (day) Value: 27
  misc_feature: MA Experiment 20001557 PARAMETER Experiment Name: At_Drought_Soil_Dry_P Parameter: Organism Value: A. thaliana
  misc_feature: MA Experiment 20001557 PARAMETER Experiment Name: At_Drought_Soil_Dry_P Parameter: Plant Line Value: WS
  misc_feature: MA Experiment 20001557 PARAMETER Experiment Name: At_Drought_Soil_Dry_P Parameter: Post Timepoint (hr) Value: 3
  misc_feature: MA Experiment 20001557 PARAMETER Experiment Name: At_Drought_Soil_Dry_P Parameter: Post-Treatment Value: Re-Water vs. No Drought
  misc_feature: MA Experiment 20001557 PARAMETER Experiment Name: At_Drought_Soil_Dry_P Parameter: Timepoint (day) Value: 13
  misc_feature: MA Experiment 20001557 PARAMETER Experiment Name: At_Drought_Soil_Dry_P Parameter: Treatment Value: Drought vs. No Drought
  misc_feature: MA Experiment ID: 20001558 Result: Up-regulated in Transcription
  misc_feature: MA Experiment 20001558 PARAMETER Experiment Name: At_Drought_Soil_Dry_P Parameter: Age (day) Value: 27
  misc_feature: MA Experiment 20001558 PARAMETER Experiment Name: At_Drought_Soil_Dry_P Parameter: Organism Value: A. thaliana
  misc_feature: MA Experiment 20001558 PARAMETER Experiment Name: At_Drought_Soil_Dry_P Parameter: Plant Line Value: WS
  misc_feature: MA Experiment 20001558 PARAMETER Experiment Name: At_Drought_Soil_Dry_P Parameter: Post Timepoint (hr) Value: 6
  misc_feature: MA Experiment 20001558 PARAMETER Experiment Name: At_Drought_Soil_Dry_P Parameter: Post-Treatment Value: Re-Water vs. No Drought
  misc_feature: MA Experiment 20001558 PARAMETER Experiment Name: At_Drought_Soil_Dry_P Parameter: Timepoint (day) Value: 13
  misc_feature: MA Experiment 20001558 PARAMETER Experiment Name: At_Drought_Soil_Dry_P Parameter: Treatment Value: Drought vs. No Drought

SEQ ID NO: 29659 - protein, 415 aa, Arabidopsis thaliana; identical to SEQ ID NO: 22227
  peptide (1)..(415): Ceres Seq. ID no. 13487459
  misc_feature (88)..(336): Pfam Name: Nucleosome assembly protein (NAP) Pfam Description: Nucleosome assembly protein (NAP)
  misc_feature (88)..(336): Pfam Name: Nucleosome assembly protein (NAP) Pfam Description: Nucleosome assembly protein (NAP)
  misc_feature (61)..(389): Homolog of NCBI NO: 32414795 NR Description: hypothetical protein [Neurospora crassa]
  misc_feature (37)..(415): Homolog of NCBI NO: 21898560 NR Description: nucleosome/chromatin assembly factor group A [Zea
  misc_feature (37)..(415): Homolog of NCBI NO: 2129840 NR Description: nucleosome assembly protein 1 - soybean
  misc_feature (37)..(415): Homolog of NCBI NO: 29569109 NR Description: nucleosome/chromatin assembly factor group A [Zea
  misc_feature (37)..(415): Homolog of NCBI NO: 7488816 NR Description: nucleosome assembly protein 1 - garden pea
  misc_feature (61)..(389): Homolog of NCBI NO: 32414795 NR Description: hypothetical protein [Neurospora crassa]
  misc_feature (37)..(415): Homolog of NCBI NO: 2129840 NR Description: nucleosome assembly protein 1 - soybean
  misc_feature (37)..(415): Homolog of NCBI NO: 7488816 NR Description: nucleosome assembly protein 1 - garden pea
  misc_feature (37)..(415): Homolog of NCBI NO: 15224782 NR Description: nucleosome assembly protein -related [Arabidopsis
  misc_feature (37)..(415): Homolog of NCBI NO: 18423918 NR Description: nucleosome assembly protein [Arabidopsis
  misc_feature (37)..(415): Homolog of NCBI NO: 8777435 NR Description: nucleosome assembly protein [Arabidopsis thaliana]
  misc_feature (36)..(415): Homolog of NCBI NO: 549975 NR Description: nucleosome assembly protein I-like protein
  misc_feature (37)..(415): Homolog of NCBI NO: 15236115 NR Description: nucleosome assembly protein I-related protein
  misc_feature (37)..(415): Homolog of NCBI NO: 29569109 NR Description: nucleosome/chromatin assembly factor group A [Zea
  misc_feature (37)..(415): Homolog of NCBI NO: 21898560 NR Description: nucleosome/chromatin assembly factor group A [Zea
  misc_feature (37)..(415): Homolog of NCBI NO: 15236115 NR Description: nucleosome assembly protein I-related protein
  misc_feature (36)..(415): Homolog of NCBI NO: 549975 NR Description: nucleosome assembly protein I-like protein
  misc_feature (37)..(415): Homolog of NCBI NO: 8777435 NR Description: nucleosome assembly protein [Arabidopsis thaliana]
  misc_feature (37)..(415): Homolog of NCBI NO: 18423918 NR Description: nucleosome assembly protein [Arabidopsis
  misc_feature (37)..(415): Homolog of NCBI NO: 15224782 NR Description: nucleosome assembly protein -related [Arabidopsis

SEQ ID NO: 29660 - protein, 379 aa, Arabidopsis thaliana; identical to SEQ ID NO: 22228
  peptide (1)..(379): Ceres Seq. ID no. 13487460
  misc_feature (52)..(300): Pfam Name: Nucleosome assembly protein (NAP) Pfam Description: Nucleosome assembly protein (NAP)
  misc_feature (52)..(300): Pfam Name: Nucleosome assembly protein (NAP) Pfam Description: Nucleosome assembly protein (NAP)
  misc_feature (25)..(353): Homolog of NCBI NO: 32414795 NR Description: hypothetical protein [Neurospora crassa]
  misc_feature (1)..(379): Homolog of NCBI NO: 21898560 NR Description: nucleosome/chromatin assembly factor group A [Zea
  misc_feature (1)..(379): Homolog of NCBI NO: 2129840 NR Description: nucleosome assembly protein 1 - soybean
  misc_feature (1)..(379): Homolog of NCBI NO: 29569109 NR Description: nucleosome/chromatin assembly factor group A [Zea
  misc_feature (1)..(379): Homolog of NCBI NO: 7488816 NR Description: nucleosome assembly protein 1 - garden pea
  misc_feature (25)..(353): Homolog of NCBI NO: 32414795 NR Description: hypothetical protein [Neurospora crassa]
  misc_feature (1)..(379): Homolog of NCBI NO: 2129840 NR Description: nucleosome assembly protein 1 - soybean
  misc_feature (1)..(379): Homolog of NCBI NO: 7488816 NR Description: nucleosome assembly protein 1 - garden pea
  misc_feature (1)..(379): Homolog of NCBI NO: 15224782 NR Description: nucleosome assembly protein -related [Arabidopsis
  misc_feature (1)..(379): Homolog of NCBI NO: 18423918 NR Description: nucleosome assembly protein [Arabidopsis
  misc_feature (1)..(379): Homolog of NCBI NO: 8777435 NR Description: nucleosome assembly protein [Arabidopsis thaliana]
  misc_feature (1)..(379): Homolog of NCBI NO: 549975 NR Description: nucleosome assembly protein I-like protein
  misc_feature (1)..(379): Homolog of NCBI NO: 15236115 NR Description: nucleosome assembly protein I-related protein
  misc_feature (1)..(379): Homolog of NCBI NO: 29569109 NR Description: nucleosome/chromatin assembly factor group A [Zea
  misc_feature (1)..(379): Homolog of NCBI NO: 21898560 NR Description: nucleosome/chromatin assembly factor group A [Zea
  misc_feature (1)..(379): Homolog of NCBI NO: 15236115 NR Description: nucleosome assembly protein I-related protein
  misc_feature (1)..(379): Homolog of NCBI NO: 549975 NR Description: nucleosome assembly protein I-like protein
  misc_feature (1)..(379): Homolog of NCBI NO: 8777435 NR Description: nucleosome assembly protein [Arabidopsis thaliana]
  misc_feature (1)..(379): Homolog of NCBI NO: 18423918 NR Description: nucleosome assembly protein [Arabidopsis
  misc_feature (1)..(379): Homolog of NCBI NO: 15224782 NR Description: nucleosome assembly protein -related [Arabidopsis

SEQ ID NO: 29661 - protein, 372 aa, Arabidopsis thaliana; identical to SEQ ID NO: 22229
  peptide (1)..(372): Ceres Seq. ID no. 13487461
  misc_feature (45)..(293): Pfam Name: Nucleosome assembly protein (NAP) Pfam Description: Nucleosome assembly protein (NAP)
  misc_feature (45)..(293): Pfam Name: Nucleosome assembly protein (NAP) Pfam Description: Nucleosome assembly protein (NAP)
  misc_feature (18)..(346): Homolog of NCBI NO: 32414795 NR Description: hypothetical protein [Neurospora crassa]
  misc_feature (1)..(372): Homolog of NCBI NO: 21898560 NR Description: nucleosome/chromatin assembly factor group A [Zea
  misc_feature (1)..(372): Homolog of NCBI NO: 2129840 NR Description: nucleosome assembly protein 1 - soybean
  misc_feature (1)..(372): Homolog of NCBI NO: 29569109 NR Description: nucleosome/chromatin assembly factor group A [Zea
  misc_feature (1)..(372): Homolog of NCBI NO: 7488816 NR Description: nucleosome assembly protein 1 - garden pea
  misc_feature (18)..(346): Homolog of NCBI NO: 32414795 NR Description: hypothetical protein [Neurospora crassa]
  misc_feature (1)..(372): Homolog of NCBI NO: 2129840 NR Description: nucleosome assembly protein 1 - soybean
  misc_feature (1)..(372): Homolog of NCBI NO: 7488816 NR Description: nucleosome assembly protein 1 - garden pea
  misc_feature (1)..(372): Homolog of NCBI NO: 15224782 NR Description: nucleosome assembly protein -related [Arabidopsis
  misc_feature (1)..(372): Homolog of NCBI NO: 18423918 NR Description: nucleosome assembly protein [Arabidopsis
  misc_feature (1)..(372): Homolog of NCBI NO: 8777435 NR Description: nucleosome assembly protein [Arabidopsis thaliana]
  misc_feature (1)..(372): Homolog of NCBI NO: 549975 NR Description: nucleosome assembly protein I-like protein
  misc_feature (1)..(372): Homolog of NCBI NO: 15236115 NR Description: nucleosome assembly protein I-related protein
  misc_feature (1)..(372): Homolog of NCBI NO: 29569109 NR Description: nucleosome/chromatin assembly factor group A [Zea
  misc_feature (1)..(372): Homolog of NCBI NO: 21898560 NR Description: nucleosome/chromatin assembly factor group A [Zea
  misc_feature (1)..(372): Homolog of NCBI NO: 15236115 NR Description: nucleosome assembly protein I-related protein
  misc_feature (1)..(372): Homolog of NCBI NO: 549975 NR Description: nucleosome assembly protein I-like protein
  misc_feature (1)..(372): Homolog of NCBI NO: 8777435 NR Description: nucleosome assembly protein [Arabidopsis thaliana]
  misc_feature (1)..(372): Homolog of NCBI NO: 18423918 NR Description: nucleosome assembly protein [Arabidopsis
  misc_feature (1)..(372): Homolog of NCBI NO: 15224782 NR Description: nucleosome assembly protein -related [Arabidopsis

SEQ ID NO: 29662 - DNA, 1004 bp, Arabidopsis thaliana
  misc_feature (1)..(1004): Ceres Seq. ID no. 12332763
  misc_feature: MA Experiment ID: 20000328 Result: Up-regulated in Transcription
  misc_feature: MA Experiment 20000328 PARAMETER Experiment Name: At_42deg_Heat_Sub_P Parameter: Age (day) Value: 14
  misc_feature: MA Experiment 20000328 PARAMETER Experiment Name: At_42deg_Heat_Sub_P Parameter: Organism Value: A. thaliana
  misc_feature: MA Experiment 20000328 PARAMETER Experiment Name: At_42deg_Heat_Sub_P Parameter: Plant Line Value: WS
  misc_feature: MA Experiment 20000328 PARAMETER Experiment Name: At_42deg_Heat_Sub_P Parameter: Temperature (deg C) Value: 42 vs. 22
  misc_feature: MA Experiment 20000328 PARAMETER Experiment Name: At_42deg_Heat_Sub_P Parameter: Timepoint (hr) Value: 6
  misc_feature: MA Experiment 20000328 PARAMETER Experiment Name: At_42deg_Heat_Sub_P Parameter: Tissue Value: Aerial
ctcacacacacaccaacgcaaacctccaaaacagggccggggcgattcattcacaatctcggcgattctctcttccgtctcgagtcgctgagatccatcagtaaaaggtctgcaaaatggttgctcagggattcactgtggatcttaaaaagccccttgtatttcaggttggtcatcttggagaagattatgaggaatgggttcaccaacctatcgcgaccaaggaaggccctcggttttttcagagtgacttttgggagttcttgacacttacagtttggtgggcagttcctgtcatttggttgccagttgtagtctggtgcatatcaaggtcagtaagtatgggatgttcacttccagaaatcgtcccaattgttgtcatgggaatattcatctggacattttttgaatacgttcttcaccggttcgttttccacataaaaacgaagagttactggggaaacactgcacactatcttattcacggatgccatcataagcacccgatggaccaccttcggctcgtctttcctcctactgcaacagcgattttatgctttccgttctggaacattgcgaaggctatctcaactccttcaaccgcacctgcattgtttggtggaggcatgctcggatatgtgatgtacgatgtcactcattattaccttcaccatgcccaacctactagaccagtgaccaaaaatctcaagaagtaccatttgaatcatcacttcaggattcaggacaaaggatttggtataacttcgtcgttatgggacatagtctttgggacacttcccaccacaaaagcccccagaaaagagcaatagtagtaaaaggcaaaaactaaaaagatgtttgtaatacatttaatttaatcttaagttattaatcatccttctgaattttgagatgtttaatctgaggtttcatttggatcactgtcttttgtagtttgtaaatcaatacttcacaatcctaatataatatttttctgcgaaagt

SEQ ID NO: 29663 - protein, 237 aa, Arabidopsis thaliana
  peptide (1)..(237): Ceres Seq. ID no. 12332764
  misc_feature (86)..(229): Pfam Name: Fatty acid hydroxylase Pfam Description: Fatty acid hydroxylase
  misc_feature (8)..(226): Homolog of NCBI NO: 19115335 NR Description: putative fatty acid hydroxylase
  misc_feature (8)..(226): Homolog of NCBI NO: 18376335 NR Description: related to fatty acid hydroxylase [Neurospora
  misc_feature (8)..(231): Homolog of NCBI NO: 40746791 NR Description: hypothetical protein AN0918.2 [Aspergillus
  misc_feature (8)..(226): Homolog of NCBI NO: 18447515 NR Description: RE63157p [Drosophila melanogaster]
  misc_feature (8)..(227): Homolog of NCBI NO: 17505701 NR Description: Fatty acid hydroxylase (36.3 kD) [Caenorhabditis
  misc_feature (8)..(227): Homolog of NCBI NO: 39589620 NR Description: Hypothetical protein CBG12227 [Caenorhabditis
  misc_feature (8)..(233): Homolog of NCBI NO: 6323928 NR Description: Required for the hydroxylation of the very long
  misc_feature (1)..(235): Homolog of NCBI NO: 34897078 NR Description: putative fatty acid hydroxylase
  misc_feature (1)..(236): Homolog of NCBI NO: 15233426 NR Description: fatty acid hydroxylase - like protein
  misc_feature (1)..(237): Homolog of NCBI NO: 15226828 NR Description: fatty acid hydroxylase (FAH1)
MVAQGFTVDLKKPLVFQVGHLGEDYEEWVHQPIATKEGPRFFQSDFWEFLTLTVWWAVPVIWLPVVVWCISRSVSMGCSLPEIVPIVVMGIFIWTFFEYVLHRFVFHIKTKSYWGNTAHYLIHGCHHKHPMDHLRLVFPPTATAILCFPFWNIAKAISTPSTAPALFGGGMLGYVMYDVTHYYLHHAQPTRPVTKNLKKYHLNHHFRIQDKGFGITSSLWDIVFGTLPTTKAPRKEQ

SEQ ID NO: 29664 - protein, 162 aa, Arabidopsis thaliana
  peptide (1)..(162): Ceres Seq. ID no. 12332765
  misc_feature (11)..(154): Pfam Name: Fatty acid hydroxylase Pfam Description: Fatty acid hydroxylase
  misc_feature (1)..(151): Homolog of NCBI NO: 19115335 NR Description: putative fatty acid hydroxylase
  misc_feature (1)..(151): Homolog of NCBI NO: 18376335 NR Description: related to fatty acid hydroxylase [Neurospora
  misc_feature (1)..(156): Homolog of NCBI NO: 40746791 NR Description: hypothetical protein AN0918.2 [Aspergillus
  misc_feature (1)..(151): Homolog of NCBI NO: 18447515 NR Description: RE63157p [Drosophila melanogaster]
  misc_feature (1)..(152): Homolog of NCBI NO: 17505701 NR Description: Fatty acid hydroxylase (36.3 kD) [Caenorhabditis
  misc_feature (1)..(152): Homolog of NCBI NO: 39589620 NR Description: Hypothetical protein CBG12227 [Caenorhabditis
  misc_feature (1)..(158): Homolog of NCBI NO: 6323928 NR Description: Required for the hydroxylation of the very long
  misc_feature (1)..(160): Homolog of NCBI NO: 34897078 NR Description: putative fatty acid hydroxylase
  misc_feature (1)..(161): Homolog of NCBI NO: 15233426 NR Description: fatty acid hydroxylase - like protein
  misc_feature (1)..(162): Homolog of NCBI NO: 15226828 NR Description: fatty acid hydroxylase (FAH1)
MGCSLPEIVPIVVMGIFIWTFFEYVLHRFVFHIKTKSYWGNTAHYLIHGCHHKHPMDHLRLVFPPTATAILCFPFWNIAKAISTPSTAPALFGGGMLGYVMYDVTHYYLHHAQPTRPVTKNLKKYHLNHHFRIQDKGFGITSSLWDIVFGTLPTTKAPRKEQ

SEQ ID NO: 29665 - protein, 149 aa, Arabidopsis thaliana
  peptide (1)..(149): Ceres Seq. ID no. 12332766
  misc_feature (1)..(141): Pfam Name: Fatty acid hydroxylase Pfam Description: Fatty acid hydroxylase
  misc_feature (1)..(138): Homolog of NCBI NO: 19115335 NR Description: putative fatty acid hydroxylase
  misc_feature (1)..(138): Homolog of NCBI NO: 18376335 NR Description: related to fatty acid hydroxylase [Neurospora
  misc_feature (1)..(143): Homolog of NCBI NO: 40746791 NR Description: hypothetical protein AN0918.2 [Aspergillus
  misc_feature (1)..(138): Homolog of NCBI NO: 18447515 NR Description: RE63157p [Drosophila melanogaster]
  misc_feature (1)..(139): Homolog of NCBI NO: 17505701 NR Description: Fatty acid hydroxylase (36.3 kD) [Caenorhabditis
  misc_feature (1)..(139): Homolog of NCBI NO: 39589620 NR Description: Hypothetical protein CBG12227 [Caenorhabditis
  misc_feature (1)..(145): Homolog of NCBI NO: 6323928 NR Description: Required for the hydroxylation of the very long
  misc_feature (1)..(147): Homolog of NCBI NO: 34897078 NR Description: putative fatty acid hydroxylase
  misc_feature (1)..(148): Homolog of NCBI NO: 15233426 NR Description: fatty acid hydroxylase - like protein
  misc_feature (1)..(149): Homolog of NCBI NO: 15226828 NR Description: fatty acid hydroxylase (FAH1)
MGIFIWTFFEYVLHRFVFHIKTKSYWGNTAHYLIHGCHHKHPMDHLRLVFPPTATAILCFPFWNIAKAISTPSTAPALFGGGMLGYVMYDVTHYYLHHAQPTRPVTKNLKKYHLNHHFRIQDKGFGITSSLWDIVFGTLPTTKAPRKEQ

SEQ ID NO: 29666 - DNA, 636 bp, Arabidopsis thaliana; identical to SEQ ID NO: 22820
  misc_feature (1)..(636): Ceres Seq. ID no. 12562389
  misc_feature: MA Experiment ID: 108434 Result: Down-regulated in Transcription
  misc_feature: MA Experiment 108434 PARAMETER Experiment Name: At_Root_Tips_cDNA_P Parameter: Tissue Value: Root Tips
  misc_feature: MA Experiment ID: 108435 Result: Down-regulated in Transcription
  misc_feature: MA Experiment 108435 PARAMETER Experiment Name: At_stm_Mutants_cDNA_P Parameter: Plant Line Value: wt Landsburg vs stm
  misc_feature: MA Experiment 108435 PARAMETER Experiment Name: At_stm_Mutants_cDNA_P Parameter: Tissue Value: Shoot Apical Meristem Region
  misc_feature: MA Experiment ID: 108461 Result: Up-regulated in Transcription
  misc_feature: MA Experiment 108461 PARAMETER Experiment Name: At_Germinating_Seeds_cDNA_P Parameter: Age (day) Value: 1 vs. 0
  misc_feature: MA Experiment 108461 PARAMETER Experiment Name: At_Germinating_Seeds_cDNA_P Parameter: Tissue Value: Germinating Seeds
  misc_feature: MA Experiment ID: 108462 Result: Up-regulated in Transcription
  misc_feature: MA Experiment 108462 PARAMETER Experiment Name: At_Germinating_Seeds_cDNA_P Parameter: Age (day) Value: 2 vs. 0
  misc_feature: MA Experiment 108462 PARAMETER Experiment Name: At_Germinating_Seeds_cDNA_P Parameter: Tissue Value: Germinating Seeds
  misc_feature: MA Experiment ID: 108488 Result: Up-regulated in Transcription
  misc_feature: MA Experiment ID: 108489 Result: Down-regulated in Transcription
  misc_feature: MA Experiment ID: 20000180 Result: Up-regulated in Transcription
  misc_feature: MA Experiment 20000180 PARAMETER Experiment Name: At_Germinating_Seeds_P Parameter: Age (hr) Value: 24 vs. 0
  misc_feature: MA Experiment 20000180 PARAMETER Experiment Name: At_Germinating_Seeds_P Parameter: Tissue Value: Germinating Seeds
  misc_feature: MA Experiment ID: 20000185 Result: Down-regulated in Transcription
  misc_feature: MA Experiment 20000185 PARAMETER Experiment Name: At_Roots__P Parameter: Age (day) Value: 7 vs. 21
  misc_feature: MA Experiment 20000185 PARAMETER Experiment Name: At_Roots__P Parameter: Organism Value: A. thaliana
  misc_feature: MA Experiment 20000185 PARAMETER Experiment Name: At_Roots__P Parameter: Tissue Value: Roots vs. Whole Plant
  misc_feature: MA Experiment ID: 20000227 Result: Down-regulated in Transcription
  misc_feature: MA Experiment 20000227 PARAMETER Experiment Name: At_Root-Tips-vs-Tops_P Parameter: Tissue Value: Root Tips vs. Root Tops
  misc_feature: MA Experiment ID: 20000264 Result: Down-regulated in Transcription
  misc_feature: MA Experiment 20000264 PARAMETER Experiment Name: At_Open_Flower_P Parameter: Age (day) Value: 21
  misc_feature: MA Experiment 20000264 PARAMETER Experiment Name: At_Open_Flower_P Parameter: Plant Line Value: WS
  misc_feature: MA Experiment 20000264 PARAMETER Experiment Name: At_Open_Flower_P Parameter: Tissue Value: Open Flower vs. Whole Plant
  misc_feature: MA Experiment ID: 20000286 Result: Down-regulated in Transcription
  misc_feature: MA Experiment 20000286 PARAMETER Experiment Name: At_Open_Flower_P Parameter: Age (day) Value: 21
  misc_feature: MA Experiment 20000286 PARAMETER Experiment Name: At_Open_Flower_P Parameter: Plant Line Value: WS
  misc_feature: MA Experiment 20000286 PARAMETER Experiment Name: At_Open_Flower_P Parameter: Tissue Value: Half Open vs. Whole Plant
  misc_feature: MA Experiment ID: 20000439 Result: Down-regulated in Transcription
  misc_feature: MA Experiment 20000439 PARAMETER Experiment Name: At_Roots__P Parameter: Age (day) Value: 14 vs. 21
  misc_feature: MA Experiment 20000439 PARAMETER Experiment Name: At_Roots__P Parameter: Organism Value: A. thaliana
  misc_feature: MA Experiment 20000439 PARAMETER Experiment Name: At_Roots__P Parameter: Tissue Value: Roots vs. Whole Plant
  misc_feature: MA Experiment ID: 20000794 Result: Down-regulated in Transcription
  misc_feature: MA Experiment 20000794 PARAMETER Experiment Name: At_Petals_P Parameter: Age (day) Value: 23-25 days
  misc_feature: MA Experiment 20000794 PARAMETER Experiment Name: At_Petals_P Parameter: Plant Line Value: WS
  misc_feature: MA Experiment 20000794 PARAMETER Experiment Name: At_Petals_P Parameter: Tissue Value: Petals vs. Whole plant
  misc_feature: MA Experiment ID: 20001557 Result: Down-regulated in Transcription
  misc_feature: MA Experiment 20001557 PARAMETER Experiment Name: At_Drought_Soil_Dry_P Parameter: Age (day) Value: 27
  misc_feature: MA Experiment 20001557 PARAMETER Experiment Name: At_Drought_Soil_Dry_P Parameter: Organism Value: A. thaliana
  misc_feature: MA Experiment 20001557 PARAMETER Experiment Name: At_Drought_Soil_Dry_P Parameter: Plant Line Value: WS
  misc_feature: MA Experiment 20001557 PARAMETER Experiment Name: At_Drought_Soil_Dry_P Parameter: Post Timepoint (hr) Value: 3
  misc_feature: MA Experiment 20001557 PARAMETER Experiment Name: At_Drought_Soil_Dry_P Parameter: Post-Treatment Value: Re-Water vs. No Drought
  misc_feature: MA Experiment 20001557 PARAMETER Experiment Name: At_Drought_Soil_Dry_P Parameter: Timepoint (day) Value: 13
  misc_feature: MA Experiment 20001557 PARAMETER Experiment Name: At_Drought_Soil_Dry_P Parameter: Treatment Value: Drought vs. No Drought
  misc_feature: MA Experiment ID: 20001757 Result: Up-regulated in Transcription
  misc_feature: MA Experiment 20001757 PARAMETER Experiment Name: At_50mM_NH4NO3_L-to-H_P Parameter: Timepoint (hr) Value: 6
  misc_feature: MA Experiment 20001757 PARAMETER Experiment Name: At_50mM_NH4NO3_L-to-H_P Parameter: Tissue Value: Leaf
  misc_feature: MA Experiment 20001757 PARAMETER Experiment Name: At_50mM_NH4NO3_L-to-H_P Parameter: Treatment Value: 50mM NH4NO3 vs 100mM Mannitol
  misc_feature: MA Experiment ID: 20001908 Result: Down-regulated in Transcription
  misc_feature: MA Experiment 20001908 PARAMETER Experiment Name: At_Drought_Reproduction_P Parameter: Age (day) Value: 40
  misc_feature: MA Experiment 20001908 PARAMETER Experiment Name: At_Drought_Reproduction_P Parameter: Organism Value: A. thaliana
  misc_feature: MA Experiment 20001908 PARAMETER Experiment Name: At_Drought_Reproduction_P Parameter: Plant Line Value: WS
  misc_feature: MA Experiment 20001908 PARAMETER Experiment Name: At_Drought_Reproduction_P Parameter: Timepoint (day) Value: 10
  misc_feature: MA Experiment 20001908 PARAMETER Experiment Name: At_Drought_Reproduction_P Parameter: Tissue Value: Siliques
  misc_feature: MA Experiment 20001908 PARAMETER Experiment Name: At_Drought_Reproduction_P Parameter: Treatment Value: Drought vs. No Drought

SEQ ID NO: 29667 - protein, 140 aa, Arabidopsis thaliana; identical to SEQ ID NO: 22821
  peptide (1)..(140): Ceres Seq. ID no. 12562390
  misc_feature (6)..(140): Homolog of NCBI NO: 6996562 NR Description: putative 16kDa membrane protein [Nicotiana
  misc_feature (1)..(140): Homolog of NCBI NO: 22531014 NR Description: expressed protein [Arabidopsis thaliana]
  misc_feature (1)..(140): Homolog of NCBI NO: 18390888 NR Description: expressed protein
  misc_feature (6)..(140): Homolog of NCBI NO: 6996562 NR Description: putative 16kDa membrane protein [Nicotiana
  misc_feature (1)..(140): Homolog of NCBI NO: 22531014 NR Description: expressed protein [Arabidopsis thaliana]
  misc_feature (1)..(140): Homolog of NCBI NO: 18390888 NR Description: expressed protein
  misc_feature (6)..(140): Homolog of NCBI NO: 6996562 NR Description: putative 16kDa membrane protein [Nicotiana
  misc_feature (1)..(140): Homolog of NCBI NO: 22531014 NR Description: expressed protein [Arabidopsis thaliana]
  misc_feature (1)..(140): Homolog of NCBI NO: 18390888 NR Description: expressed protein

SEQ ID NO: 29668 - DNA, 851 bp, Arabidopsis thaliana
  misc_feature (1)..(851): Ceres Seq. ID no. 13496922
  misc_feature: MA Experiment ID: 108462 Result: Up-regulated in Transcription
  misc_feature: MA Experiment 108462 PARAMETER Experiment Name: At_Germinating_Seeds_cDNA_P Parameter: Age (day) Value: 2 vs. 0
  misc_feature: MA Experiment 108462 PARAMETER Experiment Name: At_Germinating_Seeds_cDNA_P Parameter: Tissue Value: Germinating Seeds
  misc_feature: MA Experiment ID: 108464 Result: Up-regulated in Transcription
  misc_feature: MA Experiment 108464 PARAMETER Experiment Name: At_Germinating_Seeds_cDNA_P Parameter: Age (day) Value: 4 vs. 0
  misc_feature: MA Experiment 108464 PARAMETER Experiment Name: At_Germinating_Seeds_cDNA_P Parameter: Tissue Value: Germinating Seeds
  misc_feature: MA Experiment ID: 108569 Result: Up-regulated in Transcription
  misc_feature: MA Experiment 108569 PARAMETER Experiment Name: At_0.001%_MeJA__cDNA_P Parameter: Timepoint (hr) Value: 6
  misc_feature: MA Experiment 108569 PARAMETER Experiment Name: At_0.001%_MeJA__cDNA_P Parameter: Tissue Value: Aerial
  misc_feature: MA Experiment 108569 PARAMETER Experiment Name: At_0.001%_MeJA__cDNA_P Parameter: Treatment Value: 0.001% MeJA vs. No Treatment
  misc_feature: MA Experiment ID: 108573 Result: Up-regulated in Transcription
  misc_feature: MA Experiment 108573 PARAMETER Experiment Name: At_Drought_cDNA_P Parameter: Timepoint (hr) Value: 6
  misc_feature: MA Experiment 108573 PARAMETER Experiment Name: At_Drought_cDNA_P Parameter: Tissue Value: Aerial
  misc_feature: MA Experiment 108573 PARAMETER Experiment Name: At_Drought_cDNA_P Parameter: Treatment Value: Drought vs. No Drought
  misc_feature: MA Experiment ID: 20000111 Result: Up-regulated in Transcription
  misc_feature: MA Experiment 20000111 PARAMETER Experiment Name: At_42deg_Heat_cDNA_P Parameter: Temperature (deg C) Value: 42 vs. 22
  misc_feature: MA Experiment 20000111 PARAMETER Experiment Name: At_42deg_Heat_cDNA_P Parameter: Timepoint (hr) Value: 6
  misc_feature: MA Experiment 20000111 PARAMETER Experiment Name: At_42deg_Heat_cDNA_P Parameter: Tissue Value: Aerial
  misc_feature: MA Experiment ID: 20000112 Result: Up-regulated in Transcription
  misc_feature: MA Experiment 20000112 PARAMETER Experiment Name: At_42deg_Heat_cDNA_P Parameter: Temperature (deg C) Value: 42 vs. 22
  misc_feature: MA Experiment 20000112 PARAMETER Experiment Name: At_42deg_Heat_cDNA_P Parameter: Timepoint (hr) Value: 2
  misc_feature: MA Experiment 20000112 PARAMETER Experiment Name: At_42deg_Heat_cDNA_P Parameter: Tissue Value: Aerial
  misc_feature: MA Experiment ID: 20000113 Result: Up-regulated in Transcription
  misc_feature: MA Experiment 20000113 PARAMETER Experiment Name: At_42deg_Heat_cDNA_P Parameter: Temperature (deg C) Value: 42 vs. 22
  misc_feature: MA Experiment 20000113 PARAMETER Experiment Name: At_42deg_Heat_cDNA_P Parameter: Timepoint (hr) Value: 8
  misc_feature: MA Experiment 20000113 PARAMETER Experiment Name: At_42deg_Heat_cDNA_P Parameter: Tissue Value: Aerial
  misc_feature: MA Experiment ID: 20000224 Result: Down-regulated in Transcription
  misc_feature: MA Experiment ID: 20000234 Result: Down-regulated in Transcription
  misc_feature: MA Experiment 20000234 PARAMETER Experiment Name: At_Siliques_P Parameter: Age (day) Value: 21
  misc_feature: MA Experiment 20000234 PARAMETER Experiment Name: At_Siliques_P Parameter: Organism Value: A. thaliana
  misc_feature: MA Experiment 20000234 PARAMETER Experiment Name: At_Siliques_P Parameter: Plant Line Value: WS
  misc_feature: MA Experiment 20000234 PARAMETER Experiment Name: At_Siliques_P Parameter: Tissue Value: Less Than 5mm Siliques vs. Whole Plant
  misc_feature: MA Experiment ID: 20000264 Result: Down-regulated in Transcription
  misc_feature: MA Experiment 20000264 PARAMETER Experiment Name: At_Open_Flower_P Parameter: Age (day) Value: 21
  misc_feature: MA Experiment 20000264 PARAMETER Experiment Name: At_Open_Flower_P Parameter: Plant Line Value: WS
  misc_feature: MA Experiment 20000264 PARAMETER Experiment Name: At_Open_Flower_P Parameter: Tissue Value: Open Flower vs. Whole Plant
  misc_feature: MA Experiment ID: 20000265 Result: Down-regulated in Transcription
  misc_feature: MA Experiment 20000265 PARAMETER Experiment Name: At_Open_Flower_P Parameter: Age (day) Value: 21
  misc_feature: MA Experiment 20000265 PARAMETER Experiment Name: At_Open_Flower_P Parameter: Plant Line Value: WS
  misc_feature: MA Experiment 20000265 PARAMETER Experiment Name: At_Open_Flower_P Parameter: Tissue Value: Closed Flower vs. Whole Plant
  misc_feature: MA Experiment ID: 20000286 Result: Down-regulated in Transcription
  misc_feature: MA Experiment 20000286 PARAMETER Experiment Name: At_Open_Flower_P Parameter: Age (day) Value: 21
  misc_feature: MA Experiment 20000286 PARAMETER Experiment Name: At_Open_Flower_P Parameter: Plant Line Value: WS
  misc_feature: MA Experiment 20000286 PARAMETER Experiment Name: At_Open_Flower_P Parameter: Tissue Value: Half Open vs. Whole Plant
  misc_feature: MA Experiment ID: 20000794 Result: Down-regulated in Transcription
  misc_feature: MA Experiment 20000794 PARAMETER Experiment Name: At_Petals_P Parameter: Age (day) Value: 23-25 days
  misc_feature: MA Experiment 20000794 PARAMETER Experiment Name: At_Petals_P Parameter: Plant Line Value: WS
  misc_feature: MA Experiment 20000794 PARAMETER Experiment Name: At_Petals_P Parameter: Tissue Value: Petals vs. Whole plant
  misc_feature: MA Experiment ID: 20001450 Result: Up-regulated in Transcription
  misc_feature: MA Experiment 20001450 PARAMETER Experiment Name: At_Far-red-induction_P Parameter: Age (day) Value: 7
  misc_feature: MA Experiment 20001450 PARAMETER Experiment Name: At_Far-red-induction_P Parameter: Light Value: Far-red vs. White
  misc_feature: MA Experiment 20001450 PARAMETER Experiment Name: At_Far-red-induction_P Parameter: Organism Value: A. thaliana
  misc_feature: MA Experiment 20001450 PARAMETER Experiment Name: At_Far-red-induction_P Parameter: Plant Line Value: Columbia
  misc_feature: MA Experiment 20001450 PARAMETER Experiment Name: At_Far-red-induction_P Parameter: Timepoint (hr) Value: 8
  misc_feature: MA Experiment 20001450 PARAMETER Experiment Name: At_Far-red-induction_P Parameter: Tissue Value: Whole Plant
  misc_feature: MA Experiment ID: 20001451 Result: Up-regulated in Transcription
  misc_feature: MA Experiment 20001451 PARAMETER Experiment Name: At_Far-red-induction_P Parameter: Age (day) Value: 7
  misc_feature: MA Experiment 20001451 PARAMETER Experiment Name: At_Far-red-induction_P Parameter: Light Value: Far-red vs. White
  misc_feature: MA Experiment 20001451 PARAMETER Experiment Name: At_Far-red-induction_P Parameter: Organism Value: A. thaliana
  misc_feature: MA Experiment 20001451 PARAMETER Experiment Name: At_Far-red-induction_P Parameter: Plant Line Value: Columbia
  misc_feature: MA Experiment 20001451 PARAMETER Experiment Name: At_Far-red-induction_P Parameter: Timepoint (hr) Value: 24
  misc_feature: MA Experiment 20001451 PARAMETER Experiment Name: At_Far-red-induction_P Parameter: Tissue Value: Whole Plant
  misc_feature: MA Experiment ID: 20001558 Result: Down-regulated in Transcription
  misc_feature: MA Experiment 20001558 PARAMETER Experiment Name: At_Drought_Soil_Dry_P Parameter: Age (day) Value: 27
  misc_feature: MA Experiment 20001558 PARAMETER Experiment Name: At_Drought_Soil_Dry_P Parameter: Organism Value: A. thaliana
  misc_feature: MA Experiment 20001558 PARAMETER Experiment Name: At_Drought_Soil_Dry_P Parameter: Plant Line Value: WS
  misc_feature: MA Experiment 20001558 PARAMETER Experiment Name: At_Drought_Soil_Dry_P Parameter: Post Timepoint (hr) Value: 6
  misc_feature: MA Experiment 20001558 PARAMETER Experiment Name: At_Drought_Soil_Dry_P Parameter: Post-Treatment Value: Re-Water vs. No Drought
  misc_feature: MA Experiment 20001558 PARAMETER Experiment Name: At_Drought_Soil_Dry_P Parameter: Timepoint (day) Value: 13
  misc_feature: MA Experiment 20001558 PARAMETER Experiment Name: At_Drought_Soil_Dry_P Parameter: Treatment Value: Drought vs. No Drought
  misc_feature: MA Experiment ID: 20001560 Result: Down-regulated in Transcription
  misc_feature: MA Experiment 20001560 PARAMETER Experiment Name: At_Drought_Soil_Dry_P Parameter: Age (day) Value: 28
  misc_feature: MA Experiment 20001560 PARAMETER Experiment Name: At_Drought_Soil_Dry_P Parameter: Organism Value: A. thaliana
  misc_feature: MA Experiment 20001560 PARAMETER Experiment Name: At_Drought_Soil_Dry_P Parameter: Plant Line Value: WS
  misc_feature: MA Experiment 20001560 PARAMETER Experiment Name: At_Drought_Soil_Dry_P Parameter: Post Timepoint (hr) Value: None
  misc_feature: MA Experiment 20001560 PARAMETER Experiment Name: At_Drought_Soil_Dry_P Parameter: Post-Treatment Value: None
  misc_feature: MA Experiment 20001560 PARAMETER Experiment Name: At_Drought_Soil_Dry_P Parameter: Timepoint (day) Value: 14
  misc_feature: MA Experiment 20001560 PARAMETER Experiment Name: At_Drought_Soil_Dry_P Parameter: Treatment Value: Drought vs. No Drought
  misc_feature: Phenotype: ROSETTE LEAVES Petiole Length-Short Petioles
  misc_feature: Phenotype: WHOLE PLANT Size-Small
  misc_feature: Phenotype: WHOLE PLANT Other
  misc_feature: Phenotype: INFLORESCENCE Height-Short
  misc_feature: Phenotype: INFLORESCENCE Height-Short
  misc_feature: Phenotype: ROSETTE LEAVES Petiole Length-Short Petioles
  misc_feature: Phenotype: WHOLE PLANT Other
  misc_feature: Phenotype: INFLORESCENCE Flowering Time-Late Flowering
  misc_feature: Phenotype: INFLORESCENCE Height-Short
gctctcacgttcgaagaccatttcttgttctttggacgaccatcggcgacagtgttaagtctagagtcttcttcttcttcggcgtagttttttccccggcttgaaaaatgggtctatccttcggaaagttgttcagcaagctctttgcaaagaaagagatgcgtatcctcatggtgggtctcgatgcagctggtaagactacgatcttgtacaagctcaagcttggagagatcgtgactacgattccaaccattggtttcaatgtggagactgtggaatacaagaacattagctttaccgtgtgggatgtcgggggtcaagacaagattcgtccattgtggaggcactacttccagaacactcagggacttatctttgtggtggacagcaatgatcgtgaccgtgttgtggaagccagagatgagcttcacagaatgttgaacgaagatgagttgagagatgctgtgcttctcgtttttgctaacaagcaagatcttccaaatgcgatgaacgccgctgagataaccgataagcttggacttcactctctccgtcaacgacactggtacatacagagcacatgtgctacctccggagaagggctttatgagggacttgactggctctctaacaacatcgcaaacaaggcttaggagaacaacgtgtggtttggtttttaatcgaggagagtcttgtcttcttccttctatcttttgttctttcgtctcaaactcttatcatttcatactctttgttcttcgctctaataatttacaagttttttttttttgttgcttttatcctataattcagactcttataaaatggggcccaatttcggcggatattcc

SEQ ID NO: 29669 - protein, 181 aa, Arabidopsis thaliana
  peptide (1)..(181): Ceres Seq. ID no. 13496923
  misc_feature (4)..(177): Pfam Name: ADP-ribosylation factor family Pfam Description: ADP-ribosylation factor family
  misc_feature (1)..(181): Homolog of NCBI NO: 15241463 NR Description: ADP-ribosylation factor ARF1, putative
  misc_feature (1)..(180): Homolog of NCBI NO: 25294174 NR Description: F5O8.5 protein - Arabidopsis thaliana
  misc_feature (1)..(180): Homolog of NCBI NO: 6573751 NR Description: F20B24.7 [Arabidopsis thaliana]
  misc_feature (1)..(181): Homolog of NCBI NO: 1703380 NR Description: ADP-RIBOSYLATION FACTOR
  misc_feature (1)..(181): Homolog of NCBI NO: 15223164 NR Description: ADP-ribosylation factor 1 (ARF1), putative
  misc_feature (1)..(181): Homolog of NCBI NO: 30681825 NR Description: ADP-ribosylation factor, putative [Arabidopsis
  misc_feature (1)..(180): Homolog of NCBI NO: 17154685 NR Description: ADP-ribosylation factor [Gossypium hirsutum]
  misc_feature (1)..(181): Homolog of NCBI NO: 15226521 NR Description: ADP-ribosylation factor 1 (ARF1) [Arabidopsis
  misc_feature (1)..(181): Homolog of NCBI NO: 25294169 NR Description: ADP-ribosylation factor [imported] - pepper
  misc_feature (1)..(181): Homolog of NCBI NO: 15228723 NR Description: ADP-ribosylation factor [Arabidopsis thaliana]
MGLSFGKLFSKLFAKKEMRILMVGLDAAGKTTILYKLKLGEIVTTIPTIGFNVETVEYKNISFTVWDVGGQDKIRPLWRHYFQNTQGLIFVVDSNDRDRVVEARDELHRMLNEDELRDAVLLVFANKQDLPNAMNAAEITDKLGLHSLRQRHWYIQSTCATSGEGLYEGLDWLSNNIANKA

SEQ ID NO: 29670 - protein, 164 aa, Arabidopsis thaliana
  peptide (1)..(164): Ceres Seq. ID no. 13496924
  misc_feature (1)..(160): Pfam Name: ADP-ribosylation factor family Pfam Description: ADP-ribosylation factor family
  misc_feature (1)..(164): Homolog of NCBI NO: 15241463 NR Description: ADP-ribosylation factor ARF1, putative
  misc_feature (1)..(163): Homolog of NCBI NO: 25294174 NR Description: F5O8.5 protein - Arabidopsis thaliana
  misc_feature (1)..(163): Homolog of NCBI NO: 6573751 NR Description: F20B24.7 [Arabidopsis thaliana]
  misc_feature (1)..(164): Homolog of NCBI NO: 1703380 NR Description: ADP-RIBOSYLATION FACTOR
  misc_feature (1)..(164): Homolog of NCBI NO: 15223164 NR Description: ADP-ribosylation factor 1 (ARF1), putative
  misc_feature (1)..(164): Homolog of NCBI NO: 30681825 NR Description: ADP-ribosylation factor, putative [Arabidopsis
  misc_feature (1)..(163): Homolog of NCBI NO: 17154685 NR Description: ADP-ribosylation factor [Gossypium hirsutum]
  misc_feature (1)..(164): Homolog of NCBI NO: 15226521 NR Description: ADP-ribosylation factor 1 (ARF1) [Arabidopsis
  misc_feature (1)..(164): Homolog of NCBI NO: 25294169 NR Description: ADP-ribosylation factor [imported] - pepper
  misc_feature (1)..(164): Homolog of NCBI NO: 15228723 NR Description: ADP-ribosylation factor [Arabidopsis thaliana]
MRILMVGLDAAGKTTILYKLKLGEIVTTIPTIGFNVETVEYKNISFTVWDVGGQDKIRPLWRHYFQNTQGLIFVVDSNDRDRVVEARDELHRMLNEDELRDAVLLVFANKQDLPNAMNAAEITDKLGLHSLRQRHWYIQSTCATSGEGLYEGLDWLSNNIANKA

SEQ ID NO: 29671 - protein, 160 aa, Arabidopsis thaliana
  peptide (1)..(160): Ceres Seq. ID no. 13496925
  misc_feature (1)..(156): Pfam Name: ADP-ribosylation factor family Pfam Description: ADP-ribosylation factor family
  misc_feature (1)..(160): Homolog of NCBI NO: 15241463 NR Description: ADP-ribosylation factor ARF1, putative
  misc_feature (1)..(159): Homolog of NCBI NO: 25294174 NR Description: F5O8.5 protein - Arabidopsis thaliana
  misc_feature (1)..(159): Homolog of NCBI NO: 6573751 NR Description: F20B24.7 [Arabidopsis thaliana]
  misc_feature (1)..(160): Homolog of NCBI NO: 1703380 NR Description: ADP-RIBOSYLATION FACTOR
  misc_feature (1)..(160): Homolog of NCBI NO: 15223164 NR Description: ADP-ribosylation factor 1 (ARF1), putative
  misc_feature (1)..(160): Homolog of NCBI NO: 30681825 NR Description: ADP-ribosylation factor, putative [Arabidopsis
  misc_feature (1)..(159): Homolog of NCBI NO: 17154685 NR Description: ADP-ribosylation factor [Gossypium hirsutum]
  misc_feature (1)..(160): Homolog of NCBI NO: 15226521 NR Description: ADP-ribosylation factor 1 (ARF1) [Arabidopsis
  misc_feature (1)..(160): Homolog of NCBI NO: 25294169 NR Description: ADP-ribosylation factor [imported] - pepper
  misc_feature (1)..(160): Homolog of NCBI NO: 15228723 NR Description: ADP-ribosylation factor [Arabidopsis thaliana]
MVGLDAAGKTTILYKLKLGEIVTTIPTIGFNVETVEYKNISFTVWDVGGQDKIRPLWRHYFQNTQGLIFVVDSNDRDRVVEARDELHRMLNEDELRDAVLLVFANKQDLPNAMNAAEITDKLGLHSLRQRHWYIQSTCATSGEGLYEGLDWLSNNIANKA

SEQ ID NO: 29672 - DNA, 2121 bp, Arabidopsis thaliana
  misc_feature (1)..(2121): Ceres Seq. ID no. 13493768
  misc_feature: MA Experiment ID: 108434 Result: Down-regulated in Transcription
  misc_feature: MA Experiment 108434 PARAMETER Experiment Name: At_Root_Tips_cDNA_P Parameter: Tissue Value: Root Tips
  misc_feature: MA Experiment ID: 108461 Result: Down-regulated in Transcription
  misc_feature: MA Experiment 108461 PARAMETER Experiment Name: At_Germinating_Seeds_cDNA_P Parameter: Age (day) Value: 1 vs. 0
  misc_feature: MA Experiment 108461 PARAMETER Experiment Name: At_Germinating_Seeds_cDNA_P Parameter: Tissue Value: Germinating Seeds
  misc_feature: MA Experiment ID: 108462 Result: Down-regulated in Transcription
  misc_feature: MA Experiment 108462 PARAMETER Experiment Name: At_Germinating_Seeds_cDNA_P Parameter: Age (day) Value: 2 vs. 0
  misc_feature: MA Experiment 108462 PARAMETER Experiment Name: At_Germinating_Seeds_cDNA_P Parameter: Tissue Value: Germinating Seeds
  misc_feature: MA Experiment ID: 108469 Result: Up-regulated in Transcription
  misc_feature: MA Experiment ID: 108668 Result: Up-regulated in Transcription
  misc_feature: MA Experiment 108668 PARAMETER Experiment Name: At_2mM_SA_cDNA_P Parameter: Plant Line Value: WS
  misc_feature: MA Experiment 108668 PARAMETER Experiment Name: At_2mM_SA_cDNA_P Parameter: Timepoint (hr) Value: 6
  misc_feature: MA Experiment 108668 PARAMETER Experiment Name: At_2mM_SA_cDNA_P Parameter: Treatment Value: 2mM SA vs. No Treatment
  misc_feature: MA Experiment ID: 20000069 Result: Up-regulated in Transcription
  misc_feature: MA Experiment 20000069 PARAMETER Experiment Name: At_100uM_ABA_Mutants_cDNA_P Parameter: Plant Line Value: CS23
  misc_feature: MA Experiment 20000069 PARAMETER Experiment Name: At_100uM_ABA_Mutants_cDNA_P Parameter: Timepoint (hr) Value: 6
  misc_feature: MA Experiment 20000069 PARAMETER Experiment Name: At_100uM_ABA_Mutants_cDNA_P Parameter: Tissue Value: Aerial
  misc_feature: MA Experiment 20000069 PARAMETER Experiment Name: At_100uM_ABA_Mutants_cDNA_P Parameter: Treatment Value: 100uM ABA vs. No Treatment
  misc_feature: MA Experiment ID: 20000087 Result: Up-regulated in Transcription
  misc_feature: MA Experiment 20000087 PARAMETER Experiment Name: At_100uM_ABA_Mutants_cDNA_P Parameter: Plant Line Value: WS
  misc_feature: MA Experiment 20000087 PARAMETER Experiment Name: At_100uM_ABA_Mutants_cDNA_P Parameter: Timepoint (hr) Value: 6
  misc_feature: MA Experiment 20000087 PARAMETER Experiment Name: At_100uM_ABA_Mutants_cDNA_P Parameter: Tissue Value: Aerial
  misc_feature: MA Experiment 20000087 PARAMETER Experiment Name: At_100uM_ABA_Mutants_cDNA_P Parameter: Treatment Value: 100uM ABA vs. No Treatment
  misc_feature: MA Experiment ID: 20000090 Result: Up-regulated in Transcription
  misc_feature: MA Experiment ID: 20000117 Result: Up-regulated in Transcription
  misc_feature: MA Experiment 20000117 PARAMETER Experiment Name: At_100uM_ABA_Mutants_cDNA_P Parameter: Plant Line Value: Columbia
  misc_feature: MA Experiment 20000117 PARAMETER Experiment Name: At_100uM_ABA_Mutants_cDNA_P Parameter: Timepoint (hr) Value: 6
  misc_feature: MA Experiment 20000117 PARAMETER Experiment Name: At_100uM_ABA_Mutants_cDNA_P Parameter: Tissue Value: Aerial
  misc_feature: MA Experiment 20000117 PARAMETER Experiment Name: At_100uM_ABA_Mutants_cDNA_P Parameter: Treatment Value: 100uM ABA vs. No Treatment
  misc_feature: MA Experiment ID: 20000182 Result: Up-regulated in Transcription
  misc_feature: MA Experiment 20000182 PARAMETER Experiment Name: At_2mM_SA_P Parameter: Age (day) Value: 14
  misc_feature: MA Experiment 20000182 PARAMETER Experiment Name: At_2mM_SA_P Parameter: Organism Value: A. thaliana
  misc_feature: MA Experiment 20000182 PARAMETER Experiment Name: At_2mM_SA_P Parameter: Plant Line Value: WS
  misc_feature: MA Experiment 20000182 PARAMETER Experiment Name: At_2mM_SA_P Parameter: Timepoint (hr) Value: 6
  misc_feature: MA Experiment 20000182 PARAMETER Experiment Name: At_2mM_SA_P Parameter: Tissue Value: Aerial
  misc_feature: MA Experiment 20000182 PARAMETER Experiment Name: At_2mM_SA_P Parameter: Treatment Value: 2mM SA vs. No Treatment
  misc_feature: MA Experiment ID: 20000184 Result: Down-regulated in Transcription
  misc_feature: MA Experiment 20000184 PARAMETER Experiment Name: At_Shoots__P Parameter: Age (day) Value: 7
  misc_feature: MA Experiment 20000184 PARAMETER Experiment Name: At_Shoots__P Parameter: Tissue Value: Shoots vs. Whole Plant
  misc_feature: MA Experiment ID: 20000185 Result: Down-regulated in Transcription
  misc_feature: MA Experiment 20000185 PARAMETER Experiment Name: At_Roots__P Parameter: Age (day) Value: 7 vs. 21
  misc_feature: MA Experiment 20000185 PARAMETER Experiment Name: At_Roots__P Parameter: Organism Value: A. thaliana
  misc_feature: MA Experiment 20000185 PARAMETER Experiment Name: At_Roots__P Parameter: Tissue Value: Roots vs. Whole Plant
  misc_feature: MA Experiment ID: 20000234 Result: Down-regulated in Transcription
  misc_feature: MA Experiment 20000234 PARAMETER Experiment Name: At_Siliques_P Parameter: Age (day) Value: 21
  misc_feature: MA Experiment 20000234 PARAMETER Experiment Name: At_Siliques_P Parameter: Organism Value: A. thaliana
  misc_feature: MA Experiment 20000234 PARAMETER Experiment Name: At_Siliques_P Parameter: Plant Line Value: WS
  misc_feature: MA Experiment 20000234 PARAMETER Experiment Name: At_Siliques_P Parameter: Tissue Value: Less Than 5mm Siliques vs. Whole Plant
  misc_feature: MA Experiment ID: 20000235 Result: Down-regulated in Transcription
  misc_feature: MA Experiment 20000235 PARAMETER Experiment Name: At_Siliques_P Parameter: Age (day) Value: 21
  misc_feature: MA Experiment 20000235 PARAMETER Experiment Name: At_Siliques_P Parameter: Organism Value: A. thaliana
  misc_feature: MA Experiment 20000235 PARAMETER Experiment Name: At_Siliques_P Parameter: Plant Line Value: WS
  misc_feature: MA Experiment 20000235 PARAMETER Experiment Name: At_Siliques_P Parameter: Tissue Value: 5-10mm Siliques vs. Whole Plant
  misc_feature: MA Experiment ID: 20000264 Result: Down-regulated in Transcription
  misc_feature: MA Experiment 20000264 PARAMETER Experiment Name: At_Open_Flower_P Parameter: Age (day) Value: 21
  misc_feature: MA Experiment 20000264 PARAMETER Experiment Name: At_Open_Flower_P Parameter: Plant Line Value: WS
  misc_feature: MA Experiment 20000264 PARAMETER Experiment Name: At_Open_Flower_P Parameter: Tissue Value: Open Flower vs. Whole Plant
  misc_feature: MA Experiment ID: 20000265 Result: Down-regulated in Transcription
  misc_feature: MA Experiment 20000265 PARAMETER Experiment Name: At_Open_Flower_P Parameter: Age (day) Value: 21
  misc_feature: MA Experiment 20000265 PARAMETER Experiment Name: At_Open_Flower_P Parameter: Plant Line Value: WS
  misc_feature: MA Experiment 20000265 PARAMETER Experiment Name: At_Open_Flower_P Parameter: Tissue Value: Closed Flower vs. Whole Plant
  misc_feature: MA Experiment ID: 20000286 Result: Down-regulated in Transcription
  misc_feature: MA Experiment 20000286 PARAMETER Experiment Name: At_Open_Flower_P Parameter: Age (day) Value: 21
  misc_feature: MA Experiment 20000286 PARAMETER Experiment Name: At_Open_Flower_P Parameter: Plant Line Value: WS
  misc_feature: MA Experiment 20000286 PARAMETER Experiment Name: At_Open_Flower_P Parameter: Tissue Value: Half Open vs. Whole Plant
  misc_feature: MA Experiment ID: 20000438 Result: Down-regulated in Transcription
  misc_feature: MA Experiment 20000438 PARAMETER Experiment Name: At_Shoots__P Parameter: Age (day) Value: 14
  misc_feature: MA Experiment 20000438 PARAMETER Experiment Name: At_Shoots__P Parameter: Tissue Value: Shoots vs. Whole Plant
  misc_feature: MA Experiment ID: 20000439 Result: Down-regulated in Transcription
  misc_feature: MA Experiment 20000439 PARAMETER Experiment Name: At_Roots__P Parameter: Age (day) Value: 14 vs. 21
  misc_feature: MA Experiment 20000439 PARAMETER Experiment Name: At_Roots__P Parameter: Organism Value: A. thaliana
  misc_feature: MA Experiment 20000439 PARAMETER Experiment Name: At_Roots__P Parameter: Tissue Value: Roots vs. Whole Plant
  misc_feature: MA Experiment ID: 20000441 Result: Up-regulated in Transcription
  misc_feature: MA Experiment 20000441 PARAMETER Experiment Name: At_1uM_BR-BRZ__P Parameter: Tissue Value: Shoot Apices
  misc_feature: MA Experiment 20000441 PARAMETER Experiment Name: At_1uM_BR-BRZ__P Parameter: Treatment Value: 1uM BR vs. No Treatment
  misc_feature: MA Experiment ID: 20000443 Result: Up-regulated in Transcription
  misc_feature: MA Experiment 20000443 PARAMETER Experiment Name: At_1uM_BR-BRZ__P Parameter: Tissue Value: Shoot Apices
  misc_feature: MA Experiment 20000443 PARAMETER Experiment Name: At_1uM_BR-BRZ__P Parameter: Treatment Value: 1uM BRZ vs. No Treatment
  misc_feature: MA Experiment ID: 20000452 Result: Up-regulated in Transcription
  misc_feature: MA Experiment 20000452 PARAMETER Experiment Name: At_CS6879_Shoots-Roots_P Parameter: Age (day) Value: 14
  misc_feature: MA Experiment 20000452 PARAMETER Experiment Name: At_CS6879_Shoots-Roots_P Parameter: Organism Value: A. thaliana
  misc_feature: MA Experiment 20000452 PARAMETER Experiment Name: At_CS6879_Shoots-Roots_P Parameter: Plant Line Value: CS6879 vs. WS
  misc_feature: MA Experiment 20000452 PARAMETER Experiment Name: At_CS6879_Shoots-Roots_P Parameter: Tissue Value: Shoots
  misc_feature: MA Experiment ID: 20000460 Result: Up-regulated in Transcription
  misc_feature: MA Experiment 20000460 PARAMETER Experiment Name: At_10percent_PEG_P Parameter: Age (day) Value: 12
  misc_feature: MA Experiment 20000460 PARAMETER Experiment Name: At_10percent_PEG_P Parameter: Organism Value: A. thaliana
  misc_feature: MA Experiment 20000460 PARAMETER Experiment Name: At_10percent_PEG_P Parameter: Plant Line Value: WS
  misc_feature: MA Experiment 20000460 PARAMETER Experiment Name: At_10percent_PEG_P Parameter: Timepoint (day) Value: 12
  misc_feature: MA Experiment 20000460 PARAMETER Experiment Name: At_10percent_PEG_P Parameter: Tissue Value: Whole Plant
  misc_feature: MA Experiment 20000460 PARAMETER Experiment Name: At_10percent_PEG_P Parameter: Treatment Value: 10percent PEG vs. No Treatment
  misc_feature: MA Experiment ID: 20000527 Result: Up-regulated in Transcription
  misc_feature: MA Experiment 20000527 PARAMETER Experiment Name: At_10percent_PEG_P Parameter: Age (day) Value: 20
  misc_feature: MA Experiment 20000527 PARAMETER Experiment Name: At_10percent_PEG_P Parameter: Organism Value: A. thaliana
  misc_feature: MA Experiment 20000527 PARAMETER Experiment Name: At_10percent_PEG_P Parameter: Plant Line Value: WS
  misc_feature: MA Experiment 20000527 PARAMETER Experiment Name: At_10percent_PEG_P Parameter: Timepoint (day) Value: 20
  misc_feature: MA Experiment 20000527 PARAMETER Experiment Name: At_10percent_PEG_P Parameter: Tissue Value: Whole Plant
  misc_feature: MA Experiment 20000527 PARAMETER Experiment Name: At_10percent_PEG_P Parameter: Treatment Value: 10percent PEG vs. No Treatment
  misc_feature: MA Experiment ID: 20000573 Result: Down-regulated in Transcription
  misc_feature: MA Experiment 20000573 PARAMETER Experiment Name: At_100uM_ABA_Mutants__P Parameter: Organism Value: A. thaliana
  misc_feature: MA Experiment 20000573 PARAMETER Experiment Name: At_100uM_ABA_Mutants__P Parameter: Plant Line Value: CS22 vs. Ler wt
  misc_feature: MA Experiment 20000573 PARAMETER Experiment Name: At_100uM_ABA_Mutants__P Parameter: Timepoint (hr) Value: N/A
  misc_feature: MA Experiment 20000573 PARAMETER Experiment Name: At_100uM_ABA_Mutants__P Parameter: Tissue Value: Whole Plant
  misc_feature: MA Experiment 20000573 PARAMETER Experiment Name: At_100uM_ABA_Mutants__P Parameter: Treatment Value: None
  misc_feature: MA Experiment ID: 20000574 Result: Down-regulated in Transcription
  misc_feature: MA Experiment 20000574 PARAMETER Experiment Name: At_100uM_ABA_Mutants__P Parameter: Organism Value: A. thaliana
  misc_feature: MA Experiment 20000574 PARAMETER Experiment Name: At_100uM_ABA_Mutants__P Parameter: Plant Line Value: CS23 vs. Ler wt
  misc_feature: MA Experiment 20000574 PARAMETER Experiment Name: At_100uM_ABA_Mutants__P Parameter: Timepoint (hr) Value: N/A
  misc_feature: MA Experiment 20000574 PARAMETER Experiment Name: At_100uM_ABA_Mutants__P Parameter: Tissue Value: Whole Plant
  misc_feature: MA Experiment 20000574 PARAMETER Experiment Name: At_100uM_ABA_Mutants__P Parameter: Treatment Value: None
  misc_feature: MA Experiment ID: 20001911 Result: Up-regulated in Transcription
  misc_feature: MA Experiment 20001911 PARAMETER Experiment Name: At_Drought_Reproduction_P Parameter: Age (day) Value: 40
  misc_feature: MA Experiment 20001911 PARAMETER Experiment Name: At_Drought_Reproduction_P Parameter: Organism Value: A. thaliana
  misc_feature: MA Experiment 20001911 PARAMETER Experiment Name: At_Drought_Reproduction_P Parameter: Plant Line Value: WS
  misc_feature: MA Experiment 20001911 PARAMETER Experiment Name: At_Drought_Reproduction_P Parameter: Timepoint (day) Value: 10
  misc_feature: MA Experiment 20001911 PARAMETER Experiment Name: At_Drought_Reproduction_P Parameter: Tissue Value: Flowers
  misc_feature: MA Experiment 20001911 PARAMETER Experiment Name: At_Drought_Reproduction_P Parameter: Treatment Value: Drought vs. No Drought
ttcttcaaaaaccccaaccacttcttctccccaaaaacctccaaagtttcaatctttacttctctctttttctccaagttatcttcttttctaggaagagatatgtgcggtgcaaagagcaacctttgctcatctaaaaccctaacagaagtcgaattcatgaggcagaaatcagaagacggagcttccgccacgtgtctcctcgaattcgccgcctgtgatgatctttcatcgtttaagagagagatcgaagagaatccatcggtggagattgatgagtcagggttttggtattgcagacgggtcgggtctaagaagatgggttttgaagaaagaacaccacttatggttgctgctatgtatggaagcatggaagtgttgaattacataattgccacaggaagatccgatgtgaacagagtttgcagtgacgagaaagtcactgctcttcactgtgcagtttctggctgttctgtttctatcgttgagatcatcaagatcttgcttgatgcttctgcttcacctaattgtgttgacgctaatgggaacaaaccggttgatttgttggctaaagattctcggtttgttcctaaccagagtagaaaggcggttgaggttttactgaccgggattcatggttcggttatggaagaagaggaggaggaactgaagagtgttgtgactaagtatccagctgatgcatcacttcctgatattaacgaaggtgtttatggaactgatgattttaggatgtttagctttaaggttaagccatgttctagggcttattcacatgattggactgaatgtccttttgttcatcctggtgagaatgcaaggaggagagatcctaggaagtatccttacacttgtgtgccttgtcccgagtttcgtaaagggtcttgtcctaaaggagattcgtgtgagtacgcgcacggtgttttcgagtcttggcttcacccggcgcagtataggacacggctttgcaaagatgagactggttgtgctaggagagtttgtttctttgctcatagacgggatgagttaagaccggttaatgcttctactggttctgcaatggtttcaccaaggtcgtctaatcagtctcctgagatgtctgttatgtctcctttgacgctgggatcatcgccaatgaactctcctatggctaatggtgttcctttgtctccaagaaatggtggtttatggcagaacagagttaatagccttacaccaccaccgttgcagcttaatggtagcagattgaagtcgactttgagtgctagagatatggatatggagatggaacttaggtttcgcggtttggataaccggagacttggtgatctcaagccatccaacctcgaagagactttcggatcatatgactcagcttctgtgatgcaacttcaatcaccaagcaggcattctcagatgaaccactatccgtcttcacctgtgaggcagcctcctcctcatggattcgaatcttcagcagccatggcagctgcagtgatgaatgcaagatcctcagcgtttgcgaaacgcagcttgagtttcaaaccagctccagtagcttctaatgtctccgattggggatcaccaaatgggaagcttgagtggggaatgcaaagagatgagctgaacaagttgaggagaagtgcctccttcggcattcatggaaacaacaacaacagtgtgtcacgccctgctagagactacagtgacgagccagatgtgtcgtgggtgaactcactggtgaaagagaatgcaccagagagagtgaatgagagggttgggaatacggtgaatggtgcagcgagtagagacaagtttaagctgccgtcgtgggcagagcaaatgtatatagaccatgagcagcagattgtggcataagaagcagaaagaaagatgtgggatttatattgcttttgtcttctgggcctctctacacagaatctaacaaatctggcaataattctttgatttgtgtttgacccatagtttggttactagtatatgtttttttatgttctttttttctttgtcattctcttgtccttcgtgacactatgtaatgattaaaagcaaataattgatgcatgagttcaaatgttcttt

SEQ ID NO: 29673 - protein, 631 aa, Arabidopsis thaliana
  peptide (1)..(631): Ceres Seq. ID no. 13493769
  misc_feature (145)..(180): Pfam Name: Ankyrin repeat Pfam Description: Ankyrin repeat
  misc_feature (104)..(431): Homolog of NCBI NO: 18405834 NR Description: CCCH-type zinc finger protein -related
  misc_feature (67)..(189): Homolog of NCBI NO: 34899832 NR Description: OJ1092_A07.25 [Oryza sativa (japonica
  misc_feature (229)..(507): Homolog of NCBI NO: 34899832 NR Description: OJ1092_A07.25 [Oryza sativa (japonica
  misc_feature (35)..(214): Homolog of NCBI NO: 20466590 NR Description: zinc finger transcription factor-like protein
  misc_feature (229)..(434): Homolog of NCBI NO: 20466590 NR Description: zinc finger transcription factor-like protein
  misc_feature (35)..(214): Homolog of NCBI NO: 15239917 NR Description: zinc finger transcription factor -related protein
  misc_feature (229)..(434): Homolog of NCBI NO: 15239917 NR Description: zinc finger transcription factor -related protein
  misc_feature (67)..(438): Homolog of NCBI NO: 15237721 NR Description: zinc finger transcription factor-related protein
  misc_feature (35)..(630): Homolog of NCBI NO: 18410398 NR Description: expressed protein [Arabidopsis thaliana]
  misc_feature (35)..(630): Homolog of NCBI NO: 11357692 NR Description: hypothetical protein F27K19.160 - Arabidopsis
FFKNPNHFFSPKTSKVSIFTSLFFSKLSSFLGRDMCGAKSNLCSSKTLTEVEFMRQKSEDGASATCLLEFAACDDLSSFKREIEENPSVEIDESGFWYCRRVGSKKMGFEERTPLMVAAMYGSMEVLNYIIATGRSDVNRVCSDEKVTALHCAVSGCSVSIVEIIKILLDASASPNCVDANGNKPVDLLAKDSRFVPNQSRKAVEVLLTGIHGSVMEEEEEELKSVVTKYPADASLPDINEGVYGTDDFRMFSFKVKPCSRAYSHDWTECPFVHPGENARRRDPRKYPYTCVPCPEFRKGSCPKGDSCEYAHGVFESWLHPAQYRTRLCKDETGCARRVCFFAHRRDELRPVNASTGSAMVSPRSSNQSPEMSVMSPLTLGSSPMNSPMANGVPLSPRNGGLWQNRVNSLTPPPLQLNGSRLKSTLSARDMDMEMELRFRGLDNRRLGDLKPSNLEETFGSYDSASVMQLQSPSRHSQMNHYPSSPVRQPPPHGFESSAAMAAAVMNARSSAFAKRSLSFKPAPVASNVSDWGSPNGKLEWGMQRDELNKLRRSASFGIHGNNNNSVSRPARDYSDEPDVSWVNSLVKENAPERVNERVGNTVNGAASRDKFKLPSWAEQMYIDHEQQIVA

SEQ ID NO: 29674 - protein, 597 aa, Arabidopsis thaliana
  peptide (1)..(597): Ceres Seq. ID no. 13493770
  misc_feature (111)..(146): Pfam Name: Ankyrin repeat Pfam Description: Ankyrin repeat
  misc_feature (70)..(397): Homolog of NCBI NO: 18405834 NR Description: CCCH-type zinc finger protein -related
  misc_feature (33)..(155): Homolog of NCBI NO: 34899832 NR Description: OJ1092_A07.25 [Oryza sativa (japonica
  misc_feature (195)..(473): Homolog of NCBI NO: 34899832 NR Description: OJ1092_A07.25 [Oryza sativa (japonica
  misc_feature (1)..(180): Homolog of NCBI NO: 20466590 NR Description: zinc finger transcription factor-like protein
  misc_feature (195)..(400): Homolog of NCBI NO: 20466590 NR Description: zinc finger transcription factor-like protein
  misc_feature (1)..(180): Homolog of NCBI NO: 15239917 NR Description: zinc finger transcription factor -related protein
  misc_feature (195)..(400): Homolog of NCBI NO: 15239917 NR Description: zinc finger transcription factor -related protein
  misc_feature (33)..(404): Homolog of NCBI NO: 15237721 NR Description: zinc finger transcription factor-related protein
  misc_feature (1)..(596): Homolog of NCBI NO: 18410398 NR Description: expressed protein [Arabidopsis thaliana]
  misc_feature (1)..(596): Homolog of NCBI NO: 11357692 NR Description: hypothetical protein F27K19.160 - Arabidopsis
MCGAKSNLCSSKTLTEVEFMRQKSEDGASATCLLEFAACDDLSSFKREIEENPSVEIDESGFWYCRRVGSKKMGFEERTPLMVAAMYGSMEVLNYIIATGRSDVNRVCSDEKVTALHCAVSGCSVSIVEIIKILLDASASPNCVDANGNKPVDLLAKDSRFVPNQSRKAVEVLLTGIHGSVMEEEEEELKSVVTKYPADASLPDINEGVYGTDDFRMFSFKVKPCSRAYSHDWTECPFVHPGENARRRDPRKYPYTCVPCPEFRKGSCPKGDSCEYAHGVFESWLHPAQYRTRLCKDETGCARRVCFFAHRRDELRPVNASTGSAMVSPRSSNQSPEMSVMSPLTLGSSPMNSPMANGVPLSPRNGGLWQNRVNSLTPPPLQLNGSRLKSTLSARDMDMEMELRFRGLDNRRLGDLKPSNLEETFGSYDSASVMQLQSPSRHSQMNHYPSSPVRQPPPHGFESSAAMAAAVMNARSSAFAKRSLSFKPAPVASNVSDWGSPNGKLEWGMQRDELNKLRRSASFGIHGNNNNSVSRPARDYSDEPDVSWVNSLVKENAPERVNERVGNTVNGAASRDKFKLPSWAEQMYIDHEQQIVA

SEQ ID NO: 29675 - protein, 578 aa, Arabidopsis thaliana
  peptide (1)..(578): Ceres Seq. ID no. 13493771
  misc_feature (92)..(127): Pfam Name: Ankyrin repeat Pfam Description: Ankyrin repeat
  misc_feature (51)..(378): Homolog of NCBI NO: 18405834 NR Description: CCCH-type zinc finger protein -related
  misc_feature (14)..(136): Homolog of NCBI NO: 34899832 NR Description: OJ1092_A07.25 [Oryza sativa (japonica
  misc_feature (176)..(454): Homolog of NCBI NO: 34899832 NR Description: OJ1092_A07.25 [Oryza sativa (japonica
  misc_feature (1)..(161): Homolog of NCBI NO: 20466590 NR Description: zinc finger transcription factor-like protein
  misc_feature (176)..(381): Homolog of NCBI NO: 20466590 NR Description: zinc finger transcription factor-like protein
  misc_feature (1)..(161): Homolog of NCBI NO: 15239917 NR Description: zinc finger transcription factor -related protein
  misc_feature (176)..(381): Homolog of NCBI NO: 15239917 NR Description: zinc finger transcription factor -related protein
  misc_feature (14)..(385): Homolog of NCBI NO: 15237721 NR Description: zinc finger transcription factor-related protein
  misc_feature (1)..(577): Homolog of NCBI NO: 18410398 NR Description: expressed protein [Arabidopsis thaliana]
  misc_feature (1)..(577): Homolog of NCBI NO: 11357692 NR Description: hypothetical protein F27K19.160 - Arabidopsis
MRQKSEDGASATCLLEFAACDDLSSFKREIEENPSVEIDESGFWYCRRVGSKKMGFEERTPLMVAAMYGSMEVLNYIIATGRSDVNRVCSDEKVTALHCAVSGCSVSIVEIIKILLDASASPNCVDANGNKPVDLLAKDSRFVPNQSRKAVEVLLTGIHGSVMEEEEEELKSVVTKYPADASLPDINEGVYGTDDFRMFSFKVKPCSRAYSHDWTECPFVHPGENARRRDPRKYPYTCVPCPEFRKGSCPKGDSCEYAHGVFESWLHPAQYRTRLCKDETGCARRVCFFAHRRDELRPVNASTGSAMVSPRSSNQSPEMSVMSPLTLGSSPMNSPMANGVPLSPRNGGLWQNRVNSLTPPPLQLNGSRLKSTLSARDMDMEMELRFRGLDNRRLGDLKPSNLEETFGSYDSASVMQLQSPSRHSQMNHYPSSPVRQPPPHGFESSAAMAAAVMNARSSAFAKRSLSFKPAPVASNVSDWGSPNGKLEWGMQRDELNKLRRSASFGIHGNNNNSVSRPARDYSDEPDVSWVNSLVKENAPERVNERVGNTVNGAASRDKFKLPSWAEQMYIDHEQQIVA

SEQ ID NO: 29676 - DNA, 853 bp, Arabidopsis thaliana
  misc_feature (1)..(853): Ceres Seq. ID no. 13490099
  misc_feature: MA Experiment ID: 108434 Result: Up-regulated in Transcription
  misc_feature: MA Experiment 108434 PARAMETER Experiment Name: At_Root_Tips_cDNA_P Parameter: Tissue Value: Root Tips
  misc_feature: MA Experiment ID: 20000184 Result: Down-regulated in Transcription
  misc_feature: MA Experiment 20000184 PARAMETER Experiment Name: At_Shoots__P Parameter: Age (day) Value: 7
  misc_feature: MA Experiment 20000184 PARAMETER Experiment Name: At_Shoots__P Parameter: Tissue Value: Shoots vs. Whole Plant
gacattcctctctttcttctgctctcggaattggtgttgcagaagttgcaaatttggaagaaaagttaacaggactggtgaagtatcaaaatttggggttttgctacgatgacgctaggtgctcggcttgttgctcccatgattatacttctcctttttataccgattgaattagttaaagcggaagtcattacactgacaccagaaaccttttctgacaagataaaggagaaggatactgcgtggttcgtaaagttttgtgttccttggtgtaaacactgcaagaaactggggaatttgtgggaagacttgggaaaagcaatggagggagacgatgaaattgaggttggtgaagtagactgtggtactagcagagctgtttgcaccaaagttgaaattcactcgtatccaacatttatgctattttacaatggagaagaagtttcgaaatataaaggaaaaagagacgttgaatcgctcaaggcttttgttgtagaggaaactgaaaaggcagcagaaaaagcacagcttgaagacaaggaactgtgatacaactagtcggtgattattagaacctgatacattgttccctttggttttcattttgcctatgcagttgtgtgactcttaccgttagttagataggcatggttttcagcacgatggaggatcatctttgggtttaaaggtttttcacaccactgttttgctaaaatattcagtttccattttattcagagtcagataagcaaagacgtaagtgtagttagtcgagatttcttacaagtttgtgttgtatgttcgttttaagagcagctgcagaccaaagttcttgctttaaaatttcatatcc

SEQ ID NO: 29677 - protein, 146 aa, Arabidopsis thaliana
  peptide (1)..(146): Ceres Seq. ID no. 13490100
  misc_feature (26)..(133): Pfam Name: Thioredoxin Pfam Description: Thioredoxin
  misc_feature (1)..(133): Homolog of NCBI NO: 21740140 NR Description: hypothetical protein [Homo sapiens]
  misc_feature (1)..(133): Homolog of NCBI NO: 20067392 NR Description: thioredoxin related protein [Homo sapiens]
  misc_feature (1)..(133): Homolog of NCBI NO: 13540604 NR Description: thioredoxin domain containing 5; thioredoxin
  misc_feature (24)..(133): Homolog of NCBI NO: 37574006 NR Description: Txndc5 protein [Mus musculus]
  misc_feature (24)..(133): Homolog of NCBI NO: 21703732 NR Description: similar to thioredoxin related protein [Mus
  misc_feature (24)..(133): Homolog of NCBI NO: 19353593 NR Description: similar to thioredoxin related protein [Mus
  misc_feature (23)..(145): Homolog of NCBI NO: 38649034 NR Description: Unknown (protein for MGC:75894) [Silurana
  misc_feature (30)..(146): Homolog of NCBI NO: 8778824 NR Description: T6D22.5 [Arabidopsis thaliana]
  misc_feature (1)..(130): Homolog of NCBI NO: 1532175 NR Description: similar to protein disulfide isomerase
  misc_feature (1)..(146): Homolog of NCBI NO: 15223058 NR Description: protein disulfide isomerase - related
MTLGARLVAPMIILLLFIPIELVKAEVITLTPETFSDKIKEKDTAWFVKFCVPWCKHCKKLGNLWEDLGKAMEGDDEIEVGEVDCGTSRAVCTKVEIHSYPTFMLFYNGEEVSKYKGKRDVESLKAFVVEETEKAAEKAQLEDKEL

SEQ ID NO: 29678 - protein, 136 aa, Arabidopsis thaliana
  peptide (1)..(136): Ceres Seq. ID no. 13490101
  misc_feature (16)..(123): Pfam Name: Thioredoxin Pfam Description: Thioredoxin
  misc_feature (1)..(123): Homolog of NCBI NO: 21740140 NR Description: hypothetical protein [Homo sapiens]
  misc_feature (1)..(123): Homolog of NCBI NO: 20067392 NR Description: thioredoxin related protein [Homo sapiens]
  misc_feature (1)..(123): Homolog of NCBI NO: 13540604 NR Description: thioredoxin domain containing 5; thioredoxin
  misc_feature (14)..(123): Homolog of NCBI NO: 37574006 NR Description: Txndc5 protein [Mus musculus]
  misc_feature (14)..(123): Homolog of NCBI NO: 21703732 NR Description: similar to thioredoxin related protein [Mus
  misc_feature (14)..(123): Homolog of NCBI NO: 19353593 NR Description: similar to thioredoxin related protein [Mus
  misc_feature (13)..(135): Homolog of NCBI NO: 38649034 NR Description: Unknown (protein for MGC:75894) [Silurana
  misc_feature (20)..(136): Homolog of NCBI NO: 8778824 NR Description: T6D22.5 [Arabidopsis thaliana]
  misc_feature (1)..(120): Homolog of NCBI NO: 1532175 NR Description: similar to protein disulfide isomerase
  misc_feature (1)..(136): Homolog of NCBI NO: 15223058 NR Description: protein disulfide isomerase - related
MIILLLFIPIELVKAEVITLTPETFSDKIKEKDTAWFVKFCVPWCKHCKKLGNLWEDLGKAMEGDDEIEVGEVDCGTSRAVCTKVEIHSYPTFMLFYNGEEVSKYKGKRDVESLKAFVVEETEKAAEKAQLEDKEL

SEQ ID NO: 29679 - protein, 75 aa, Arabidopsis thaliana
  peptide (1)..(75): Ceres Seq. ID no. 13490102
  misc_feature (1)..(62): Pfam Name: Thioredoxin Pfam Description: Thioredoxin
  misc_feature (1)..(62): Homolog of NCBI NO: 21740140 NR Description: hypothetical protein [Homo sapiens]
  misc_feature (1)..(62): Homolog of NCBI NO: 20067392 NR Description: thioredoxin related protein [Homo sapiens]
  misc_feature (1)..(62): Homolog of NCBI NO: 13540604 NR Description: thioredoxin domain containing 5; thioredoxin
  misc_feature (1)..(62): Homolog of NCBI NO: 37574006 NR Description: Txndc5 protein [Mus musculus]
  misc_feature (1)..(62): Homolog of NCBI NO: 21703732 NR Description: similar to thioredoxin related protein [Mus
  misc_feature (1)..(62): Homolog of NCBI NO: 19353593 NR Description: similar to thioredoxin related protein [Mus
  misc_feature (1)..(74): Homolog of NCBI NO: 38649034 NR Description: Unknown (protein for MGC:75894) [Silurana
  misc_feature (1)..(75): Homolog of NCBI NO: 8778824 NR Description: T6D22.5 [Arabidopsis thaliana]
  misc_feature (1)..(59): Homolog of NCBI NO: 1532175 NR Description: similar to protein disulfide isomerase
  misc_feature (1)..(75): Homolog of NCBI NO: 15223058 NR Description: protein disulfide isomerase - related
MEGDDEIEVGEVDCGTSRAVCTKVEIHSYPTFMLFYNGEEVSKYKGKRDVESLKAFVVEETEKAAEKAQLEDKEL

SEQ ID NO: 29680 - DNA, 689 bp, Arabidopsis thaliana
  misc_feature (1)..(689): Ceres Seq. ID no. 12466456
  misc_feature: MA Experiment ID: 108561 Result: Up-regulated in Transcription
  misc_feature: MA Experiment 108561 PARAMETER Experiment Name: At_100uM_ABA_cDNA_P Parameter: Timepoint (hr) Value: 6
  misc_feature: MA Experiment 108561 PARAMETER Experiment Name: At_100uM_ABA_cDNA_P Parameter: Tissue Value: Aerial
  misc_feature: MA Experiment 108561 PARAMETER Experiment Name: At_100uM_ABA_cDNA_P Parameter: Treatment Value: 100uM ABA vs. No Treatment
  misc_feature: MA Experiment ID: 108573 Result: Up-regulated in Transcription
  misc_feature: MA Experiment 108573 PARAMETER Experiment Name: At_Drought_cDNA_P Parameter: Timepoint (hr) Value: 6
  misc_feature: MA Experiment 108573 PARAMETER Experiment Name: At_Drought_cDNA_P Parameter: Tissue Value: Aerial
  misc_feature: MA Experiment 108573 PARAMETER Experiment Name: At_Drought_cDNA_P Parameter: Treatment Value: Drought vs. No Drought
  misc_feature: MA Experiment ID: 108579 Result: Down-regulated in Transcription
  misc_feature: MA Experiment 108579 PARAMETER Experiment Name: At_4deg_Cold_cDNA_P Parameter: Temperature (deg C) Value: 4 vs. 22
  misc_feature: MA Experiment 108579 PARAMETER Experiment Name: At_4deg_Cold_cDNA_P Parameter: Timepoint (hr) Value: 6
  misc_feature: MA Experiment 108579 PARAMETER Experiment Name: At_4deg_Cold_cDNA_P Parameter: Tissue Value: Aerial
  misc_feature: MA Experiment ID: 108605 Result: Up-regulated in Transcription
  misc_feature: MA Experiment 108605 PARAMETER Experiment Name: At_100uM_ABA_cDNA_P Parameter: Timepoint (hr) Value: 6
  misc_feature: MA Experiment 108605 PARAMETER Experiment Name: At_100uM_ABA_cDNA_P Parameter: Tissue Value: Aerial
  misc_feature: MA Experiment 108605 PARAMETER Experiment Name: At_100uM_ABA_cDNA_P Parameter: Treatment Value: 100uM ABA vs. No Treatment
  misc_feature: MA Experiment ID: 108607 Result: Up-regulated in Transcription
  misc_feature: MA Experiment 108607 PARAMETER Experiment Name: At_100uM_ABA_cDNA_P Parameter: Timepoint (hr) Value: 4
  misc_feature: MA Experiment 108607 PARAMETER Experiment Name: At_100uM_ABA_cDNA_P Parameter: Tissue Value: Aerial
  misc_feature: MA Experiment 108607 PARAMETER Experiment Name: At_100uM_ABA_cDNA_P Parameter: Treatment Value: 100uM ABA vs. No Treatment
  misc_feature: MA Experiment ID: 108668 Result: Up-regulated in Transcription
  misc_feature: MA Experiment 108668 PARAMETER Experiment Name: At_2mM_SA_cDNA_P Parameter: Plant Line Value: WS
  misc_feature: MA Experiment 108668 PARAMETER Experiment Name: At_2mM_SA_cDNA_P Parameter: Timepoint (hr) Value: 6
  misc_feature: MA Experiment 108668 PARAMETER Experiment Name: At_2mM_SA_cDNA_P Parameter: Treatment Value: 2mM SA vs. No Treatment
  misc_feature: MA Experiment ID: 20000069 Result: Up-regulated in Transcription
  misc_feature: MA Experiment 20000069 PARAMETER Experiment Name: At_100uM_ABA_Mutants_cDNA_P Parameter: Plant Line Value: CS23
  misc_feature: MA Experiment 20000069 PARAMETER Experiment Name: At_100uM_ABA_Mutants_cDNA_P Parameter: Timepoint (hr) Value: 6
  misc_feature: MA Experiment 20000069 PARAMETER Experiment Name: At_100uM_ABA_Mutants_cDNA_P Parameter: Tissue Value: Aerial
  misc_feature: MA Experiment 20000069 PARAMETER Experiment Name: At_100uM_ABA_Mutants_cDNA_P Parameter: Treatment Value: 100uM ABA vs. No Treatment
  misc_feature: MA Experiment ID: 20000070 Result: Up-regulated in Transcription
  misc_feature: MA Experiment 20000070 PARAMETER Experiment Name: At_100uM_ABA_Mutants_cDNA_P Parameter: Plant Line Value: CS24
  misc_feature: MA Experiment 20000070 PARAMETER Experiment Name: At_100uM_ABA_Mutants_cDNA_P Parameter: Timepoint (hr) Value: 6
  misc_feature: MA Experiment 20000070 PARAMETER Experiment Name: At_100uM_ABA_Mutants_cDNA_P Parameter: Tissue Value: Aerial
  misc_feature: MA Experiment 20000070 PARAMETER Experiment Name: At_100uM_ABA_Mutants_cDNA_P Parameter: Treatment Value: 100uM ABA vs. No Treatment
  misc_feature: MA Experiment ID: 20000071 Result: Up-regulated in Transcription
  misc_feature: MA Experiment 20000071 PARAMETER Experiment Name: At_100uM_ABA_Mutants_cDNA_P Parameter: Plant Line Value: CS8104
  misc_feature: MA Experiment 20000071 PARAMETER Experiment Name: At_100uM_ABA_Mutants_cDNA_P Parameter: Timepoint (hr) Value: 6
  misc_feature: MA Experiment 20000071 PARAMETER Experiment Name: At_100uM_ABA_Mutants_cDNA_P Parameter: Tissue Value: Aerial
  misc_feature: MA Experiment 20000071 PARAMETER Experiment Name: At_100uM_ABA_Mutants_cDNA_P Parameter: Treatment Value: 100uM ABA vs. No Treatment
  misc_feature: MA Experiment ID: 20000072 Result: Up-regulated in Transcription
  misc_feature: MA Experiment 20000072 PARAMETER Experiment Name: At_100uM_ABA_Mutants_cDNA_P Parameter: Plant Line Value: CS8105
  misc_feature: MA Experiment 20000072 PARAMETER Experiment Name: At_100uM_ABA_Mutants_cDNA_P Parameter: Timepoint (hr) Value: 6
  misc_feature: MA Experiment 20000072 PARAMETER Experiment Name: At_100uM_ABA_Mutants_cDNA_P Parameter: Tissue Value: Aerial
  misc_feature: MA Experiment 20000072 PARAMETER Experiment Name: At_100uM_ABA_Mutants_cDNA_P Parameter: Treatment Value: 100uM ABA vs. No Treatment
  misc_feature: MA Experiment ID: 20000087 Result: Up-regulated in Transcription
  misc_feature: MA Experiment 20000087 PARAMETER Experiment Name: At_100uM_ABA_Mutants_cDNA_P Parameter: Plant Line Value: WS
  misc_feature: MA Experiment 20000087 PARAMETER Experiment Name: At_100uM_ABA_Mutants_cDNA_P Parameter: Timepoint (hr) Value: 6
  misc_feature: MA Experiment 20000087 PARAMETER Experiment Name: At_100uM_ABA_Mutants_cDNA_P Parameter: Tissue Value: Aerial
  misc_feature: MA Experiment 20000087 PARAMETER Experiment Name: At_100uM_ABA_Mutants_cDNA_P Parameter: Treatment Value: 100uM ABA vs. No Treatment
  misc_feature: MA Experiment ID: 20000088 Result: Up-regulated in Transcription
  misc_feature: MA Experiment 20000088 PARAMETER Experiment Name: At_100uM_ABA_Mutants_cDNA_P Parameter: Plant Line Value: Landsberg
  misc_feature: MA Experiment 20000088 PARAMETER Experiment Name: At_100uM_ABA_Mutants_cDNA_P Parameter: Timepoint (hr) Value: 6
  misc_feature: MA Experiment 20000088 PARAMETER Experiment Name: At_100uM_ABA_Mutants_cDNA_P Parameter: Tissue Value: Aerial
  misc_feature: MA Experiment 20000088 PARAMETER Experiment Name: At_100uM_ABA_Mutants_cDNA_P Parameter: Treatment Value: 100uM ABA vs. No Treatment
  misc_feature: MA Experiment ID: 20000111 Result: Down-regulated in Transcription
  misc_feature: MA Experiment 20000111 PARAMETER Experiment Name: At_42deg_Heat_cDNA_P Parameter: Temperature (deg C) Value: 42 vs. 22
  misc_feature: MA Experiment 20000111 PARAMETER Experiment Name: At_42deg_Heat_cDNA_P Parameter: Timepoint (hr) Value: 6
  misc_feature: MA Experiment 20000111 PARAMETER Experiment Name: At_42deg_Heat_cDNA_P Parameter: Tissue Value: Aerial
  misc_feature: MA Experiment ID: 20000112 Result: Down-regulated in Transcription
  misc_feature: MA Experiment 20000112 PARAMETER Experiment Name: At_42deg_Heat_cDNA_P Parameter: Temperature (deg C) Value: 42 vs. 22
  misc_feature: MA Experiment 20000112 PARAMETER Experiment Name: At_42deg_Heat_cDNA_P Parameter: Timepoint (hr) Value: 2
  misc_feature: MA Experiment 20000112 PARAMETER Experiment Name: At_42deg_Heat_cDNA_P Parameter: Tissue Value: Aerial
  misc_feature: MA Experiment ID: 20000113 Result: Down-regulated in Transcription
  misc_feature: MA Experiment 20000113 PARAMETER Experiment Name: At_42deg_Heat_cDNA_P Parameter: Temperature (deg C) Value: 42 vs. 22
  misc_feature: MA Experiment 20000113 PARAMETER Experiment Name: At_42deg_Heat_cDNA_P Parameter: Timepoint (hr) Value: 8
  misc_feature: MA Experiment 20000113 PARAMETER Experiment Name: At_42deg_Heat_cDNA_P Parameter: Tissue Value: Aerial
  misc_feature: MA Experiment ID: 20000117 Result: Up-regulated in Transcription
  misc_feature: MA Experiment 20000117 PARAMETER Experiment Name: At_100uM_ABA_Mutants_cDNA_P Parameter: Plant Line Value: Columbia
  misc_feature: MA Experiment 20000117 PARAMETER Experiment Name: At_100uM_ABA_Mutants_cDNA_P Parameter: Timepoint (hr) Value: 6
  misc_feature: MA Experiment 20000117 PARAMETER Experiment Name: At_100uM_ABA_Mutants_cDNA_P Parameter: Tissue Value: Aerial
  misc_feature: MA Experiment 20000117 PARAMETER Experiment Name: At_100uM_ABA_Mutants_cDNA_P Parameter: Treatment Value: 100uM ABA vs. No Treatment
  misc_feature: MA Experiment ID: 20000144 Result: Down-regulated in Transcription
  misc_feature: MA Experiment 20000144 PARAMETER Experiment Name: At_42deg_Heat_cDNA_P Parameter: Temperature (deg C) Value: 42 vs. 22
  misc_feature: MA Experiment 20000144 PARAMETER Experiment Name: At_42deg_Heat_cDNA_P Parameter: Timepoint (hr) Value: 1
  misc_feature: MA Experiment 20000144 PARAMETER Experiment Name: At_42deg_Heat_cDNA_P Parameter: Tissue Value: Aerial
  misc_feature: MA Experiment ID: 20000264 Result: Up-regulated in Transcription
  misc_feature: MA Experiment 20000264 PARAMETER Experiment Name: At_Open_Flower_P Parameter: Age (day) Value: 21
  misc_feature: MA Experiment 20000264 PARAMETER Experiment Name: At_Open_Flower_P Parameter: Plant Line Value: WS
  misc_feature: MA Experiment 20000264 PARAMETER Experiment Name: At_Open_Flower_P Parameter: Tissue Value: Open Flower vs. Whole Plant
  misc_feature: MA Experiment ID: 20000794 Result: Up-regulated in Transcription
  misc_feature: MA Experiment 20000794 PARAMETER Experiment Name: At_Petals_P Parameter: Age (day) Value: 23-25 days
  misc_feature: MA Experiment 20000794 PARAMETER Experiment Name: At_Petals_P Parameter: Plant Line Value: WS
  misc_feature: MA Experiment 20000794 PARAMETER Experiment Name: At_Petals_P Parameter: Tissue Value: Petals vs. Whole plant
catagggtcaccaatggcttcttctttgcttgcactcttctcctgtctcttcctctctctcttatctctctcctcctccctaaatctccgccgtccgatcttctctcaatccaacgacctcgatctcttctcttctctaaatctcgaccgtccatctctcgccgccgatgacatccacgatcttctcccacgctacggattcccgaaaggtcttcttcccaacaacgtcaaatcgtacactatctccgacgacggcgatttcaccgttgacctgatttccagttgctacgtcaagttctccgatcaactcgttttctacggcaagaatatcgccggaaaactcagttacggatctgttaaagacgtccgtggaatccaagctaaagaagctttcctttggctaccaatcaccgccatggaatcggatccaagctctgccacggttgtgttctccgtcggatttgtgtccaagactttacctgcttccatgttcgaaaatgttccttcttgctcaagaaacctaaatcttcaagactcttgaatccacctgaaacgatctcaagattcaacattccctccaccctttatagttttgtatttcagaagtattttgcttggtttcgtagatataggttcgaattggaaaagatactatcttaattattcgaatcagattatgttatactgcc

SEQ ID NO: 29681 - protein, 179 aa, Arabidopsis thaliana
  peptide (1)..(179): Ceres Seq. ID no. 12466457
  misc_feature (36)..(175): Pfam Name: Protein of unknown function, DUF538 Pfam Description: Protein of unknown function, DUF538
  misc_feature (54)..(171): Homolog of NCBI NO: 34906900 NR Description: P0470A12.30 [Oryza sativa (japonica
  misc_feature (51)..(170): Homolog of NCBI NO: 21553956 NR Description: unknown [Arabidopsis thaliana]
  misc_feature (51)..(170): Homolog of NCBI NO: 18407279 NR Description: Expressed protein
  misc_feature (45)..(170): Homolog of NCBI NO: 30696469 NR Description: expressed protein [Arabidopsis thaliana]
  misc_feature (45)..(178): Homolog of NCBI NO: 9758945 NR Description: gb|AAF02153.1~gene_id:MRB17.3~similar to unknown
  misc_feature (54)..(170): Homolog of NCBI NO: 34898576 NR Description: P0534A03.14 [Oryza sativa (japonica
  misc_feature (59)..(177): Homolog of NCBI NO: 28273404 NR Description: unknown protein [Oryza sativa (japonica
  misc_feature (33)..(173): Homolog of NCBI NO: 18420052 NR Description: unknown protein; protein id: At5g19860.1
  misc_feature (59)..(177): Homolog of NCBI NO: 28273408 NR Description: unknown protein [Oryza sativa (japonica
  misc_feature (5)..(179): Homolog of NCBI NO: 18405296 NR Description: Expressed protein
IGSPMASSLLALFSCLFLSLLSLSSSLNLRRPIFSQSNDLDLFSSLNLDRPSLAADDIHDLLPRYGFPKGLLPNNVKSYTISDDGDFTVDLISSCYVKFSDQLVFYGKNIAGKLSYGSVKDVRGIQAKEAFLWLPITAMESDPSSATVVFSVGFVSKTLPASMFENVPSCSRNLNLQDS

SEQ ID NO: 29682 - protein, 175 aa, Arabidopsis thaliana
  peptide (1)..(175): Ceres Seq. ID no. 12466458
  misc_feature (32)..(171): Pfam Name: Protein of unknown function, DUF538 Pfam Description: Protein of unknown function, DUF538
  misc_feature (50)..(167): Homolog of NCBI NO: 34906900 NR Description: P0470A12.30 [Oryza sativa (japonica
  misc_feature (47)..(166): Homolog of NCBI NO: 21553956 NR Description: unknown [Arabidopsis thaliana]
  misc_feature (47)..(166): Homolog of NCBI NO: 18407279 NR Description: Expressed protein
  misc_feature (41)..(166): Homolog of NCBI NO: 30696469 NR Description: expressed protein [Arabidopsis thaliana]
  misc_feature (41)..(174): Homolog of NCBI NO: 9758945 NR Description: gb|AAF02153.1~gene_id:MRB17.3~similar to unknown
  misc_feature (50)..(166): Homolog of NCBI NO: 34898576 NR Description: P0534A03.14 [Oryza sativa (japonica
  misc_feature (55)..(173): Homolog of NCBI NO: 28273404 NR Description: unknown protein [Oryza sativa (japonica
  misc_feature (29)..(169): Homolog of NCBI NO: 18420052 NR Description: unknown protein; protein id: At5g19860.1
  misc_feature (55)..(173): Homolog of NCBI NO: 28273408 NR Description: unknown protein [Oryza sativa (japonica
  misc_feature (1)..(175): Homolog of NCBI NO: 18405296 NR Description: Expressed protein
MASSLLALFSCLFLSLLSLSSSLNLRRPIFSQSNDLDLFSSLNLDRPSLAADDIHDLLPRYGFPKGLLPNNVKSYTISDDGDFTVDLISSCYVKFSDQLVFYGKNIAGKLSYGSVKDVRGIQAKEAFLWLPITAMESDPSSATVVFSVGFVSKTLPASMFENVPSCSRNLNLQDS

SEQ ID NO: 29683 - DNA, 908 bp, Arabidopsis thaliana
  misc_feature (1)..(908): Ceres Seq. ID no. 12333389
  misc_feature: MA Experiment ID: 108434 Result: Down-regulated in Transcription
  misc_feature: MA Experiment 108434 PARAMETER Experiment Name: At_Root_Tips_cDNA_P Parameter: Tissue Value: Root Tips
  misc_feature: MA Experiment ID: 108461 Result: Up-regulated in Transcription
  misc_feature: MA Experiment 108461 PARAMETER Experiment Name: At_Germinating_Seeds_cDNA_P Parameter: Age (day) Value: 1 vs. 0
  misc_feature: MA Experiment 108461 PARAMETER Experiment Name: At_Germinating_Seeds_cDNA_P Parameter: Tissue Value: Germinating Seeds
  misc_feature: MA Experiment ID: 108464 Result: Up-regulated in Transcription
  misc_feature: MA Experiment 108464 PARAMETER Experiment Name: At_Germinating_Seeds_cDNA_P Parameter: Age (day) Value: 4 vs. 0
  misc_feature: MA Experiment 108464 PARAMETER Experiment Name: At_Germinating_Seeds_cDNA_P Parameter: Tissue Value: Germinating Seeds
  misc_feature: MA Experiment ID: 108488 Result: Up-regulated in Transcription
  misc_feature: MA Experiment ID: 108594 Result: Down-regulated in Transcription
  misc_feature: MA Experiment 108594 PARAMETER Experiment Name: At_Ler-rhl_Root_cDNA_P Parameter: Plant Line Value: null
  misc_feature: MA Experiment ID: 108595 Result: Up-regulated in Transcription
  misc_feature: MA Experiment 108595 PARAMETER Experiment Name: At_Ler-pi_Ovule_cDNA_P Parameter: Plant Line Value: null
  misc_feature: MA Experiment ID: 20000113 Result: Down-regulated in Transcription
  misc_feature: MA Experiment 20000113 PARAMETER Experiment Name: At_42deg_Heat_cDNA_P Parameter: Temperature (deg C) Value: 42 vs. 22
  misc_feature: MA Experiment 20000113 PARAMETER Experiment Name: At_42deg_Heat_cDNA_P Parameter: Timepoint (hr) Value: 8
  misc_feature: MA Experiment 20000113 PARAMETER Experiment Name: At_42deg_Heat_cDNA_P Parameter: Tissue Value: Aerial
  misc_feature: MA Experiment ID: 20000180 Result: Up-regulated in Transcription
  misc_feature: MA Experiment 20000180 PARAMETER Experiment Name: At_Germinating_Seeds_P Parameter: Age (hr) Value: 24 vs. 0
  misc_feature: MA Experiment 20000180 PARAMETER Experiment Name: At_Germinating_Seeds_P Parameter: Tissue Value: Germinating Seeds
  misc_feature: MA Experiment ID: 20000184 Result: Down-regulated in Transcription
  misc_feature: MA Experiment 20000184 PARAMETER Experiment Name: At_Shoots__P Parameter: Age (day) Value: 7
  misc_feature: MA Experiment 20000184 PARAMETER Experiment Name: At_Shoots__P Parameter: Tissue Value: Shoots vs. Whole Plant
  misc_feature: MA Experiment ID: 20000185 Result: Down-regulated in Transcription
  misc_feature: MA Experiment 20000185 PARAMETER Experiment Name: At_Roots__P Parameter: Age (day) Value: 7 vs. 21
  misc_feature: MA Experiment 20000185 PARAMETER Experiment Name: At_Roots__P Parameter: Organism Value: A. thaliana
  misc_feature: MA Experiment 20000185 PARAMETER Experiment Name: At_Roots__P Parameter: Tissue Value: Roots vs. Whole Plant
  misc_feature: MA Experiment ID: 20000234 Result: Down-regulated in Transcription
  misc_feature: MA Experiment 20000234 PARAMETER Experiment Name: At_Siliques_P Parameter: Age (day) Value: 21
  misc_feature: MA Experiment 20000234 PARAMETER Experiment Name: At_Siliques_P Parameter: Organism Value: A. thaliana
  misc_feature: MA Experiment 20000234 PARAMETER Experiment Name: At_Siliques_P Parameter: Plant Line Value: WS
  misc_feature: MA Experiment 20000234 PARAMETER Experiment Name: At_Siliques_P Parameter: Tissue Value: Less Than 5mm Siliques vs. Whole Plant
  misc_feature: MA Experiment ID: 20000264 Result: Down-regulated in Transcription
  misc_feature: MA Experiment 20000264 PARAMETER Experiment Name: At_Open_Flower_P Parameter: Age (day) Value: 21
  misc_feature: MA Experiment 20000264 PARAMETER Experiment Name: At_Open_Flower_P Parameter: Plant Line Value: WS
  misc_feature: MA Experiment 20000264 PARAMETER Experiment Name: At_Open_Flower_P Parameter: Tissue Value: Open Flower vs. Whole Plant
  misc_feature: MA Experiment ID: 20000265 Result: Down-regulated in Transcription
  misc_feature: MA Experiment 20000265 PARAMETER Experiment Name: At_Open_Flower_P Parameter: Age (day) Value: 21
  misc_feature: MA Experiment 20000265 PARAMETER Experiment Name: At_Open_Flower_P Parameter: Plant Line Value: WS
  misc_feature: MA Experiment 20000265 PARAMETER Experiment Name: At_Open_Flower_P Parameter: Tissue Value: Closed Flower vs. Whole Plant
  misc_feature: MA Experiment ID: 20000286 Result: Down-regulated in Transcription
  misc_feature: MA Experiment 20000286 PARAMETER Experiment Name: At_Open_Flower_P Parameter: Age (day) Value: 21
  misc_feature: MA Experiment 20000286 PARAMETER Experiment Name: At_Open_Flower_P Parameter: Plant Line Value: WS
  misc_feature: MA Experiment 20000286 PARAMETER Experiment Name: At_Open_Flower_P Parameter: Tissue Value: Half Open vs. Whole Plant
  misc_feature: MA Experiment ID: 20000438 Result: Down-regulated in Transcription
  misc_feature: MA Experiment 20000438 PARAMETER Experiment Name: At_Shoots__P Parameter: Age (day) Value: 14
  misc_feature: MA Experiment 20000438 PARAMETER Experiment Name: At_Shoots__P Parameter: Tissue Value: Shoots vs. Whole Plant
  misc_feature: MA Experiment ID: 20000439 Result: Down-regulated in Transcription
  misc_feature: MA Experiment 20000439 PARAMETER Experiment Name: At_Roots__P Parameter: Age (day) Value: 14 vs. 21
  misc_feature: MA Experiment 20000439 PARAMETER Experiment Name: At_Roots__P Parameter: Organism Value: A. thaliana
  misc_feature: MA Experiment 20000439 PARAMETER Experiment Name: At_Roots__P Parameter: Tissue Value: Roots vs. Whole Plant
  misc_feature: MA Experiment ID: 20000495 Result: Up-regulated in Transcription
  misc_feature: MA Experiment 20000495 PARAMETER Experiment Name: At_Guard_Cells_P Parameter: Harvest Date Value: 8/2/2002
  misc_feature: MA Experiment 20000495 PARAMETER Experiment Name: At_Guard_Cells_P Parameter: Organism Value: A. thaliana
  misc_feature: MA Experiment 20000495 PARAMETER Experiment Name: At_Guard_Cells_P Parameter: Tissue Value: Guard Cells vs. Leaves
  misc_feature: MA Experiment ID: 20000527 Result: Down-regulated in Transcription
  misc_feature: MA Experiment 20000527 PARAMETER Experiment Name: At_10percent_PEG_P Parameter: Age (day) Value: 20
  misc_feature: MA Experiment 20000527 PARAMETER Experiment Name: At_10percent_PEG_P Parameter: Organism Value: A. thaliana
  misc_feature: MA Experiment 20000527 PARAMETER Experiment Name: At_10percent_PEG_P Parameter: Plant Line Value: WS
  misc_feature: MA Experiment 20000527 PARAMETER Experiment Name: At_10percent_PEG_P Parameter: Timepoint (day) Value: 20
  misc_feature: MA Experiment 20000527 PARAMETER Experiment Name: At_10percent_PEG_P Parameter: Tissue Value: Whole Plant
  misc_feature: MA Experiment 20000527 PARAMETER Experiment Name: At_10percent_PEG_P Parameter: Treatment Value: 10percent PEG vs. No Treatment
  misc_feature: MA Experiment ID: 20000794 Result: Down-regulated in Transcription
  misc_feature: MA Experiment 20000794 PARAMETER Experiment Name: At_Petals_P Parameter: Age (day) Value: 23-25 days
  misc_feature: MA Experiment 20000794 PARAMETER Experiment Name: At_Petals_P Parameter: Plant Line Value: WS
  misc_feature: MA Experiment 20000794 PARAMETER Experiment Name: At_Petals_P Parameter: Tissue Value: Petals vs. Whole plant
  misc_feature: MA Experiment ID: 20001248 Result: Down-regulated in Transcription
  misc_feature: MA Experiment 20001248 PARAMETER Experiment Name: At_Far-red-induction_P Parameter: Age (day) Value: 7
  misc_feature: MA Experiment 20001248 PARAMETER Experiment Name: At_Far-red-induction_P Parameter: Light Value: Far-red vs. White
  misc_feature: MA Experiment 20001248 PARAMETER Experiment Name: At_Far-red-induction_P Parameter: Organism Value: A. thaliana
  misc_feature: MA Experiment 20001248 PARAMETER Experiment Name: At_Far-red-induction_P Parameter: Plant Line Value: Columbia
  misc_feature: MA Experiment 20001248 PARAMETER Experiment Name: At_Far-red-induction_P Parameter: Timepoint (hr) Value: 4
  misc_feature: MA Experiment 20001248 PARAMETER Experiment Name: At_Far-red-induction_P Parameter: Tissue Value: Whole Plant
  misc_feature: MA Experiment ID: 20001451 Result: Up-regulated in Transcription
  misc_feature: MA Experiment 20001451 PARAMETER Experiment Name: At_Far-red-induction_P Parameter: Age (day) Value: 7
  misc_feature: MA Experiment 20001451 PARAMETER Experiment Name: At_Far-red-induction_P Parameter: Light Value: Far-red vs. White
  misc_feature: MA Experiment 20001451 PARAMETER Experiment Name: At_Far-red-induction_P Parameter: Organism Value: A. thaliana
  misc_feature: MA Experiment 20001451 PARAMETER Experiment Name: At_Far-red-induction_P Parameter: Plant Line Value: Columbia
  misc_feature: MA Experiment 20001451 PARAMETER Experiment Name: At_Far-red-induction_P Parameter: Timepoint (hr) Value: 24
  misc_feature: MA Experiment 20001451 PARAMETER Experiment Name: At_Far-red-induction_P Parameter: Tissue Value: Whole Plant
  misc_feature: MA Experiment ID: 20001556 Result: Down-regulated in Transcription
  misc_feature: MA Experiment 20001556 PARAMETER Experiment Name: At_Drought_Soil_Dry_P Parameter: Age (day) Value: 26
  misc_feature: MA Experiment 20001556 PARAMETER Experiment Name: At_Drought_Soil_Dry_P Parameter: Organism Value: A. thaliana
  misc_feature: MA Experiment 20001556 PARAMETER Experiment Name: At_Drought_Soil_Dry_P Parameter: Plant Line Value: WS
  misc_feature: MA Experiment 20001556 PARAMETER Experiment Name: At_Drought_Soil_Dry_P Parameter: Post Timepoint (hr) Value: None
  misc_feature: MA Experiment 20001556 PARAMETER Experiment Name: At_Drought_Soil_Dry_P Parameter: Post-Treatment Value: None
  misc_feature: MA Experiment 20001556 PARAMETER Experiment Name: At_Drought_Soil_Dry_P Parameter: Timepoint (day) Value: 12
  misc_feature: MA Experiment 20001556 PARAMETER Experiment Name: At_Drought_Soil_Dry_P Parameter: Treatment Value: Drought vs. No Drought
  misc_feature: MA Experiment ID: 20001557 Result: Down-regulated in Transcription
  misc_feature: MA Experiment 20001557 PARAMETER Experiment Name: At_Drought_Soil_Dry_P Parameter: Age (day) Value: 27
  misc_feature: MA Experiment 20001557 PARAMETER Experiment Name: At_Drought_Soil_Dry_P Parameter: Organism Value: A. thaliana
  misc_feature: MA Experiment 20001557 PARAMETER Experiment Name: At_Drought_Soil_Dry_P Parameter: Plant Line Value: WS
  misc_feature: MA Experiment 20001557 PARAMETER Experiment Name: At_Drought_Soil_Dry_P Parameter: Post Timepoint (hr) Value: 3
  misc_feature: MA Experiment 20001557 PARAMETER Experiment Name: At_Drought_Soil_Dry_P Parameter: Post-Treatment Value: Re-Water vs. No Drought
  misc_feature: MA Experiment 20001557 PARAMETER Experiment Name: At_Drought_Soil_Dry_P Parameter: Timepoint (day) Value: 13
  misc_feature: MA Experiment 20001557 PARAMETER Experiment Name: At_Drought_Soil_Dry_P Parameter: Treatment Value: Drought vs. No Drought
  misc_feature: MA Experiment ID: 20001558 Result: Down-regulated in Transcription
  misc_feature: MA Experiment 20001558 PARAMETER Experiment Name: At_Drought_Soil_Dry_P Parameter: Age (day) Value: 27
  misc_feature: MA Experiment 20001558 PARAMETER Experiment Name: At_Drought_Soil_Dry_P Parameter: Organism Value: A. thaliana
  misc_feature: MA Experiment 20001558 PARAMETER Experiment Name: At_Drought_Soil_Dry_P Parameter: Plant Line Value: WS
  misc_feature: MA Experiment 20001558 PARAMETER Experiment Name: At_Drought_Soil_Dry_P Parameter: Post Timepoint (hr) Value: 6
  misc_feature: MA Experiment 20001558 PARAMETER Experiment Name: At_Drought_Soil_Dry_P Parameter: Post-Treatment Value: Re-Water vs. No Drought
  misc_feature: MA Experiment 20001558 PARAMETER Experiment Name: At_Drought_Soil_Dry_P Parameter: Timepoint (day) Value: 13
  misc_feature: MA Experiment 20001558 PARAMETER Experiment Name: At_Drought_Soil_Dry_P Parameter: Treatment Value: Drought vs. No Drought
  misc_feature: MA Experiment ID: 20001757 Result: Up-regulated in Transcription
  misc_feature: MA Experiment 20001757 PARAMETER Experiment Name: At_50mM_NH4NO3_L-to-H_P Parameter: Timepoint (hr) Value: 6
  misc_feature: MA Experiment 20001757 PARAMETER Experiment Name: At_50mM_NH4NO3_L-to-H_P Parameter: Tissue Value: Leaf
  misc_feature: MA Experiment 20001757 PARAMETER Experiment Name: At_50mM_NH4NO3_L-to-H_P Parameter: Treatment Value: 50mM NH4NO3 vs 100mM Mannitol
  misc_feature: MA Experiment ID: 20001768 Result: Up-regulated in Transcription
  misc_feature: MA Experiment 20001768 PARAMETER Experiment Name: At_Far-red-enriched-adult_P Parameter: Age (day) Value: 28
  misc_feature: MA Experiment 20001768 PARAMETER Experiment Name: At_Far-red-enriched-adult_P Parameter: Light Value: Far-red enriched vs. White
  misc_feature: MA Experiment 20001768 PARAMETER Experiment Name: At_Far-red-enriched-adult_P Parameter: Organism Value: A. thaliana
  misc_feature: MA Experiment 20001768 PARAMETER Experiment Name: At_Far-red-enriched-adult_P Parameter: Plant Line Value: Columbia
  misc_feature: MA Experiment 20001768 PARAMETER Experiment Name: At_Far-red-enriched-adult_P Parameter: Timepoint (hr) Value: 1
  misc_feature: MA Experiment 20001768 PARAMETER Experiment Name: At_Far-red-enriched-adult_P Parameter: Tissue Value: Aerial
  misc_feature: MA Experiment ID: 20001773 Result: Up-regulated in Transcription
  misc_feature: MA Experiment 20001773 PARAMETER Experiment Name: At_Far-red-enriched-adult_P Parameter: Age (day) Value: 30
  misc_feature: MA Experiment 20001773 PARAMETER Experiment Name: At_Far-red-enriched-adult_P Parameter: Light Value: Far-red enriched vs. White
  misc_feature: MA Experiment 20001773 PARAMETER Experiment Name: At_Far-red-enriched-adult_P Parameter: Organism Value: A. thaliana
  misc_feature: MA Experiment 20001773 PARAMETER Experiment Name: At_Far-red-enriched-adult_P Parameter: Plant Line Value: Columbia
  misc_feature: MA Experiment 20001773 PARAMETER Experiment Name: At_Far-red-enriched-adult_P Parameter: Timepoint (hr) Value: 48
  misc_feature: MA Experiment 20001773 PARAMETER Experiment Name: At_Far-red-enriched-adult_P Parameter: Tissue Value: Aerial
  misc_feature: MA Experiment ID: 20001908 Result: Down-regulated in Transcription
  misc_feature: MA Experiment 20001908 PARAMETER Experiment Name: At_Drought_Reproduction_P Parameter: Age (day) Value: 40
  misc_feature: MA Experiment 20001908 PARAMETER Experiment Name: At_Drought_Reproduction_P Parameter: Organism Value: A. thaliana
  misc_feature: MA Experiment 20001908 PARAMETER Experiment Name: At_Drought_Reproduction_P Parameter: Plant Line Value: WS
  misc_feature: MA Experiment 20001908 PARAMETER Experiment Name: At_Drought_Reproduction_P Parameter: Timepoint (day) Value: 10
  misc_feature: MA Experiment 20001908 PARAMETER Experiment Name: At_Drought_Reproduction_P Parameter: Tissue Value: Siliques
  misc_feature: MA Experiment 20001908 PARAMETER Experiment Name: At_Drought_Reproduction_P Parameter: Treatment Value: Drought vs. No Drought
  misc_feature: MA Experiment ID: 20001911 Result: Down-regulated in Transcription
  misc_feature: MA Experiment 20001911 PARAMETER Experiment Name: At_Drought_Reproduction_P Parameter: Age (day) Value: 40
  misc_feature: MA Experiment 20001911 PARAMETER Experiment Name: At_Drought_Reproduction_P Parameter: Organism Value: A. thaliana
  misc_feature: MA Experiment 20001911 PARAMETER Experiment Name: At_Drought_Reproduction_P Parameter: Plant Line Value: WS
  misc_feature: MA Experiment 20001911 PARAMETER Experiment Name: At_Drought_Reproduction_P Parameter: Timepoint (day) Value: 10
  misc_feature: MA Experiment 20001911 PARAMETER Experiment Name: At_Drought_Reproduction_P Parameter: Tissue Value: Flowers
  misc_feature: MA Experiment 20001911 PARAMETER Experiment Name: At_Drought_Reproduction_P Parameter: Treatment Value: Drought vs. No Drought
acacacaacaactacaacaatggctacttcaagaacattcattttctctaatctcttcatcttcttcctcgttatagccactacttatggtcaggctccagctccaggcccttcaggtccaacgaacataaccgcaatcctagaaaaggctggtcaattcacattgttcataagacttcttaaaagcactcaagcctcagaccaaatcaacactcagctcaattcttcctcgagtaatggcttaaccgtgtttgccccgactgataacgccttcaacagcctcaaatccggaaccttaaactcattgtctgaccaacaaaaagttcagcttgttcagttccatgtcttacctacactcataaccatgcctcagtttcaaaccgttagtaaccctttacgcacgcaagctggagatggccaaaacggtaaattccctcttaacatcactagctccggtaaccaagttaacatcaccactggagttgtcagcgccaccgtggctaactctgtctacagcgataagcagctggccgtttatcaggttgatcaagttttgctgccattagccatgtttggatcaagcgtggctcctgctccggcccctgagaaaggcggctctgtttcaaaaggctcagcttccggtggcgatgatggaggagattctactgattcatctgatgcagagaggactggattcgggtttgggatcagaatcactaccgttgcagccattgctgcttcttcttctctgtggatataactcgagagagagcttttcttgagtctccacatttggaattttaagaataacgagagctttaagtttttgttgtactttgagattgttttatagatgtgttattacgtgtgattgttttgattaagattgcacacaactttttttgatg

SEQ ID NO: 29684 - protein, 252 aa, Arabidopsis thaliana
  peptide (1)..(252): Ceres Seq. ID no. 12333390
  misc_feature (40)..(187): Pfam Name: Fasciclin domain Pfam Description: Fasciclin domain
  misc_feature (7)..(236): Homolog of NCBI NO: 18379157 NR Description: fasciclin-like arabinogalactan-protein (FLA9)
  misc_feature (33)..(246): Homolog of NCBI NO: 34910950 NR Description: putative arabinogalactan-like protein
  misc_feature (13)..(213): Homolog of NCBI NO: 5919185 NR Description: arabinogalactan protein Pop14A9 [Populus x
  misc_feature (32)..(252): Homolog of NCBI NO: 34896012 NR Description: EST D25138(R3286) corresponds to a region of the gene.~Similar to Pinus taeda arabinogalactan-like protein
  misc_feature (18)..(228): Homolog of NCBI NO: 21553590 NR Description: arabinogalactan protein-like [Arabidopsis
  misc_feature (18)..(227): Homolog of NCBI NO: 15294288 NR Description: AT5g60490/muf9_140 [Arabidopsis thaliana]
  misc_feature (18)..(228): Homolog of NCBI NO: 15239344 NR Description: fasciclin-like arabinogalactan-protein (FLA12)
  misc_feature (18)..(242): Homolog of NCBI NO: 30841338 NR Description: arabinogalactan protein [Gossypium hirsutum]
  misc_feature (7)..(252): Homolog of NCBI NO: 21553523 NR Description: arabinogalactan protein-like [Arabidopsis
  misc_feature (7)..(252): Homolog of NCBI NO: 15242651 NR Description: fasciclin-like arabinogalactan-protein (FLA11)
HTTTTTMATSRTFIFSNLFIFFLVIATTYGQAPAPGPSGPTNITAILEKAGQFTLFIRLLKSTQASDQINTQLNSSSSNGLTVFAPTDNAFNSLKSGTLNSLSDQQKVQLVQFHVLPTLITMPQFQTVSNPLRTQAGDGQNGKFPLNITSSGNQVNITTGVVSATVANSVYSDKQLAVYQVDQVLLPLAMFGSSVAPAPAPEKGGSVSKGSASGGDDGGDSTDSSDAERTGFGFGIRITTVAAIAASSSLWI

SEQ ID NO: 29685 - protein, 246 aa, Arabidopsis thaliana
  peptide (1)..(246): Ceres Seq. ID no. 12333391
  misc_feature (34)..(181): Pfam Name: Fasciclin domain Pfam Description: Fasciclin domain
  misc_feature (1)..(230): Homolog of NCBI NO: 18379157 NR Description: fasciclin-like arabinogalactan-protein (FLA9)
  misc_feature (27)..(240): Homolog of NCBI NO: 34910950 NR Description: putative arabinogalactan-like protein
  misc_feature (7)..(207): Homolog of NCBI NO: 5919185 NR Description: arabinogalactan protein Pop14A9 [Populus x
  misc_feature (26)..(246): Homolog of NCBI NO: 34896012 NR Description: EST D25138(R3286) corresponds to a region of the gene.~Similar to Pinus taeda arabinogalactan-like protein
  misc_feature (12)..(222): Homolog of NCBI NO: 21553590 NR Description: arabinogalactan protein-like [Arabidopsis
  misc_feature (12)..(221): Homolog of NCBI NO: 15294288 NR Description: AT5g60490/muf9_140 [Arabidopsis thaliana]
  misc_feature (12)..(222): Homolog of NCBI NO: 15239344 NR Description: fasciclin-like arabinogalactan-protein (FLA12)
  misc_feature (12)..(236): Homolog of NCBI NO: 30841338 NR Description: arabinogalactan protein [Gossypium hirsutum]
  misc_feature (1)..(246): Homolog of NCBI NO: 21553523 NR Description: arabinogalactan protein-like [Arabidopsis
  misc_feature (1)..(246): Homolog of NCBI NO: 15242651 NR Description: fasciclin-like arabinogalactan-protein (FLA11)
MATSRTFIFSNLFIFFLVIATTYGQAPAPGPSGPTNITAILEKAGQFTLFIRLLKSTQASDQINTQLNSSSSNGLTVFAPTDNAFNSLKSGTLNSLSDQQKVQLVQFHVLPTLITMPQFQTVSNPLRTQAGDGQNGKFPLNITSSGNQVNITTGVVSATVANSVYSDKQLAVYQVDQVLLPLAMFGSSVAPAPAPEKGGSVSKGSASGGDDGGDSTDSSDAERTGFGFGIRITTVAAIAASSSLWI

SEQ ID NO: 29686 - protein, 131 aa, Arabidopsis thaliana
  peptide (1)..(131): Ceres Seq. ID no. 12333392
  misc_feature (1)..(66): Pfam Name: Fasciclin domain Pfam Description: Fasciclin domain
  misc_feature (1)..(115): Homolog of NCBI NO: 18379157 NR Description: fasciclin-like arabinogalactan-protein (FLA9)
  misc_feature (1)..(125): Homolog of NCBI NO: 34910950 NR Description: putative arabinogalactan-like protein
  misc_feature (1)..(92): Homolog of NCBI NO: 5919185 NR Description: arabinogalactan protein Pop14A9 [Populus x
  misc_feature (1)..(131): Homolog of NCBI NO: 34896012 NR Description: EST D25138(R3286) corresponds to a region of the gene.~Similar to Pinus taeda arabinogalactan-like protein
  misc_feature (1)..(107): Homolog of NCBI NO: 21553590 NR Description: arabinogalactan protein-like [Arabidopsis
  misc_feature (1)..(106): Homolog of NCBI NO: 15294288 NR Description: AT5g60490/muf9_140 [Arabidopsis thaliana]
  misc_feature (1)..(107): Homolog of NCBI NO: 15239344 NR Description: fasciclin-like arabinogalactan-protein (FLA12)
  misc_feature (1)..(121): Homolog of NCBI NO: 30841338 NR Description: arabinogalactan protein [Gossypium hirsutum]
  misc_feature (1)..(131): Homolog of NCBI NO: 21553523 NR Description: arabinogalactan protein-like [Arabidopsis
  misc_feature (1)..(131): Homolog of NCBI NO: 15242651 NR Description: fasciclin-like arabinogalactan-protein (FLA11)
MPQFQTVSNPLRTQAGDGQNGKFPLNITSSGNQVNITTGVVSATVANSVYSDKQLAVYQVDQVLLPLAMFGSSVAPAPAPEKGGSVSKGSASGGDDGGDSTDSSDAERTGFGFGIRITTVAAIAASSSLWI

SEQ ID NO: 29687 - DNA, 1135 bp, Arabidopsis thaliana
  misc_feature (1)..(1135): Ceres Seq. ID no. 12559930
  misc_feature: MA Experiment ID: 20000070 Result: Down-regulated in Transcription
  misc_feature: MA Experiment 20000070 PARAMETER Experiment Name: At_100uM_ABA_Mutants_cDNA_P Parameter: Plant Line Value: CS24
  misc_feature: MA Experiment 20000070 PARAMETER Experiment Name: At_100uM_ABA_Mutants_cDNA_P Parameter: Timepoint (hr) Value: 6
  misc_feature: MA Experiment 20000070 PARAMETER Experiment Name: At_100uM_ABA_Mutants_cDNA_P Parameter: Tissue Value: Aerial
  misc_feature: MA Experiment 20000070 PARAMETER Experiment Name: At_100uM_ABA_Mutants_cDNA_P Parameter: Treatment Value: 100uM ABA vs. No Treatment
  misc_feature: MA Experiment ID: 20000071 Result: Down-regulated in Transcription
  misc_feature: MA Experiment 20000071 PARAMETER Experiment Name: At_100uM_ABA_Mutants_cDNA_P Parameter: Plant Line Value: CS8104
  misc_feature: MA Experiment 20000071 PARAMETER Experiment Name: At_100uM_ABA_Mutants_cDNA_P Parameter: Timepoint (hr) Value: 6
  misc_feature: MA Experiment 20000071 PARAMETER Experiment Name: At_100uM_ABA_Mutants_cDNA_P Parameter: Tissue Value: Aerial
  misc_feature: MA Experiment 20000071 PARAMETER Experiment Name: At_100uM_ABA_Mutants_cDNA_P Parameter: Treatment Value: 100uM ABA vs. No Treatment
  misc_feature: MA Experiment ID: 20000086 Result: Down-regulated in Transcription
  misc_feature: MA Experiment 20000086 PARAMETER Experiment Name: At_100uM_ABA_Mutants_cDNA_P Parameter: Plant Line Value: CS22
  misc_feature: MA Experiment 20000086 PARAMETER Experiment Name: At_100uM_ABA_Mutants_cDNA_P Parameter: Timepoint (hr) Value: 6
  misc_feature: MA Experiment 20000086 PARAMETER Experiment Name: At_100uM_ABA_Mutants_cDNA_P Parameter: Tissue Value: Aerial
  misc_feature: MA Experiment 20000086 PARAMETER Experiment Name: At_100uM_ABA_Mutants_cDNA_P Parameter: Treatment Value: 100uM ABA vs. No Treatment
  misc_feature: MA Experiment ID: 20000087 Result: Down-regulated in Transcription
  misc_feature: MA Experiment 20000087 PARAMETER Experiment Name: At_100uM_ABA_Mutants_cDNA_P Parameter: Plant Line Value: WS
  misc_feature: MA Experiment 20000087 PARAMETER Experiment Name: At_100uM_ABA_Mutants_cDNA_P Parameter: Timepoint (hr) Value: 6
  misc_feature: MA Experiment 20000087 PARAMETER Experiment Name: At_100uM_ABA_Mutants_cDNA_P Parameter: Tissue Value: Aerial
  misc_feature: MA Experiment 20000087 PARAMETER Experiment Name: At_100uM_ABA_Mutants_cDNA_P Parameter: Treatment Value: 100uM ABA vs. No Treatment
  misc_feature: MA Experiment ID: 20000117 Result: Down-regulated in Transcription
  misc_feature: MA Experiment 20000117 PARAMETER Experiment Name: At_100uM_ABA_Mutants_cDNA_P Parameter: Plant Line Value: Columbia
  misc_feature: MA Experiment 20000117 PARAMETER Experiment Name: At_100uM_ABA_Mutants_cDNA_P Parameter: Timepoint (hr) Value: 6
  misc_feature: MA Experiment 20000117 PARAMETER Experiment Name: At_100uM_ABA_Mutants_cDNA_P Parameter: Tissue Value: Aerial
  misc_feature: MA Experiment 20000117 PARAMETER Experiment Name: At_100uM_ABA_Mutants_cDNA_P Parameter: Treatment Value: 100uM ABA vs. No Treatment
  misc_feature: MA Experiment ID: 20000180 Result: Up-regulated in Transcription
  misc_feature: MA Experiment 20000180 PARAMETER Experiment Name: At_Germinating_Seeds_P Parameter: Age (hr) Value: 24 vs. 0
  misc_feature: MA Experiment 20000180 PARAMETER Experiment Name: At_Germinating_Seeds_P Parameter: Tissue Value: Germinating Seeds
  misc_feature: MA Experiment ID: 20000185 Result: Down-regulated in Transcription
  misc_feature: MA Experiment 20000185 PARAMETER Experiment Name: At_Roots__P Parameter: Age (day) Value: 7 vs. 21
  misc_feature: MA Experiment 20000185 PARAMETER Experiment Name: At_Roots__P Parameter: Organism Value: A. thaliana
  misc_feature: MA Experiment 20000185 PARAMETER Experiment Name: At_Roots__P Parameter: Tissue Value: Roots vs. Whole Plant
  misc_feature: MA Experiment ID: 20000234 Result: Up-regulated in Transcription
  misc_feature: MA Experiment 20000234 PARAMETER Experiment Name: At_Siliques_P Parameter: Age (day) Value: 21
  misc_feature: MA Experiment 20000234 PARAMETER Experiment Name: At_Siliques_P Parameter: Organism Value: A. thaliana
  misc_feature: MA Experiment 20000234 PARAMETER Experiment Name: At_Siliques_P Parameter: Plant Line Value: WS
  misc_feature: MA Experiment 20000234 PARAMETER Experiment Name: At_Siliques_P Parameter: Tissue Value: Less Than 5mm Siliques vs. Whole Plant
  misc_feature: MA Experiment ID: 20000436 Result: Down-regulated in Transcription
  misc_feature: MA Experiment 20000436 PARAMETER Experiment Name: At_Drought_P Parameter: Age (day) Value: 7
  misc_feature: MA Experiment 20000436 PARAMETER Experiment Name: At_Drought_P Parameter: Organism Value: A. thaliana
  misc_feature: MA Experiment 20000436 PARAMETER Experiment Name: At_Drought_P Parameter: Plant Line Value: WS
  misc_feature: MA Experiment 20000436 PARAMETER Experiment Name: At_Drought_P Parameter: Timepoint (hr) Value: 12
  misc_feature: MA Experiment 20000436 PARAMETER Experiment Name: At_Drought_P Parameter: Tissue Value: Whole Plant
  misc_feature: MA Experiment 20000436 PARAMETER Experiment Name: At_Drought_P Parameter: Treatment Value: Drought vs. No Drought
  misc_feature: MA Experiment ID: 20000437 Result: Down-regulated in Transcription
  misc_feature: MA Experiment 20000437 PARAMETER Experiment Name: At_Drought_P Parameter: Age (day) Value: 8
  misc_feature: MA Experiment 20000437 PARAMETER Experiment Name: At_Drought_P Parameter: Organism Value: A. thaliana
  misc_feature: MA Experiment 20000437 PARAMETER Experiment Name: At_Drought_P Parameter: Plant Line Value: WS
  misc_feature: MA Experiment 20000437 PARAMETER Experiment Name: At_Drought_P Parameter: Timepoint (hr) Value: 24
  misc_feature: MA Experiment 20000437 PARAMETER Experiment Name: At_Drought_P Parameter: Tissue Value: Whole Plant
  misc_feature: MA Experiment 20000437 PARAMETER Experiment Name: At_Drought_P Parameter: Treatment Value: Drought vs. No Drought
  misc_feature: MA Experiment ID: 20000438 Result: Up-regulated in Transcription
  misc_feature: MA Experiment 20000438 PARAMETER Experiment Name: At_Shoots__P Parameter: Age (day) Value: 14
  misc_feature: MA Experiment 20000438 PARAMETER Experiment Name: At_Shoots__P Parameter: Tissue Value: Shoots vs. Whole Plant
  misc_feature: MA Experiment ID: 20000439 Result: Down-regulated in Transcription
  misc_feature: MA Experiment 20000439 PARAMETER Experiment Name: At_Roots__P Parameter: Age (day) Value: 14 vs. 21
  misc_feature: MA Experiment 20000439 PARAMETER Experiment Name: At_Roots__P Parameter: Organism Value: A. thaliana
  misc_feature: MA Experiment 20000439 PARAMETER Experiment Name: At_Roots__P Parameter: Tissue Value: Roots vs. Whole Plant
  misc_feature: MA Experiment ID: 20000794 Result: Down-regulated in Transcription
  misc_feature: MA Experiment 20000794 PARAMETER Experiment Name: At_Petals_P Parameter: Age (day) Value: 23-25 days
  misc_feature: MA Experiment 20000794 PARAMETER Experiment Name: At_Petals_P Parameter: Plant Line Value: WS
  misc_feature: MA Experiment 20000794 PARAMETER Experiment Name: At_Petals_P Parameter: Tissue Value: Petals vs. Whole plant
  misc_feature: MA Experiment ID: 20001450 Result: Down-regulated in Transcription
  misc_feature: MA Experiment 20001450 PARAMETER Experiment Name: At_Far-red-induction_P Parameter: Age (day) Value: 7
  misc_feature: MA Experiment 20001450 PARAMETER Experiment Name: At_Far-red-induction_P Parameter: Light Value: Far-red vs. White
  misc_feature: MA Experiment 20001450 PARAMETER Experiment Name: At_Far-red-induction_P Parameter: Organism Value: A. thaliana
  misc_feature: MA Experiment 20001450 PARAMETER Experiment Name: At_Far-red-induction_P Parameter: Plant Line Value: Columbia
  misc_feature: MA Experiment 20001450 PARAMETER Experiment Name: At_Far-red-induction_P Parameter: Timepoint (hr) Value: 8
  misc_feature: MA Experiment 20001450 PARAMETER Experiment Name: At_Far-red-induction_P Parameter: Tissue Value: Whole Plant
  misc_feature: MA Experiment ID: 20001757 Result: Up-regulated in Transcription
  misc_feature: MA Experiment 20001757 PARAMETER Experiment Name: At_50mM_NH4NO3_L-to-H_P Parameter: Timepoint (hr) Value: 6
  misc_feature: MA Experiment 20001757 PARAMETER Experiment Name: At_50mM_NH4NO3_L-to-H_P Parameter: Tissue Value: Leaf
  misc_feature: MA Experiment 20001757 PARAMETER Experiment Name: At_50mM_NH4NO3_L-to-H_P Parameter: Treatment Value: 50mM NH4NO3 vs 100mM Mannitol
  misc_feature: MA Experiment ID: 20001905 Result: Down-regulated in Transcription
  misc_feature: MA Experiment 20001905 PARAMETER Experiment Name: At_Drought_Reproduction_P Parameter: Age (day) Value: 40
  misc_feature: MA Experiment 20001905 PARAMETER Experiment Name: At_Drought_Reproduction_P Parameter: Organism Value: A. thaliana
  misc_feature: MA Experiment 20001905 PARAMETER Experiment Name: At_Drought_Reproduction_P Parameter: Plant Line Value: WS
  misc_feature: MA Experiment 20001905 PARAMETER Experiment Name: At_Drought_Reproduction_P Parameter: Timepoint (day) Value: 10
  misc_feature: MA Experiment 20001905 PARAMETER Experiment Name: At_Drought_Reproduction_P Parameter: Tissue Value: Rosettes
  misc_feature: MA Experiment 20001905 PARAMETER Experiment Name: At_Drought_Reproduction_P Parameter: Treatment Value: Drought vs. No Drought
  misc_feature: MA Experiment ID: 20001906 Result: Down-regulated in Transcription
  misc_feature: MA Experiment 20001906 PARAMETER Experiment Name: At_Drought_Reproduction_P Parameter: Age (day) Value: 35
  misc_feature: MA Experiment 20001906 PARAMETER Experiment Name: At_Drought_Reproduction_P Parameter: Organism Value: A. thaliana
  misc_feature: MA Experiment 20001906 PARAMETER Experiment Name: At_Drought_Reproduction_P Parameter: Plant Line Value: WS
  misc_feature: MA Experiment 20001906 PARAMETER Experiment Name: At_Drought_Reproduction_P Parameter: Timepoint (day) Value: 5
  misc_feature: MA Experiment 20001906 PARAMETER Experiment Name: At_Drought_Reproduction_P Parameter: Tissue Value: Siliques
  misc_feature: MA Experiment 20001906 PARAMETER Experiment Name: At_Drought_Reproduction_P Parameter: Treatment Value: Drought vs. No Drought
  misc_feature: MA Experiment ID: 20001911 Result: Down-regulated in Transcription
  misc_feature: MA Experiment 20001911 PARAMETER Experiment Name: At_Drought_Reproduction_P Parameter: Age (day) Value: 40
  misc_feature: MA Experiment 20001911 PARAMETER Experiment Name: At_Drought_Reproduction_P Parameter: Organism Value: A. thaliana
  misc_feature: MA Experiment 20001911 PARAMETER Experiment Name: At_Drought_Reproduction_P Parameter: Plant Line Value: WS
  misc_feature: MA Experiment 20001911 PARAMETER Experiment Name: At_Drought_Reproduction_P Parameter: Timepoint (day) Value: 10
  misc_feature: MA Experiment 20001911 PARAMETER Experiment Name: At_Drought_Reproduction_P Parameter: Tissue Value: Flowers
  misc_feature: MA Experiment 20001911 PARAMETER Experiment Name: At_Drought_Reproduction_P Parameter: Treatment Value: Drought vs. No Drought
acgacactcgcaacttcttccttatcgacacctacactctcctgctacaatggcgactttcctaacaaatgttgtttcaatcaaacctacaatcttctcattccagtccgaatccttcactcctttgcatacacgggtcaatgtattctcctcgaaaccctttccttctctcgctggaactttctcccggagctctagaacgagattcattccttatgctgtaacggagacggaagaaaaacccgccgctttggaccctagttcagaagctgccaggcgtgtgtatatcggtaacatacccaggacggtgaccaatgagcagctcactaaacttgttgaagaacacggtgctgttgaaaaagttcaggtgatgtatgataagtattcaggaagaagccgtcgatttgggtttgctacaatgaaatcagttgaagatgctaatgctgtggttgagaaattgaatggcaataccgttgaagggcgtgagataaaggttaacattacagagaaacctatagcatcatcacctgatttatcagttcttcagtctgaggattcagcatttgtagatagcccttacaaagtgtatgttgggaatctagcaaagactgttacaaaagagatgcttgagaatttgttttctgagaaagggaaagtagtaagtgctaaggtttcaagagtacctggaacttccaaatccaccgggtttggattcgttacgttttcttctgaagaagatgtggaagcagccattgttgctcttaacaattcgttgctggaaggacagaagattcgggtgaataaggcttagcctattggatcataaagaatgtgaaaagaatcgctttgaagagtttttgtaatgcaaatcattagagcttagtgtatcatcttgtattcattctaagttgaaaatgaaaccatatcttttcaaaagcttatagttgtggtaatcttgtttctaggcagtgtaaacagagaactccaatgacatgaacaagtcatgctacatccaattcagaggtagggatgataatgaagatccccaagntaaatttatctccaccaagtttcctttccataaatgtatcatacaatgtnaaantgctacttgtgtgacttgtgagctttggcc

SEQ ID NO: 29688 - protein, 269 aa, Arabidopsis thaliana; identical to SEQ ID NO: 24385
  peptide (1)..(269): Ceres Seq. ID no. 12559931
  misc_feature (94)..(165): Pfam Name: RNA recognition motif. (a.k.a. RRM, RBD, or RNP domain) Pfam Description: RNA recognition motif. (a.k.a. RRM, RBD, or RNP
  misc_feature (94)..(165): Pfam Name: RNA recognition motif. (a.k.a. RRM, RBD, or RNP domain) Pfam Description: RNA recognition motif. (a.k.a. RRM, RBD, or RNP
  misc_feature (76)..(269): Homolog of NCBI NO: 1076509 NR Description: RNA-binding protein RNP1 precursor - kidney bean
  misc_feature (76)..(269): Homolog of NCBI NO: 7446342 NR Description: RNA-binding protein precursor, 33K - wood tobacco
  misc_feature (76)..(269): Homolog of NCBI NO: 681912 NR Description: cp33 [Arabidopsis thaliana]
  misc_feature (66)..(269): Homolog of NCBI NO: 34913270 NR Description: putative ribonucleoprotein
  misc_feature (76)..(269): Homolog of NCBI NO: 17064758 NR Description: ubiquitin / ribosomal protein CEP52 [Arabidopsis
  misc_feature (76)..(269): Homolog of NCBI NO: 1076509 NR Description: RNA-binding protein RNP1 precursor - kidney bean
  misc_feature (76)..(269): Homolog of NCBI NO: 681912 NR Description: cp33 [Arabidopsis thaliana]
  misc_feature (76)..(269): Homolog of NCBI NO: 17064758 NR Description: ubiquitin / ribosomal protein CEP52 [Arabidopsis
  misc_feature (17)..(269): Homolog of NCBI NO: 30693595 NR Description: RNA recognition motif (RRM)-containing protein
  misc_feature (17)..(266): Homolog of NCBI NO: 11357772 NR Description: hypothetical protein F4F15.260 - Arabidopsis
  misc_feature (26)..(269): Homolog of NCBI NO: 7578881 NR Description: plastid-specific ribosomal protein 2 precursor
  misc_feature (18)..(269): Homolog of NCBI NO: 18921322 NR Description: putative ribonucleoprotein [Oryza sativa]
  misc_feature (76)..(269): Homolog of NCBI NO: 15231200 NR Description: chloroplast RNA-binding protein cp33
  misc_feature (66)..(269): Homolog of NCBI NO: 34913270 NR Description: putative ribonucleoprotein
  misc_feature (76)..(269): Homolog of NCBI NO: 7446342 NR Description: RNA-binding protein precursor, 33K - wood tobacco
  misc_feature (76)..(269): Homolog of NCBI NO: 15231200 NR Description: chloroplast RNA-binding protein cp33
  misc_feature (18)..(269): Homolog of NCBI NO: 18921322 NR Description: putative ribonucleoprotein [Oryza sativa]
  misc_feature (26)..(269): Homolog of NCBI NO: 7578881 NR Description: plastid-specific ribosomal protein 2 precursor
  misc_feature (17)..(266): Homolog of NCBI NO: 11357772 NR Description: hypothetical protein F4F15.260 - Arabidopsis
  misc_feature (17)..(269): Homolog of NCBI NO: 30693595 NR Description: RNA recognition motif (RRM)-containing protein

SEQ ID NO: 29689 - protein, 253 aa, Arabidopsis thaliana; identical to SEQ ID NO: 24386
  peptide (1)..(253): Ceres Seq. ID no. 12559932
  misc_feature (78)..(149): Pfam Name: RNA recognition motif. (a.k.a. RRM, RBD, or RNP domain) Pfam Description: RNA recognition motif. (a.k.a. RRM, RBD, or RNP
  misc_feature (78)..(149): Pfam Name: RNA recognition motif. (a.k.a. RRM, RBD, or RNP domain) Pfam Description: RNA recognition motif. (a.k.a. RRM, RBD, or RNP
  misc_feature (60)..(253): Homolog of NCBI NO: 1076509 NR Description: RNA-binding protein RNP1 precursor - kidney bean
  misc_feature (60)..(253): Homolog of NCBI NO: 7446342 NR Description: RNA-binding protein precursor, 33K - wood tobacco
  misc_feature (60)..(253): Homolog of NCBI NO: 681912 NR Description: cp33 [Arabidopsis thaliana]
  misc_feature (50)..(253): Homolog of NCBI NO: 34913270 NR Description: putative ribonucleoprotein
  misc_feature (60)..(253): Homolog of NCBI NO: 17064758 NR Description: ubiquitin / ribosomal protein CEP52 [Arabidopsis
  misc_feature (60)..(253): Homolog of NCBI NO: 1076509 NR Description: RNA-binding protein RNP1 precursor - kidney bean
  misc_feature (60)..(253): Homolog of NCBI NO: 681912 NR Description: cp33 [Arabidopsis thaliana]
  misc_feature (60)..(253): Homolog of NCBI NO: 17064758 NR Description: ubiquitin / ribosomal protein CEP52 [Arabidopsis
  misc_feature (1)..(253): Homolog of NCBI NO: 30693595 NR Description: RNA recognition motif (RRM)-containing protein
  misc_feature (1)..(250): Homolog of NCBI NO: 11357772 NR Description: hypothetical protein F4F15.260 - Arabidopsis
  misc_feature (10)..(253): Homolog of NCBI NO: 7578881 NR Description: plastid-specific ribosomal protein 2 precursor
  misc_feature (2)..(253): Homolog of NCBI NO: 18921322 NR Description: putative ribonucleoprotein [Oryza sativa]
  misc_feature (60)..(253): Homolog of NCBI NO: 15231200 NR Description: chloroplast RNA-binding protein cp33
  misc_feature (50)..(253): Homolog of NCBI NO: 34913270 NR Description: putative ribonucleoprotein
  misc_feature (60)..(253): Homolog of NCBI NO: 7446342 NR Description: RNA-binding protein precursor, 33K - wood tobacco
  misc_feature (60)..(253): Homolog of NCBI NO: 15231200 NR Description: chloroplast RNA-binding protein cp33
  misc_feature (2)..(253): Homolog of NCBI NO: 18921322 NR Description: putative ribonucleoprotein [Oryza sativa]
  misc_feature (10)..(253): Homolog of NCBI NO: 7578881 NR Description: plastid-specific ribosomal protein 2 precursor
  misc_feature (1)..(250): Homolog of NCBI NO: 11357772 NR Description: hypothetical protein F4F15.260 - Arabidopsis
  misc_feature (1)..(253): Homolog of NCBI NO: 30693595 NR Description: RNA recognition motif (RRM)-containing protein

SEQ ID NO: 29690 - protein, 146 aa, Arabidopsis thaliana; identical to SEQ ID NO: 24387
  peptide (1)..(146): Ceres Seq. ID no. 12559933
  misc_feature (72)..(143): Pfam Name: RNA recognition motif. (a.k.a. RRM, RBD, or RNP domain) Pfam Description: RNA recognition motif. (a.k.a. RRM, RBD, or RNP
  misc_feature (72)..(143): Pfam Name: RNA recognition motif. (a.k.a. RRM, RBD, or RNP domain) Pfam Description: RNA recognition motif. (a.k.a. RRM, RBD, or RNP
  misc_feature (1)..(146): Homolog of NCBI NO: 1076509 NR Description: RNA-binding protein RNP1 precursor - kidney bean
  misc_feature (1)..(146): Homolog of NCBI NO: 7446342 NR Description: RNA-binding protein precursor, 33K - wood tobacco
  misc_feature (1)..(146): Homolog of NCBI NO: 681912 NR Description: cp33 [Arabidopsis thaliana]
  misc_feature (1)..(146): Homolog of NCBI NO: 34913270 NR Description: putative ribonucleoprotein
  misc_feature (1)..(146): Homolog of NCBI NO: 17064758 NR Description: ubiquitin / ribosomal protein CEP52 [Arabidopsis
  misc_feature (1)..(146): Homolog of NCBI NO: 1076509 NR Description: RNA-binding protein RNP1 precursor - kidney bean
  misc_feature (1)..(146): Homolog of NCBI NO: 681912 NR Description: cp33 [Arabidopsis thaliana]
  misc_feature (1)..(146): Homolog of NCBI NO: 17064758 NR Description: ubiquitin / ribosomal protein CEP52 [Arabidopsis
  misc_feature (1)..(146): Homolog of NCBI NO: 30693595 NR Description: RNA recognition motif (RRM)-containing protein
  misc_feature (1)..(143): Homolog of NCBI NO: 11357772 NR Description: hypothetical protein F4F15.260 - Arabidopsis
  misc_feature (1)..(146): Homolog of NCBI NO: 7578881 NR Description: plastid-specific ribosomal protein 2 precursor
  misc_feature (1)..(146): Homolog of NCBI NO: 18921322 NR Description: putative ribonucleoprotein [Oryza sativa]
  misc_feature (1)..(146): Homolog of NCBI NO: 15231200 NR Description: chloroplast RNA-binding protein cp33
  misc_feature (1)..(146): Homolog of NCBI NO: 34913270 NR Description: putative ribonucleoprotein
  misc_feature (1)..(146): Homolog of NCBI NO: 7446342 NR Description: RNA-binding protein precursor, 33K - wood tobacco
  misc_feature (1)..(146): Homolog of NCBI NO: 15231200 NR Description: chloroplast RNA-binding protein cp33
  misc_feature (1)..(146): Homolog of NCBI NO: 18921322 NR Description: putative ribonucleoprotein [Oryza sativa]
  misc_feature (1)..(146): Homolog of NCBI NO: 7578881 NR Description: plastid-specific ribosomal protein 2 precursor
  misc_feature (1)..(143): Homolog of NCBI NO: 11357772 NR Description: hypothetical protein F4F15.260 - Arabidopsis
  misc_feature (1)..(146): Homolog of NCBI NO: 30693595 NR Description: RNA recognition motif (RRM)-containing protein

SEQ ID NO: 29691 - DNA, 684 bp, Arabidopsis thaliana; identical to SEQ ID NO: 24528
  misc_feature (1)..(684): Ceres Seq. ID no. 12332058
  misc_feature: MA Experiment ID: 108435 Result: Down-regulated in Transcription
  misc_feature: MA Experiment 108435 PARAMETER Experiment Name: At_stm_Mutants_cDNA_P Parameter: Plant Line Value: wt Landsburg vs stm
  misc_feature: MA Experiment 108435 PARAMETER Experiment Name: At_stm_Mutants_cDNA_P Parameter: Tissue Value: Shoot Apical Meristem Region
  misc_feature: MA Experiment ID: 108464 Result: Up-regulated in Transcription
  misc_feature: MA Experiment 108464 PARAMETER Experiment Name: At_Germinating_Seeds_cDNA_P Parameter: Age (day) Value: 4 vs. 0
  misc_feature: MA Experiment 108464 PARAMETER Experiment Name: At_Germinating_Seeds_cDNA_P Parameter: Tissue Value: Germinating Seeds
  misc_feature: MA Experiment ID: 108488 Result: Down-regulated in Transcription
  misc_feature: MA Experiment ID: 108572 Result: Down-regulated in Transcription
  misc_feature: MA Experiment 108572 PARAMETER Experiment Name: At_Drought_cDNA_P Parameter: Timepoint (hr) Value: 1
  misc_feature: MA Experiment 108572 PARAMETER Experiment Name: At_Drought_cDNA_P Parameter: Tissue Value: Aerial
  misc_feature: MA Experiment 108572 PARAMETER Experiment Name: At_Drought_cDNA_P Parameter: Treatment Value: Drought vs. No Drought
  misc_feature: MA Experiment ID: 108573 Result: Down-regulated in Transcription
  misc_feature: MA Experiment 108573 PARAMETER Experiment Name: At_Drought_cDNA_P Parameter: Timepoint (hr) Value: 6
  misc_feature: MA Experiment 108573 PARAMETER Experiment Name: At_Drought_cDNA_P Parameter: Tissue Value: Aerial
  misc_feature: MA Experiment 108573 PARAMETER Experiment Name: At_Drought_cDNA_P Parameter: Treatment Value: Drought vs. No Drought
  misc_feature: MA Experiment ID: 108585 Result: Down-regulated in Transcription
  misc_feature: MA Experiment 108585 PARAMETER Experiment Name: At_5mM_NaNP_cDNA_P Parameter: Timepoint (hr) Value: 6
  misc_feature: MA Experiment 108585 PARAMETER Experiment Name: At_5mM_NaNP_cDNA_P Parameter: Tissue Value: Aerial
  misc_feature: MA Experiment 108585 PARAMETER Experiment Name: At_5mM_NaNP_cDNA_P Parameter: Treatment Value: null
  misc_feature: MA Experiment ID: 108595 Result: Down-regulated in Transcription
  misc_feature: MA Experiment 108595 PARAMETER Experiment Name: At_Ler-pi_Ovule_cDNA_P Parameter: Plant Line Value: null
  misc_feature: MA Experiment ID: 20000069 Result: Up-regulated in Transcription
  misc_feature: MA Experiment 20000069 PARAMETER Experiment Name: At_100uM_ABA_Mutants_cDNA_P Parameter: Plant Line Value: CS23
  misc_feature: MA Experiment 20000069 PARAMETER Experiment Name: At_100uM_ABA_Mutants_cDNA_P Parameter: Timepoint (hr) Value: 6
  misc_feature: MA Experiment 20000069 PARAMETER Experiment Name: At_100uM_ABA_Mutants_cDNA_P Parameter: Tissue Value: Aerial
  misc_feature: MA Experiment 20000069 PARAMETER Experiment Name: At_100uM_ABA_Mutants_cDNA_P Parameter: Treatment Value: 100uM ABA vs. No Treatment
  misc_feature: MA Experiment ID: 20000070 Result: Up-regulated in Transcription
  misc_feature: MA Experiment 20000070 PARAMETER Experiment Name: At_100uM_ABA_Mutants_cDNA_P Parameter: Plant Line Value: CS24
  misc_feature: MA Experiment 20000070 PARAMETER Experiment Name: At_100uM_ABA_Mutants_cDNA_P Parameter: Timepoint (hr) Value: 6
  misc_feature: MA Experiment 20000070 PARAMETER Experiment Name: At_100uM_ABA_Mutants_cDNA_P Parameter: Tissue Value: Aerial
  misc_feature: MA Experiment 20000070 PARAMETER Experiment Name: At_100uM_ABA_Mutants_cDNA_P Parameter: Treatment Value: 100uM ABA vs. No Treatment
  misc_feature: MA Experiment ID: 20000071 Result: Up-regulated in Transcription
  misc_feature: MA Experiment 20000071 PARAMETER Experiment Name: At_100uM_ABA_Mutants_cDNA_P Parameter: Plant Line Value: CS8104
  misc_feature: MA Experiment 20000071 PARAMETER Experiment Name: At_100uM_ABA_Mutants_cDNA_P Parameter: Timepoint (hr) Value: 6
  misc_feature: MA Experiment 20000071 PARAMETER Experiment Name: At_100uM_ABA_Mutants_cDNA_P Parameter: Tissue Value: Aerial
  misc_feature: MA Experiment 20000071 PARAMETER Experiment Name: At_100uM_ABA_Mutants_cDNA_P Parameter: Treatment Value: 100uM ABA vs. No Treatment
  misc_feature: MA Experiment ID: 20000089 Result: Up-regulated in Transcription
  misc_feature: MA Experiment ID: 20000093 Result: Down-regulated in Transcription
  misc_feature: MA Experiment 20000093 PARAMETER Experiment Name: At_42deg_Heat_cDNA_P Parameter: Temperature (deg C) Value: 42 vs. 22
  misc_feature: MA Experiment 20000093 PARAMETER Experiment Name: At_42deg_Heat_cDNA_P Parameter: Timepoint (hr) Value: 0.5
  misc_feature: MA Experiment 20000093 PARAMETER Experiment Name: At_42deg_Heat_cDNA_P Parameter: Tissue Value: Aerial
  misc_feature: MA Experiment ID: 20000112 Result: Down-regulated in Transcription
  misc_feature: MA Experiment 20000112 PARAMETER Experiment Name: At_42deg_Heat_cDNA_P Parameter: Temperature (deg C) Value: 42 vs. 22
  misc_feature: MA Experiment 20000112 PARAMETER Experiment Name: At_42deg_Heat_cDNA_P Parameter: Timepoint (hr) Value: 2
  misc_feature: MA Experiment 20000112 PARAMETER Experiment Name: At_42deg_Heat_cDNA_P Parameter: Tissue Value: Aerial
  misc_feature: MA Experiment ID: 20000117 Result: Up-regulated in Transcription
  misc_feature: MA Experiment 20000117 PARAMETER Experiment Name: At_100uM_ABA_Mutants_cDNA_P Parameter: Plant Line Value: Columbia
  misc_feature: MA Experiment 20000117 PARAMETER Experiment Name: At_100uM_ABA_Mutants_cDNA_P Parameter: Timepoint (hr) Value: 6
  misc_feature: MA Experiment 20000117 PARAMETER Experiment Name: At_100uM_ABA_Mutants_cDNA_P Parameter: Tissue Value: Aerial
  misc_feature: MA Experiment 20000117 PARAMETER Experiment Name: At_100uM_ABA_Mutants_cDNA_P Parameter: Treatment Value: 100uM ABA vs. No Treatment
  misc_feature: MA Experiment ID: 20000144 Result: Down-regulated in Transcription
  misc_feature: MA Experiment 20000144 PARAMETER Experiment Name: At_42deg_Heat_cDNA_P Parameter: Temperature (deg C) Value: 42 vs. 22
  misc_feature: MA Experiment 20000144 PARAMETER Experiment Name: At_42deg_Heat_cDNA_P Parameter: Timepoint (hr) Value: 1
  misc_feature: MA Experiment 20000144 PARAMETER Experiment Name: At_42deg_Heat_cDNA_P Parameter: Tissue Value: Aerial
  misc_feature: MA Experiment ID: 20000171 Result: Down-regulated in Transcription
  misc_feature: MA Experiment 20000171 PARAMETER Experiment Name: At_42deg_Heat_P Parameter: Age (day) Value: 14
  misc_feature: MA Experiment 20000171 PARAMETER Experiment Name: At_42deg_Heat_P Parameter: Organism Value: A. thaliana
  misc_feature: MA Experiment 20000171 PARAMETER Experiment Name: At_42deg_Heat_P Parameter: Plant Line Value: WS
  misc_feature: MA Experiment 20000171 PARAMETER Experiment Name: At_42deg_Heat_P Parameter: Temperature (deg C) Value: 42 vs. 22
  misc_feature: MA Experiment 20000171 PARAMETER Experiment Name: At_42deg_Heat_P Parameter: Timepoint (hr) Value: 1
  misc_feature: MA Experiment 20000171 PARAMETER Experiment Name: At_42deg_Heat_P Parameter: Tissue Value: Aerial
  misc_feature: MA Experiment ID: 20000173 Result: Down-regulated in Transcription
  misc_feature: MA Experiment 20000173 PARAMETER Experiment Name: At_42deg_Heat_P Parameter: Age (day) Value: 14
  misc_feature: MA Experiment 20000173 PARAMETER Experiment Name: At_42deg_Heat_P Parameter: Organism Value: A. thaliana
  misc_feature: MA Experiment 20000173 PARAMETER Experiment Name: At_42deg_Heat_P Parameter: Plant Line Value: WS
  misc_feature: MA Experiment 20000173 PARAMETER Experiment Name: At_42deg_Heat_P Parameter: Temperature (deg C) Value: 42 vs. 22
  misc_feature: MA Experiment 20000173 PARAMETER Experiment Name: At_42deg_Heat_P Parameter: Timepoint (hr) Value: 6
  misc_feature: MA Experiment 20000173 PARAMETER Experiment Name: At_42deg_Heat_P Parameter: Tissue Value: Aerial
  misc_feature: MA Experiment ID: 20000180 Result: Down-regulated in Transcription
  misc_feature: MA Experiment 20000180 PARAMETER Experiment Name: At_Germinating_Seeds_P Parameter: Age (hr) Value: 24 vs. 0
  misc_feature: MA Experiment 20000180 PARAMETER Experiment Name: At_Germinating_Seeds_P Parameter: Tissue Value: Germinating Seeds
  misc_feature: MA Experiment ID: 20000184 Result: Down-regulated in Transcription
  misc_feature: MA Experiment 20000184 PARAMETER Experiment Name: At_Shoots__P Parameter: Age (day) Value: 7
  misc_feature: MA Experiment 20000184 PARAMETER Experiment Name: At_Shoots__P Parameter: Tissue Value: Shoots vs. Whole Plant
  misc_feature: MA Experiment ID: 20000227 Result: Down-regulated in Transcription
  misc_feature: MA Experiment 20000227 PARAMETER Experiment Name: At_Root-Tips-vs-Tops_P Parameter: Tissue Value: Root Tips vs. Root Tops
  misc_feature: MA Experiment ID: 20000234 Result: Down-regulated in Transcription
  misc_feature: MA Experiment 20000234 PARAMETER Experiment Name: At_Siliques_P Parameter: Age (day) Value: 21
  misc_feature: MA Experiment 20000234 PARAMETER Experiment Name: At_Siliques_P Parameter: Organism Value: A. thaliana
  misc_feature: MA Experiment 20000234 PARAMETER Experiment Name: At_Siliques_P Parameter: Plant Line Value: WS
  misc_feature: MA Experiment 20000234 PARAMETER Experiment Name: At_Siliques_P Parameter: Tissue Value: Less Than 5mm Siliques vs. Whole Plant
  misc_feature: MA Experiment ID: 20000235 Result: Down-regulated in Transcription
  misc_feature: MA Experiment 20000235 PARAMETER Experiment Name: At_Siliques_P Parameter: Age (day) Value: 21
  misc_feature: MA Experiment 20000235 PARAMETER Experiment Name: At_Siliques_P Parameter: Organism Value: A. thaliana
  misc_feature: MA Experiment 20000235 PARAMETER Experiment Name: At_Siliques_P Parameter: Plant Line Value: WS
  misc_feature: MA Experiment 20000235 PARAMETER Experiment Name: At_Siliques_P Parameter: Tissue Value: 5-10mm Siliques vs. Whole Plant
  misc_feature: MA Experiment ID: 20000438 Result: Down-regulated in Transcription
  misc_feature: MA Experiment 20000438 PARAMETER Experiment Name: At_Shoots__P Parameter: Age (day) Value: 14
  misc_feature: MA Experiment 20000438 PARAMETER Experiment Name: At_Shoots__P Parameter: Tissue Value: Shoots vs. Whole Plant
  misc_feature: MA Experiment ID: 20000451 Result: Down-regulated in Transcription
  misc_feature: MA Experiment 20000451 PARAMETER Experiment Name: At_CS6879_Shoots-Roots_P Parameter: Age (day) Value: 14
  misc_feature: MA Experiment 20000451 PARAMETER Experiment Name: At_CS6879_Shoots-Roots_P Parameter: Organism Value: A. thaliana
  misc_feature: MA Experiment 20000451 PARAMETER Experiment Name: At_CS6879_Shoots-Roots_P Parameter: Plant Line Value: CS6879 vs. WS
  misc_feature: MA Experiment 20000451 PARAMETER Experiment Name: At_CS6879_Shoots-Roots_P Parameter: Tissue Value: Roots
  misc_feature: MA Experiment ID: 20000495 Result: Down-regulated in Transcription
  misc_feature: MA Experiment 20000495 PARAMETER Experiment Name: At_Guard_Cells_P Parameter: Harvest Date Value: 8/2/2002
  misc_feature: MA Experiment 20000495 PARAMETER Experiment Name: At_Guard_Cells_P Parameter: Organism Value: A. thaliana
  misc_feature: MA Experiment 20000495 PARAMETER Experiment Name: At_Guard_Cells_P Parameter: Tissue Value: Guard Cells vs. Leaves
  misc_feature: MA Experiment ID: 20001247 Result: Down-regulated in Transcription
  misc_feature: MA Experiment 20001247 PARAMETER Experiment Name: At_Far-red-induction_P Parameter: Age (day) Value: 7
  misc_feature: MA Experiment 20001247 PARAMETER Experiment Name: At_Far-red-induction_P Parameter: Light Value: Far-red vs. White
  misc_feature: MA Experiment 20001247 PARAMETER Experiment Name: At_Far-red-induction_P Parameter: Organism Value: A. thaliana
  misc_feature: MA Experiment 20001247 PARAMETER Experiment Name: At_Far-red-induction_P Parameter: Plant Line Value: Columbia
  misc_feature: MA Experiment 20001247 PARAMETER Experiment Name: At_Far-red-induction_P Parameter: Timepoint (hr) Value: 1
  misc_feature: MA Experiment 20001247 PARAMETER Experiment Name: At_Far-red-induction_P Parameter: Tissue Value: Whole Plant
  misc_feature: MA Experiment ID: 20001451 Result: Down-regulated in Transcription
  misc_feature: MA Experiment 20001451 PARAMETER Experiment Name: At_Far-red-induction_P Parameter: Age (day) Value: 7
  misc_feature: MA Experiment 20001451 PARAMETER Experiment Name: At_Far-red-induction_P Parameter: Light Value: Far-red vs. White
  misc_feature: MA Experiment 20001451 PARAMETER Experiment Name: At_Far-red-induction_P Parameter: Organism Value: A. thaliana
  misc_feature: MA Experiment 20001451 PARAMETER Experiment Name: At_Far-red-induction_P Parameter: Plant Line Value: Columbia
  misc_feature: MA Experiment 20001451 PARAMETER Experiment Name: At_Far-red-induction_P Parameter: Timepoint (hr) Value: 24
  misc_feature: MA Experiment 20001451 PARAMETER Experiment Name: At_Far-red-induction_P Parameter: Tissue Value: Whole Plant
  misc_feature: MA Experiment ID: 20001557 Result: Down-regulated in Transcription
  misc_feature: MA Experiment 20001557 PARAMETER Experiment Name: At_Drought_Soil_Dry_P Parameter: Age (day) Value: 27
  misc_feature: MA Experiment 20001557 PARAMETER Experiment Name: At_Drought_Soil_Dry_P Parameter: Organism Value: A. thaliana
  misc_feature: MA Experiment 20001557 PARAMETER Experiment Name: At_Drought_Soil_Dry_P Parameter: Plant Line Value: WS
  misc_feature: MA Experiment 20001557 PARAMETER Experiment Name: At_Drought_Soil_Dry_P Parameter: Post Timepoint (hr) Value: 3
  misc_feature: MA Experiment 20001557 PARAMETER Experiment Name: At_Drought_Soil_Dry_P Parameter: Post-Treatment Value: Re-Water vs. No Drought
  misc_feature: MA Experiment 20001557 PARAMETER Experiment Name: At_Drought_Soil_Dry_P Parameter: Timepoint (day) Value: 13
  misc_feature: MA Experiment 20001557 PARAMETER Experiment Name: At_Drought_Soil_Dry_P Parameter: Treatment Value: Drought vs. No Drought
  misc_feature: MA Experiment ID: 20001558 Result: Down-regulated in Transcription
  misc_feature: MA Experiment 20001558 PARAMETER Experiment Name: At_Drought_Soil_Dry_P Parameter: Age (day) Value: 27
  misc_feature: MA Experiment 20001558 PARAMETER Experiment Name: At_Drought_Soil_Dry_P Parameter: Organism Value: A. thaliana
  misc_feature: MA Experiment 20001558 PARAMETER Experiment Name: At_Drought_Soil_Dry_P Parameter: Plant Line Value: WS
  misc_feature: MA Experiment 20001558 PARAMETER Experiment Name: At_Drought_Soil_Dry_P Parameter: Post Timepoint (hr) Value: 6
  misc_feature: MA Experiment 20001558 PARAMETER Experiment Name: At_Drought_Soil_Dry_P Parameter: Post-Treatment Value: Re-Water vs. No Drought
  misc_feature: MA Experiment 20001558 PARAMETER Experiment Name: At_Drought_Soil_Dry_P Parameter: Timepoint (day) Value: 13
  misc_feature: MA Experiment 20001558 PARAMETER Experiment Name: At_Drought_Soil_Dry_P Parameter: Treatment Value: Drought vs. No Drought
  misc_feature: MA Experiment ID: 20001560 Result: Down-regulated in Transcription
  misc_feature: MA Experiment 20001560 PARAMETER Experiment Name: At_Drought_Soil_Dry_P Parameter: Age (day) Value: 28
  misc_feature: MA Experiment 20001560 PARAMETER Experiment Name: At_Drought_Soil_Dry_P Parameter: Organism Value: A. thaliana
  misc_feature: MA Experiment 20001560 PARAMETER Experiment Name: At_Drought_Soil_Dry_P Parameter: Plant Line Value: WS
  misc_feature: MA Experiment 20001560 PARAMETER Experiment Name: At_Drought_Soil_Dry_P Parameter: Post Timepoint (hr) Value: None
  misc_feature: MA Experiment 20001560 PARAMETER Experiment Name: At_Drought_Soil_Dry_P Parameter: Post-Treatment Value: None
  misc_feature: MA Experiment 20001560 PARAMETER Experiment Name: At_Drought_Soil_Dry_P Parameter: Timepoint (day) Value: 14
  misc_feature: MA Experiment 20001560 PARAMETER Experiment Name: At_Drought_Soil_Dry_P Parameter: Treatment Value: Drought vs. No Drought

SEQ ID NO: 29692 - protein, 172 aa, Arabidopsis thaliana; identical to SEQ ID NO: 24529
  peptide (1)..(172): Ceres Seq. ID no. 12332059
  misc_feature (31)..(171): Pfam Name: Core histone H2A/H2B/H3/H4 Pfam Description: Core histone H2A/H2B/H3/H4
  misc_feature (31)..(171): Pfam Name: Core histone H2A/H2B/H3/H4 Pfam Description: Core histone H2A/H2B/H3/H4
  misc_feature (22)..(172): Homolog of NCBI NO: 7387727 NR Description: Histone H2B (CaH2B)
  misc_feature (29)..(172): Homolog of NCBI NO: 7439754 NR Description: histone H2B-3 - tomato (fragment)
  misc_feature (22)..(172): Homolog of NCBI NO: 15231313 NR Description: histone H2B -like protein
  misc_feature (22)..(172): Homolog of NCBI NO: 21617908 NR Description: histone H2B [Arabidopsis thaliana]
  misc_feature (22)..(172): Homolog of NCBI NO: 15223016 NR Description: histone H2B
  misc_feature (22)..(172): Homolog of NCBI NO: 7387727 NR Description: Histone H2B (CaH2B)
  misc_feature (22)..(172): Homolog of NCBI NO: 15231313 NR Description: histone H2B -like protein
  misc_feature (22)..(172): Homolog of NCBI NO: 15223016 NR Description: histone H2B
  misc_feature (22)..(172): Homolog of NCBI NO: 15226943 NR Description: putative histone H2B
  misc_feature (22)..(172): Homolog of NCBI NO: 15238563 NR Description: histone H2B - like protein
  misc_feature (22)..(172): Homolog of NCBI NO: 21554180 NR Description: histone H2B-like protein [Arabidopsis thaliana]
  misc_feature (22)..(172): Homolog of NCBI NO: 15231304 NR Description: histone H2B; protein id: At3g45980.1, supported
  misc_feature (22)..(172): Homolog of NCBI NO: 7387726 NR Description: Histone H2B
  misc_feature (22)..(172): Homolog of NCBI NO: 21617908 NR Description: histone H2B [Arabidopsis thaliana]
  misc_feature (29)..(172): Homolog of NCBI NO: 7439754 NR Description: histone H2B-3 - tomato (fragment)
  misc_feature (22)..(172): Homolog of NCBI NO: 7387726 NR Description: Histone H2B
  misc_feature (22)..(172): Homolog of NCBI NO: 15231304 NR Description: histone H2B; protein id: At3g45980.1, supported
  misc_feature (22)..(172): Homolog of NCBI NO: 21554180 NR Description: histone H2B-like protein [Arabidopsis thaliana]
  misc_feature (22)..(172): Homolog of NCBI NO: 15238563 NR Description: histone H2B - like protein
  misc_feature (22)..(172): Homolog of NCBI NO: 15226943 NR Description: putative histone H2B

SEQ ID NO: 29693 - protein, 151 aa, Arabidopsis thaliana; identical to SEQ ID NO: 24530
  peptide (1)..(151): Ceres Seq. ID no. 12332060
  misc_feature (10)..(150): Pfam Name: Core histone H2A/H2B/H3/H4 Pfam Description: Core histone H2A/H2B/H3/H4
  misc_feature (10)..(150): Pfam Name: Core histone H2A/H2B/H3/H4 Pfam Description: Core histone H2A/H2B/H3/H4
  misc_feature (1)..(151): Homolog of NCBI NO: 7387727 NR Description: Histone H2B (CaH2B)
  misc_feature (8)..(151): Homolog of NCBI NO: 7439754 NR Description: histone H2B-3 - tomato (fragment)
  misc_feature (1)..(151): Homolog of NCBI NO: 15231313 NR Description: histone H2B -like protein
  misc_feature (1)..(151): Homolog of NCBI NO: 21617908 NR Description: histone H2B [Arabidopsis thaliana]
  misc_feature (1)..(151): Homolog of NCBI NO: 15223016 NR Description: histone H2B
  misc_feature (1)..(151): Homolog of NCBI NO: 7387727 NR Description: Histone H2B (CaH2B)
  misc_feature (1)..(151): Homolog of NCBI NO: 15231313 NR Description: histone H2B -like protein
  misc_feature (1)..(151): Homolog of NCBI NO: 15223016 NR Description: histone H2B
  misc_feature (1)..(151): Homolog of NCBI NO: 15226943 NR Description: putative histone H2B
  misc_feature (1)..(151): Homolog of NCBI NO: 15238563 NR Description: histone H2B - like protein
  misc_feature (1)..(151): Homolog of NCBI NO: 21554180 NR Description: histone H2B-like protein [Arabidopsis thaliana]
  misc_feature (1)..(151): Homolog of NCBI NO: 15231304 NR Description: histone H2B; protein id: At3g45980.1, supported
  misc_feature (1)..(151): Homolog of NCBI NO: 7387726 NR Description: Histone H2B
  misc_feature (1)..(151): Homolog of NCBI NO: 21617908 NR Description: histone H2B [Arabidopsis thaliana]
  misc_feature (8)..(151): Homolog of NCBI NO: 7439754 NR Description: histone H2B-3 - tomato (fragment)
  misc_feature (1)..(151): Homolog of NCBI NO: 7387726 NR Description: Histone H2B
  misc_feature (1)..(151): Homolog of NCBI NO: 15231304 NR Description: histone H2B; protein id: At3g45980.1, supported
  misc_feature (1)..(151): Homolog of NCBI NO: 21554180 NR Description: histone H2B-like protein [Arabidopsis thaliana]
  misc_feature (1)..(151): Homolog of NCBI NO: 15238563 NR Description: histone H2B - like protein
  misc_feature (1)..(151): Homolog of NCBI NO: 15226943 NR Description: putative histone H2B

SEQ ID NO: 29694 - DNA, 812 bp, Arabidopsis thaliana
  misc_feature (1)..(812): Ceres Seq. ID no. 12321339
  misc_feature: MA Experiment ID: 108595 Result: Down-regulated in Transcription
  misc_feature: MA Experiment 108595 PARAMETER Experiment Name: At_Ler-pi_Ovule_cDNA_P Parameter: Plant Line Value: null
aactatacagtaatcgaaggaaccaagaaacggtctcaatcttattttcagcgatggcgatgtcaattctaaagctaagaaatttatcggcactaagatcggcggcaaatagtgcccggatcggagtttcatcgaggggtttctcaaagctcgcggaaggcactgacataacctcggcggcgcctggcgtttctctccagaaagctcgcagctgggacgaaggtgtttcctccaaattctccaccacgccattgtcagatatcttcaaggggaagaaagtcgtcatctttggtcttcctggggcttacacgggagtttgttcacagcagcatgtgcctagctacaagagccacattgataagtttaaagccaaaggcattgattctgtcatctgtgtctctgttaatgatccctttgctatcaatggttgggcagagaagcttggtgccaaagatgcaattgagttttatggagattttgatgggaaatttcacaaaagcttggggctagacaaggatctctctgctgcattgctcgggccacggtctgagagatggtcggcttatgtagaagacgggaaggttaaggcggtgaatgtggaagaagcaccgtctgacttcaaggttacaggggcagaagtcatcttaggacagatctaaaaagtatttccagagttgctgtttcttctgagttgcaactgataataagtttgatccgaacatgtctcaaggatcagaccaagtaacagcttcacttcttttgttttgtttccacagtttcagtttaaataaaacttatgtgtcttgccgttt

SEQ ID NO: 29695 - protein, 218 aa, Arabidopsis thaliana
  peptide (1)..(218): Ceres Seq. ID no. 12321340
  misc_feature (86)..(218): Homolog of NCBI NO: 27376428 NR Description: peroxiredoxin [Bradyrhizobium japonicum]
  misc_feature (85)..(218): Homolog of NCBI NO: 13476239 NR Description: peroxiredoxin-like protein [Mesorhizobium loti]
  misc_feature (83)..(218): Homolog of NCBI NO: 16127624 NR Description: AhpC/TSA family protein [Caulobacter crescentus
  misc_feature (62)..(218): Homolog of NCBI NO: 15888122 NR Description: AGR_C_1423p [Agrobacterium tumefaciens]
  misc_feature (86)..(218): Homolog of NCBI NO: 23501379 NR Description: ahpC/TSA family protein [Brucella suis 1330]
  misc_feature (86)..(218): Homolog of NCBI NO: 17987739 NR Description: THIOL PEROXIDASE [Brucella melitensis]
  misc_feature (18)..(218): Homolog of NCBI NO: 34903114 NR Description: unnamed protein product [Oryza sativa (japonica
  misc_feature (20)..(218): Homolog of NCBI NO: 7658343 NR Description: unknown protein; 13384-11892 [Arabidopsis
  misc_feature (18)..(218): Homolog of NCBI NO: 21553531 NR Description: unknown [Arabidopsis thaliana]
  misc_feature (18)..(218): Homolog of NCBI NO: 18397457 NR Description: expressed protein
LYSNRRNQETVSILFSAMAMSILKLRNLSALRSAANSARIGVSSRGFSKLAEGTDITSAAPGVSLQKARSWDEGVSSKFSTTPLSDIFKGKKVVIFGLPGAYTGVCSQQHVPSYKSHIDKFKAKGIDSVICVSVNDPFAINGWAEKLGAKDAIEFYGDFDGKFHKSLGLDKDLSAALLGPRSERWSAYVEDGKVKAVNVEEAPSDFKVTGAEVILGQI

SEQ ID NO: 29696 - protein, 201 aa, Arabidopsis thaliana
  peptide (1)..(201): Ceres Seq. ID no. 12321341
  misc_feature (69)..(201): Homolog of NCBI NO: 27376428 NR Description: peroxiredoxin [Bradyrhizobium japonicum]
  misc_feature (68)..(201): Homolog of NCBI NO: 13476239 NR Description: peroxiredoxin-like protein [Mesorhizobium loti]
  misc_feature (66)..(201): Homolog of NCBI NO: 16127624 NR Description: AhpC/TSA family protein [Caulobacter crescentus
  misc_feature (45)..(201): Homolog of NCBI NO: 15888122 NR Description: AGR_C_1423p [Agrobacterium tumefaciens]
  misc_feature (69)..(201): Homolog of NCBI NO: 23501379 NR Description: ahpC/TSA family protein [Brucella suis 1330]
  misc_feature (69)..(201): Homolog of NCBI NO: 17987739 NR Description: THIOL PEROXIDASE [Brucella melitensis]
  misc_feature (1)..(201): Homolog of NCBI NO: 34903114 NR Description: unnamed protein product [Oryza sativa (japonica
  misc_feature (3)..(201): Homolog of NCBI NO: 7658343 NR Description: unknown protein; 13384-11892 [Arabidopsis
  misc_feature (1)..(201): Homolog of NCBI NO: 21553531 NR Description: unknown [Arabidopsis thaliana]
  misc_feature (1)..(201): Homolog of NCBI NO: 18397457 NR Description: expressed protein
MAMSILKLRNLSALRSAANSARIGVSSRGFSKLAEGTDITSAAPGVSLQKARSWDEGVSSKFSTTPLSDIFKGKKVVIFGLPGAYTGVCSQQHVPSYKSHIDKFKAKGIDSVICVSVNDPFAINGWAEKLGAKDAIEFYGDFDGKFHKSLGLDKDLSAALLGPRSERWSAYVEDGKVKAVNVEEAPSDFKVTGAEVILGQI

SEQ ID NO: 29697 - protein, 199 aa, Arabidopsis thaliana
  peptide (1)..(199): Ceres Seq. ID no. 12321342
  misc_feature (67)..(199): Homolog of NCBI NO: 27376428 NR Description: peroxiredoxin [Bradyrhizobium japonicum]
  misc_feature (66)..(199): Homolog of NCBI NO: 13476239 NR Description: peroxiredoxin-like protein [Mesorhizobium loti]
  misc_feature (64)..(199): Homolog of NCBI NO: 16127624 NR Description: AhpC/TSA family protein [Caulobacter crescentus
  misc_feature (43)..(199): Homolog of NCBI NO: 15888122 NR Description: AGR_C_1423p [Agrobacterium tumefaciens]
  misc_feature (67)..(199): Homolog of NCBI NO: 23501379 NR Description: ahpC/TSA family protein [Brucella suis 1330]
  misc_feature (67)..(199): Homolog of NCBI NO: 17987739 NR Description: THIOL PEROXIDASE [Brucella melitensis]
  misc_feature (1)..(199): Homolog of NCBI NO: 34903114 NR Description: unnamed protein product [Oryza sativa (japonica
  misc_feature (1)..(199): Homolog of NCBI NO: 7658343 NR Description: unknown protein; 13384-11892 [Arabidopsis
  misc_feature (1)..(199): Homolog of NCBI NO: 21553531 NR Description: unknown [Arabidopsis thaliana]
  misc_feature (1)..(199): Homolog of NCBI NO: 18397457 NR Description: expressed protein
MSILKLRNLSALRSAANSARIGVSSRGFSKLAEGTDITSAAPGVSLQKARSWDEGVSSKFSTTPLSDIFKGKKVVIFGLPGAYTGVCSQQHVPSYKSHIDKFKAKGIDSVICVSVNDPFAINGWAEKLGAKDAIEFYGDFDGKFHKSLGLDKDLSAALLGPRSERWSAYVEDGKVKAVNVEEAPSDFKVTGAEVILGQI

SEQ ID NO: 29698 - DNA, 1112 bp, Arabidopsis thaliana
  misc_feature (1)..(1112): Ceres Seq. ID no. 12421015
  misc_feature: MA Experiment ID: 108462 Result: Up-regulated in Transcription
  misc_feature: MA Experiment 108462 PARAMETER Experiment Name: At_Germinating_Seeds_cDNA_P Parameter: Age (day) Value: 2 vs. 0
  misc_feature: MA Experiment 108462 PARAMETER Experiment Name: At_Germinating_Seeds_cDNA_P Parameter: Tissue Value: Germinating Seeds
  misc_feature: MA Experiment ID: 108463 Result: Up-regulated in Transcription
  misc_feature: MA Experiment 108463 PARAMETER Experiment Name: At_Germinating_Seeds_cDNA_P Parameter: Age (day) Value: 3 vs. 0
  misc_feature: MA Experiment 108463 PARAMETER Experiment Name: At_Germinating_Seeds_cDNA_P Parameter: Tissue Value: Germinating Seeds
  misc_feature: MA Experiment ID: 108488 Result: Down-regulated in Transcription
  misc_feature: MA Experiment ID: 108579 Result: Down-regulated in Transcription
  misc_feature: MA Experiment 108579 PARAMETER Experiment Name: At_4deg_Cold_cDNA_P Parameter: Temperature (deg C) Value: 4 vs. 22
  misc_feature: MA Experiment 108579 PARAMETER Experiment Name: At_4deg_Cold_cDNA_P Parameter: Timepoint (hr) Value: 6
  misc_feature: MA Experiment 108579 PARAMETER Experiment Name: At_4deg_Cold_cDNA_P Parameter: Tissue Value: Aerial
  misc_feature: MA Experiment ID: 20000111 Result: Up-regulated in Transcription
  misc_feature: MA Experiment 20000111 PARAMETER Experiment Name: At_42deg_Heat_cDNA_P Parameter: Temperature (deg C) Value: 42 vs. 22
  misc_feature: MA Experiment 20000111 PARAMETER Experiment Name: At_42deg_Heat_cDNA_P Parameter: Timepoint (hr) Value: 6
  misc_feature: MA Experiment 20000111 PARAMETER Experiment Name: At_42deg_Heat_cDNA_P Parameter: Tissue Value: Aerial
  misc_feature: MA Experiment ID: 20000573 Result: Up-regulated in Transcription
  misc_feature: MA Experiment 20000573 PARAMETER Experiment Name: At_100uM_ABA_Mutants__P Parameter: Organism Value: A. thaliana
  misc_feature: MA Experiment 20000573 PARAMETER Experiment Name: At_100uM_ABA_Mutants__P Parameter: Plant Line Value: CS22 vs. Ler wt
  misc_feature: MA Experiment 20000573 PARAMETER Experiment Name: At_100uM_ABA_Mutants__P Parameter: Timepoint (hr) Value: N/A
  misc_feature: MA Experiment 20000573 PARAMETER Experiment Name: At_100uM_ABA_Mutants__P Parameter: Tissue Value: Whole Plant
  misc_feature: MA Experiment 20000573 PARAMETER Experiment Name: At_100uM_ABA_Mutants__P Parameter: Treatment Value: None
  misc_feature: MA Experiment ID: 20000574 Result: Up-regulated in Transcription
  misc_feature: MA Experiment 20000574 PARAMETER Experiment Name: At_100uM_ABA_Mutants__P Parameter: Organism Value: A. thaliana
  misc_feature: MA Experiment 20000574 PARAMETER Experiment Name: At_100uM_ABA_Mutants__P Parameter: Plant Line Value: CS23 vs. Ler wt
  misc_feature: MA Experiment 20000574 PARAMETER Experiment Name: At_100uM_ABA_Mutants__P Parameter: Timepoint (hr) Value: N/A
  misc_feature: MA Experiment 20000574 PARAMETER Experiment Name: At_100uM_ABA_Mutants__P Parameter: Tissue Value: Whole Plant
  misc_feature: MA Experiment 20000574 PARAMETER Experiment Name: At_100uM_ABA_Mutants__P Parameter: Treatment Value: None
  misc_feature: MA Experiment ID: 20000794 Result: Up-regulated in Transcription
  misc_feature: MA Experiment 20000794 PARAMETER Experiment Name: At_Petals_P Parameter: Age (day) Value: 23-25 days
  misc_feature: MA Experiment 20000794 PARAMETER Experiment Name: At_Petals_P Parameter: Plant Line Value: WS
  misc_feature: MA Experiment 20000794 PARAMETER Experiment Name: At_Petals_P Parameter: Tissue Value: Petals vs. Whole plant
gagtttcaatggcggcaattttttctctcttccttttcttcattctcttcatcgtctctcttctcatcatcttatctttcatcgtacggccaagatccgtcacgatccccatcaagtttcgccacgtcttcatcaccggtggatcaagcggaatcggtctcgctctcgctcaccgtgccgtctccgaaggcgctaaagtctccatcctcgctcgttcaactgaaaagctcgccgaagccaaacgatccatccagctagctaccggtgtcgaggtcgccacgttctctgcggacgttcgcgattacgacgccgtttcgaaagcgattgatgaatcgggaccgatcgatgtgttgattgttaatcaaggcgtgtttattgggaaagagattgagaaacagagtcctgaggaggttaagtttatgattgatgtgaatctgactgggagcttcaatgtgattaaggcggctttacctgctatgaaagctagggaaagtcgtggttctgcttccatttctcttgtgtcctctcaagctggtcaggcaggtatatatggttacactgcatattcagcgagcaagtttgggcttcagggtttagcgcaagcattgcagcaagaagttatttctgatgacattcatgtgactctcttgtttcctcctgacactgatacacccgggtttgaacaagaactgaagaagaggccagaactaacttcaatcatagccgcatcatcgggttcaatgaaaaccaaggaagtggccaagatatgttttgatggtatcaaagcaggaaaatttacagtgacatgccattttattggcttcttactatcaattgctagcaccggcatgtcccctcagggatcgttttggcttgcgctcattgaagttatattcggtggtctaataagattcgtcagcttggttttccaatggcaatggtacaaaaccatagaaaagtggagcaaagaaaaacaagtaaatagtaagttagcttaggttattttgtacaatggtactaatactatatgatcagtctcttgtacagtgaacaggctcatgtgtttgtagttccaacttcggcttctctgttttcaatttgaataaattgtg

SEQ ID NO: 29699 - protein, 331 aa, Arabidopsis thaliana
  peptide (1)..(331): Ceres Seq. ID no. 12421016
  misc_feature (41)..(290): Homolog of NCBI NO: 15964328 NR Description: RIBITOL TYPE DEHYDROGENASE PROTEIN [Sinorhizobium
  misc_feature (9)..(328): Homolog of NCBI NO: 21356301 NR Description: CG10425-PA [Drosophila melanogaster]
  misc_feature (13)..(309): Homolog of NCBI NO: 39583655 NR Description: Hypothetical protein CBG08294 [Caenorhabditis
  misc_feature (14)..(325): Homolog of NCBI NO: 34878781 NR Description: similar to 6330410P18Rik protein [Rattus
  misc_feature (13)..(328): Homolog of NCBI NO: 30585239 NR Description: Homo sapiens follicular lymphoma variant
  misc_feature (13)..(328): Homolog of NCBI NO: 4503817 NR Description: follicular lymphoma variant translocation 1 [Homo
  misc_feature (9)..(309): Homolog of NCBI NO: 27882572 NR Description: Similar to follicular lymphoma variant
  misc_feature (3)..(324): Homolog of NCBI NO: 30679701 NR Description: short-chain dehydrogenase/reductase family
  misc_feature (3)..(324): Homolog of NCBI NO: 7658344 NR Description: unknown protein; 15741-13972 [Arabidopsis
  misc_feature (3)..(331): Homolog of NCBI NO: 15239681 NR Description: FVT1 - like protein; protein id: At5g19200.1
VSMAAIFSLFLFFILFIVSLLIILSFIVRPRSVTIPIKFRHVFITGGSSGIGLALAHRAVSEGAKVSILARSTEKLAEAKRSIQLATGVEVATFSADVRDYDAVSKAIDESGPIDVLIVNQGVFIGKEIEKQSPEEVKFMIDVNLTGSFNVIKAALPAMKARESRGSASISLVSSQAGQAGIYGYTAYSASKFGLQGLAQALQQEVISDDIHVTLLFPPDTDTPGFEQELKKRPELTSIIAASSGSMKTKEVAKICFDGIKAGKFTVTCHFIGFLLSIASTGMSPQGSFWLALIEVIFGGLIRFVSLVFQWQWYKTIEKWSKEKQVNSKLA

SEQ ID NO: 29700 - protein, 329 aa, Arabidopsis thaliana
  peptide (1)..(329): Ceres Seq. ID no. 12421017
  misc_feature (39)..(288): Homolog of NCBI NO: 15964328 NR Description: RIBITOL TYPE DEHYDROGENASE PROTEIN [Sinorhizobium
  misc_feature (7)..(326): Homolog of NCBI NO: 21356301 NR Description: CG10425-PA [Drosophila melanogaster]
  misc_feature (11)..(307): Homolog of NCBI NO: 39583655 NR Description: Hypothetical protein CBG08294 [Caenorhabditis
  misc_feature (12)..(323): Homolog of NCBI NO: 34878781 NR Description: similar to 6330410P18Rik protein [Rattus
  misc_feature (11)..(326): Homolog of NCBI NO: 30585239 NR Description: Homo sapiens follicular lymphoma variant
  misc_feature (11)..(326): Homolog of NCBI NO: 4503817 NR Description: follicular lymphoma variant translocation 1 [Homo
  misc_feature (7)..(307): Homolog of NCBI NO: 27882572 NR Description: Similar to follicular lymphoma variant
  misc_feature (1)..(322): Homolog of NCBI NO: 30679701 NR Description: short-chain dehydrogenase/reductase family
  misc_feature (1)..(322): Homolog of NCBI NO: 7658344 NR Description: unknown protein; 15741-13972 [Arabidopsis
  misc_feature (1)..(329): Homolog of NCBI NO: 15239681 NR Description: FVT1 - like protein; protein id: At5g19200.1
MAAIFSLFLFFILFIVSLLIILSFIVRPRSVTIPIKFRHVFITGGSSGIGLALAHRAVSEGAKVSILARSTEKLAEAKRSIQLATGVEVATFSADVRDYDAVSKAIDESGPIDVLIVNQGVFIGKEIEKQSPEEVKFMIDVNLTGSFNVIKAALPAMKARESRGSASISLVSSQAGQAGIYGYTAYSASKFGLQGLAQALQQEVISDDIHVTLLFPPDTDTPGFEQELKKRPELTSIIAASSGSMKTKEVAKICFDGIKAGKFTVTCHFIGFLLSIASTGMSPQGSFWLALIEVIFGGLIRFVSLVFQWQWYKTIEKWSKEKQVNSKLA

SEQ ID NO: 29701 - protein, 192 aa, Arabidopsis thaliana
  peptide (1)..(192): Ceres Seq. ID no. 12421018
  misc_feature (1)..(151): Homolog of NCBI NO: 15964328 NR Description: RIBITOL TYPE DEHYDROGENASE PROTEIN [Sinorhizobium
  misc_feature (1)..(189): Homolog of NCBI NO: 21356301 NR Description: CG10425-PA [Drosophila melanogaster]
  misc_feature (1)..(170): Homolog of NCBI NO: 39583655 NR Description: Hypothetical protein CBG08294 [Caenorhabditis
  misc_feature (1)..(186): Homolog of NCBI NO: 34878781 NR Description: similar to 6330410P18Rik protein [Rattus
  misc_feature (1)..(189): Homolog of NCBI NO: 30585239 NR Description: Homo sapiens follicular lymphoma variant
  misc_feature (1)..(189): Homolog of NCBI NO: 4503817 NR Description: follicular lymphoma variant translocation 1 [Homo
  misc_feature (1)..(170): Homolog of NCBI NO: 27882572 NR Description: Similar to follicular lymphoma variant
  misc_feature (1)..(185): Homolog of NCBI NO: 30679701 NR Description: short-chain dehydrogenase/reductase family
  misc_feature (1)..(185): Homolog of NCBI NO: 7658344 NR Description: unknown protein; 15741-13972 [Arabidopsis
  misc_feature (1)..(192): Homolog of NCBI NO: 15239681 NR Description: FVT1 - like protein; protein id: At5g19200.1
MIDVNLTGSFNVIKAALPAMKARESRGSASISLVSSQAGQAGIYGYTAYSASKFGLQGLAQALQQEVISDDIHVTLLFPPDTDTPGFEQELKKRPELTSIIAASSGSMKTKEVAKICFDGIKAGKFTVTCHFIGFLLSIASTGMSPQGSFWLALIEVIFGGLIRFVSLVFQWQWYKTIEKWSKEKQVNSKLA

SEQ ID NO: 29702 - DNA, 772 bp, Arabidopsis thaliana
  misc_feature (1)..(772): Ceres Seq. ID no. 12332756
  misc_feature: MA Experiment ID: 108573 Result: Up-regulated in Transcription
  misc_feature: MA Experiment 108573 PARAMETER Experiment Name: At_Drought_cDNA_P Parameter: Timepoint (hr) Value: 6
  misc_feature: MA Experiment 108573 PARAMETER Experiment Name: At_Drought_cDNA_P Parameter: Tissue Value: Aerial
  misc_feature: MA Experiment 108573 PARAMETER Experiment Name: At_Drought_cDNA_P Parameter: Treatment Value: Drought vs. No Drought
  misc_feature: MA Experiment ID: 108579 Result: Up-regulated in Transcription
  misc_feature: MA Experiment 108579 PARAMETER Experiment Name: At_4deg_Cold_cDNA_P Parameter: Temperature (deg C) Value: 4 vs. 22
  misc_feature: MA Experiment 108579 PARAMETER Experiment Name: At_4deg_Cold_cDNA_P Parameter: Timepoint (hr) Value: 6
  misc_feature: MA Experiment 108579 PARAMETER Experiment Name: At_4deg_Cold_cDNA_P Parameter: Tissue Value: Aerial
  misc_feature: MA Experiment ID: 20000171 Result: Down-regulated in Transcription
  misc_feature: MA Experiment 20000171 PARAMETER Experiment Name: At_42deg_Heat_P Parameter: Age (day) Value: 14
  misc_feature: MA Experiment 20000171 PARAMETER Experiment Name: At_42deg_Heat_P Parameter: Organism Value: A. thaliana
  misc_feature: MA Experiment 20000171 PARAMETER Experiment Name: At_42deg_Heat_P Parameter: Plant Line Value: WS
  misc_feature: MA Experiment 20000171 PARAMETER Experiment Name: At_42deg_Heat_P Parameter: Temperature (deg C) Value: 42 vs. 22
  misc_feature: MA Experiment 20000171 PARAMETER Experiment Name: At_42deg_Heat_P Parameter: Timepoint (hr) Value: 1
  misc_feature: MA Experiment 20000171 PARAMETER Experiment Name: At_42deg_Heat_P Parameter: Tissue Value: Aerial
  misc_feature: MA Experiment ID: 20000184 Result: Up-regulated in Transcription
  misc_feature: MA Experiment 20000184 PARAMETER Experiment Name: At_Shoots__P Parameter: Age (day) Value: 7
  misc_feature: MA Experiment 20000184 PARAMETER Experiment Name: At_Shoots__P Parameter: Tissue Value: Shoots vs. Whole Plant
  misc_feature: MA Experiment ID: 20000185 Result: Down-regulated in Transcription
  misc_feature: MA Experiment 20000185 PARAMETER Experiment Name: At_Roots__P Parameter: Age (day) Value: 7 vs. 21
  misc_feature: MA Experiment 20000185 PARAMETER Experiment Name: At_Roots__P Parameter: Organism Value: A. thaliana
  misc_feature: MA Experiment 20000185 PARAMETER Experiment Name: At_Roots__P Parameter: Tissue Value: Roots vs. Whole Plant
  misc_feature: MA Experiment ID: 20000234 Result: Up-regulated in Transcription
  misc_feature: MA Experiment 20000234 PARAMETER Experiment Name: At_Siliques_P Parameter: Age (day) Value: 21
  misc_feature: MA Experiment 20000234 PARAMETER Experiment Name: At_Siliques_P Parameter: Organism Value: A. thaliana
  misc_feature: MA Experiment 20000234 PARAMETER Experiment Name: At_Siliques_P Parameter: Plant Line Value: WS
  misc_feature: MA Experiment 20000234 PARAMETER Experiment Name: At_Siliques_P Parameter: Tissue Value: Less Than 5mm Siliques vs. Whole Plant
  misc_feature: MA Experiment ID: 20000436 Result: Up-regulated in Transcription
  misc_feature: MA Experiment 20000436 PARAMETER Experiment Name: At_Drought_P Parameter: Age (day) Value: 7
  misc_feature: MA Experiment 20000436 PARAMETER Experiment Name: At_Drought_P Parameter: Organism Value: A. thaliana
  misc_feature: MA Experiment 20000436 PARAMETER Experiment Name: At_Drought_P Parameter: Plant Line Value: WS
  misc_feature: MA Experiment 20000436 PARAMETER Experiment Name: At_Drought_P Parameter: Timepoint (hr) Value: 12
  misc_feature: MA Experiment 20000436 PARAMETER Experiment Name: At_Drought_P Parameter: Tissue Value: Whole Plant
  misc_feature: MA Experiment 20000436 PARAMETER Experiment Name: At_Drought_P Parameter: Treatment Value: Drought vs. No Drought
  misc_feature: MA Experiment ID: 20000438 Result: Up-regulated in Transcription
  misc_feature: MA Experiment 20000438 PARAMETER Experiment Name: At_Shoots__P Parameter: Age (day) Value: 14
  misc_feature: MA Experiment 20000438 PARAMETER Experiment Name: At_Shoots__P Parameter: Tissue Value: Shoots vs. Whole Plant
  misc_feature: MA Experiment ID: 20000439 Result: Down-regulated in Transcription
  misc_feature: MA Experiment 20000439 PARAMETER Experiment Name: At_Roots__P Parameter: Age (day) Value: 14 vs. 21
  misc_feature: MA Experiment 20000439 PARAMETER Experiment Name: At_Roots__P Parameter: Organism Value: A. thaliana
  misc_feature: MA Experiment 20000439 PARAMETER Experiment Name: At_Roots__P Parameter: Tissue Value: Roots vs. Whole Plant
  misc_feature: MA Experiment ID: 20000451 Result: Up-regulated in Transcription
  misc_feature: MA Experiment 20000451 PARAMETER Experiment Name: At_CS6879_Shoots-Roots_P Parameter: Age (day) Value: 14
  misc_feature: MA Experiment 20000451 PARAMETER Experiment Name: At_CS6879_Shoots-Roots_P Parameter: Organism Value: A. thaliana
  misc_feature: MA Experiment 20000451 PARAMETER Experiment Name: At_CS6879_Shoots-Roots_P Parameter: Plant Line Value: CS6879 vs. WS
  misc_feature: MA Experiment 20000451 PARAMETER Experiment Name: At_CS6879_Shoots-Roots_P Parameter: Tissue Value: Roots
  misc_feature: MA Experiment ID: 20000573 Result: Down-regulated in Transcription
  misc_feature: MA Experiment 20000573 PARAMETER Experiment Name: At_100uM_ABA_Mutants__P Parameter: Organism Value: A. thaliana
  misc_feature: MA Experiment 20000573 PARAMETER Experiment Name: At_100uM_ABA_Mutants__P Parameter: Plant Line Value: CS22 vs. Ler wt
  misc_feature: MA Experiment 20000573 PARAMETER Experiment Name: At_100uM_ABA_Mutants__P Parameter: Timepoint (hr) Value: N/A
  misc_feature: MA Experiment 20000573 PARAMETER Experiment Name: At_100uM_ABA_Mutants__P Parameter: Tissue Value: Whole Plant
  misc_feature: MA Experiment 20000573 PARAMETER Experiment Name: At_100uM_ABA_Mutants__P Parameter: Treatment Value: None
  misc_feature: MA Experiment ID: 20001248 Result: Down-regulated in Transcription
  misc_feature: MA Experiment 20001248 PARAMETER Experiment Name: At_Far-red-induction_P Parameter: Age (day) Value: 7
  misc_feature: MA Experiment 20001248 PARAMETER Experiment Name: At_Far-red-induction_P Parameter: Light Value: Far-red vs. White
  misc_feature: MA Experiment 20001248 PARAMETER Experiment Name: At_Far-red-induction_P Parameter: Organism Value: A. thaliana
  misc_feature: MA Experiment 20001248 PARAMETER Experiment Name: At_Far-red-induction_P Parameter: Plant Line Value: Columbia
  misc_feature: MA Experiment 20001248 PARAMETER Experiment Name: At_Far-red-induction_P Parameter: Timepoint (hr) Value: 4
  misc_feature: MA Experiment 20001248 PARAMETER Experiment Name: At_Far-red-induction_P Parameter: Tissue Value: Whole Plant
  misc_feature: MA Experiment ID: 20001557 Result: Up-regulated in Transcription
  misc_feature: MA Experiment 20001557 PARAMETER Experiment Name: At_Drought_Soil_Dry_P Parameter: Age (day) Value: 27
  misc_feature: MA Experiment 20001557 PARAMETER Experiment Name: At_Drought_Soil_Dry_P Parameter: Organism Value: A. thaliana
  misc_feature: MA Experiment 20001557 PARAMETER Experiment Name: At_Drought_Soil_Dry_P Parameter: Plant Line Value: WS
  misc_feature: MA Experiment 20001557 PARAMETER Experiment Name: At_Drought_Soil_Dry_P Parameter: Post Timepoint (hr) Value: 3
  misc_feature: MA Experiment 20001557 PARAMETER Experiment Name: At_Drought_Soil_Dry_P Parameter: Post-Treatment Value: Re-Water vs. No Drought
  misc_feature: MA Experiment 20001557 PARAMETER Experiment Name: At_Drought_Soil_Dry_P Parameter: Timepoint (day) Value: 13
  misc_feature: MA Experiment 20001557 PARAMETER Experiment Name: At_Drought_Soil_Dry_P Parameter: Treatment Value: Drought vs. No Drought
  misc_feature: MA Experiment ID: 20001558 Result: Up-regulated in Transcription
  misc_feature: MA Experiment 20001558 PARAMETER Experiment Name: At_Drought_Soil_Dry_P Parameter: Age (day) Value: 27
  misc_feature: MA Experiment 20001558 PARAMETER Experiment Name: At_Drought_Soil_Dry_P Parameter: Organism Value: A. thaliana
  misc_feature: MA Experiment 20001558 PARAMETER Experiment Name: At_Drought_Soil_Dry_P Parameter: Plant Line Value: WS
  misc_feature: MA Experiment 20001558 PARAMETER Experiment Name: At_Drought_Soil_Dry_P Parameter: Post Timepoint (hr) Value: 6
  misc_feature: MA Experiment 20001558 PARAMETER Experiment Name: At_Drought_Soil_Dry_P Parameter: Post-Treatment Value: Re-Water vs. No Drought
  misc_feature: MA Experiment 20001558 PARAMETER Experiment Name: At_Drought_Soil_Dry_P Parameter: Timepoint (day) Value: 13
  misc_feature: MA Experiment 20001558 PARAMETER Experiment Name: At_Drought_Soil_Dry_P Parameter: Treatment Value: Drought vs. No Drought
  misc_feature: MA Experiment ID: 20001560 Result: Up-regulated in Transcription
  misc_feature: MA Experiment 20001560 PARAMETER Experiment Name: At_Drought_Soil_Dry_P Parameter: Age (day) Value: 28
  misc_feature: MA Experiment 20001560 PARAMETER Experiment Name: At_Drought_Soil_Dry_P Parameter: Organism Value: A. thaliana
  misc_feature: MA Experiment 20001560 PARAMETER Experiment Name: At_Drought_Soil_Dry_P Parameter: Plant Line Value: WS
  misc_feature: MA Experiment 20001560 PARAMETER Experiment Name: At_Drought_Soil_Dry_P Parameter: Post Timepoint (hr) Value: None
  misc_feature: MA Experiment 20001560 PARAMETER Experiment Name: At_Drought_Soil_Dry_P Parameter: Post-Treatment Value: None
  misc_feature: MA Experiment 20001560 PARAMETER Experiment Name: At_Drought_Soil_Dry_P Parameter: Timepoint (day) Value: 14
  misc_feature: MA Experiment 20001560 PARAMETER Experiment Name: At_Drought_Soil_Dry_P Parameter: Treatment Value: Drought vs. No Drought
  misc_feature: MA Experiment ID: 20001904 Result: Up-regulated in Transcription
  misc_feature: MA Experiment 20001904 PARAMETER Experiment Name: At_Drought_Reproduction_P Parameter: Age (day) Value: 37
  misc_feature: MA Experiment 20001904 PARAMETER Experiment Name: At_Drought_Reproduction_P Parameter: Organism Value: A. thaliana
  misc_feature: MA Experiment 20001904 PARAMETER Experiment Name: At_Drought_Reproduction_P Parameter: Plant Line Value: WS
  misc_feature: MA Experiment 20001904 PARAMETER Experiment Name: At_Drought_Reproduction_P Parameter: Timepoint (day) Value: 7
  misc_feature: MA Experiment 20001904 PARAMETER Experiment Name: At_Drought_Reproduction_P Parameter: Tissue Value: Rosettes
  misc_feature: MA Experiment 20001904 PARAMETER Experiment Name: At_Drought_Reproduction_P Parameter: Treatment Value: Drought vs. No Drought
aaaaagagtaattgaacaaaagaaagaaaaactgataatgaagggtcttcatctccacctcgtcctagtcaccatgacgatcgttgcctccatcgccgccgctgcaccggctgctcccggaggagctctggctgatgaatgcaaccaggattttcaaaaggtgactttgtgtttggactttgcgaccgggaaggcaacaattccgtctaagaagtgttgtgacgctgttgaagatatcaaagaaagagatccaaagtgtttgtgtttcgttatacaacaagcgaagacaggaggacaagccttgaaggatcttggtgttcaagaagacaaactcattcaactcccaacttcttgtcagctccacaacgctagcattaccaactgtccaaagcttctagggatttcacctagctcgccagacgcagccgtattcacaaacaatgccacaacaacaccggtggcaccagcaggaaagtctccggcaactccagctacgtccacggataagggaggatcagcttcagcaaaggatggtcacgcagtcgttgctctagccgtcgctttgatggccgtctcctttgtcttgaccttgcctagacatgtcacattagggatgtaatcttttcttatgaagttggttggtgcttttgtttttgtcccttttgtttcaaaacttatctttcaagtgtgtttctttgttcggacatttgttgtaatgagtcaacttcccactcaaatctgatatctctccgcaaatgagtaaatttatgct

SEQ ID NO: 29703 - protein, 205 aa, Arabidopsis thaliana
  peptide (1)..(205): Ceres Seq. ID no. 12332757
  misc_feature (47)..(128): Pfam Name: Protease inhibitor/seed storage/LTP family Pfam Description: Protease inhibitor/seed storage/LTP family
  misc_feature (20)..(196): Homolog of NCBI NO: 38344972 NR Description: OSJNBa0072F16.17 [Oryza sativa (japonica
  misc_feature (16)..(174): Homolog of NCBI NO: 28269449 NR Description: putative protease inhibitor
  misc_feature (23)..(193): Homolog of NCBI NO: 25553595 NR Description: OJ1656_E11.26 [Oryza sativa (japonica
  misc_feature (25)..(194): Homolog of NCBI NO: 25553602 NR Description: OJ1656_E11.34 [Oryza sativa (japonica
  misc_feature (17)..(182): Homolog of NCBI NO: 34394084 NR Description: lipid transfer protein-like
  misc_feature (12)..(195): Homolog of NCBI NO: 25553588 NR Description: OJ1656_E11.14 [Oryza sativa (japonica
  misc_feature (16)..(173): Homolog of NCBI NO: 15224863 NR Description: unknown protein; protein id: At2g44300.1
  misc_feature (23)..(178): Homolog of NCBI NO: 15224862 NR Description: unknown protein; protein id: At2g44290.1
  misc_feature (13)..(205): Homolog of NCBI NO: 21553541 NR Description: lipid transfer protein, putative [Arabidopsis
  misc_feature (13)..(205): Homolog of NCBI NO: 15217777 NR Description: lipid transfer protein, putative
KRVIEQKKEKLIMKGLHLHLVLVTMTIVASIAAAAPAAPGGALADECNQDFQKVTLCLDFATGKATIPSKKCCDAVEDIKERDPKCLCFVIQQAKTGGQALKDLGVQEDKLIQLPTSCQLHNASITNCPKLLGISPSSPDAAVFTNNATTTPVAPAGKSPATPATSTDKGGSASAKDGHAVVALAVALMAVSFVLTLPRHVTLGM

SEQ ID NO: 29704 - protein, 193 aa, Arabidopsis thaliana
  peptide (1)..(193): Ceres Seq. ID no. 12332758
  misc_feature (35)..(116): Pfam Name: Protease inhibitor/seed storage/LTP family Pfam Description: Protease inhibitor/seed storage/LTP family
  misc_feature (8)..(184): Homolog of NCBI NO: 38344972 NR Description: OSJNBa0072F16.17 [Oryza sativa (japonica
  misc_feature (4)..(162): Homolog of NCBI NO: 28269449 NR Description: putative protease inhibitor
  misc_feature (11)..(181): Homolog of NCBI NO: 25553595 NR Description: OJ1656_E11.26 [Oryza sativa (japonica
  misc_feature (13)..(182): Homolog of NCBI NO: 25553602 NR Description: OJ1656_E11.34 [Oryza sativa (japonica
  misc_feature (5)..(170): Homolog of NCBI NO: 34394084 NR Description: lipid transfer protein-like
  misc_feature (1)..(183): Homolog of NCBI NO: 25553588 NR Description: OJ1656_E11.14 [Oryza sativa (japonica
  misc_feature (4)..(161): Homolog of NCBI NO: 15224863 NR Description: unknown protein; protein id: At2g44300.1
  misc_feature (11)..(166): Homolog of NCBI NO: 15224862 NR Description: unknown protein; protein id: At2g44290.1
  misc_feature (1)..(193): Homolog of NCBI NO: 21553541 NR Description: lipid transfer protein, putative [Arabidopsis
  misc_feature (1)..(193): Homolog of NCBI NO: 15217777 NR Description: lipid transfer protein, putative
MKGLHLHLVLVTMTIVASIAAAAPAAPGGALADECNQDFQKVTLCLDFATGKATIPSKKCCDAVEDIKERDPKCLCFVIQQAKTGGQALKDLGVQEDKLIQLPTSCQLHNASITNCPKLLGISPSSPDAAVFTNNATTTPVAPAGKSPATPATSTDKGGSASAKDGHAVVALAVALMAVSFVLTLPRHVTLGM

SEQ ID NO: 29705 - protein, 181 aa, Arabidopsis thaliana
  peptide (1)..(181): Ceres Seq. ID no. 12332759
  misc_feature (23)..(104): Pfam Name: Protease inhibitor/seed storage/LTP family Pfam Description: Protease inhibitor/seed storage/LTP family
  misc_feature (1)..(172): Homolog of NCBI NO: 38344972 NR Description: OSJNBa0072F16.17 [Oryza sativa (japonica
  misc_feature (1)..(150): Homolog of NCBI NO: 28269449 NR Description: putative protease inhibitor
  misc_feature (1)..(169): Homolog of NCBI NO: 25553595 NR Description: OJ1656_E11.26 [Oryza sativa (japonica
  misc_feature (1)..(170): Homolog of NCBI NO: 25553602 NR Description: OJ1656_E11.34 [Oryza sativa (japonica
  misc_feature (1)..(158): Homolog of NCBI NO: 34394084 NR Description: lipid transfer protein-like
  misc_feature (1)..(171): Homolog of NCBI NO: 25553588 NR Description: OJ1656_E11.14 [Oryza sativa (japonica
  misc_feature (1)..(149): Homolog of NCBI NO: 15224863 NR Description: unknown protein; protein id: At2g44300.1
  misc_feature (1)..(154): Homolog of NCBI NO: 15224862 NR Description: unknown protein; protein id: At2g44290.1
  misc_feature (1)..(181): Homolog of NCBI NO: 21553541 NR Description: lipid transfer protein, putative [Arabidopsis
  misc_feature (1)..(181): Homolog of NCBI NO: 15217777 NR Description: lipid transfer protein, putative
MTIVASIAAAAPAAPGGALADECNQDFQKVTLCLDFATGKATIPSKKCCDAVEDIKERDPKCLCFVIQQAKTGGQALKDLGVQEDKLIQLPTSCQLHNASITNCPKLLGISPSSPDAAVFTNNATTTPVAPAGKSPATPATSTDKGGSASAKDGHAVVALAVALMAVSFVLTLPRHVTLGM

SEQ ID NO: 29706 - DNA, 748 bp, Arabidopsis thaliana
  misc_feature (1)..(748): Ceres Seq. ID no. 13486683
  misc_feature: MA Experiment ID: 108462 Result: Up-regulated in Transcription
  misc_feature: MA Experiment 108462 PARAMETER Experiment Name: At_Germinating_Seeds_cDNA_P Parameter: Age (day) Value: 2 vs. 0
  misc_feature: MA Experiment 108462 PARAMETER Experiment Name: At_Germinating_Seeds_cDNA_P Parameter: Tissue Value: Germinating Seeds
  misc_feature: MA Experiment ID: 108464 Result: Up-regulated in Transcription
  misc_feature: MA Experiment 108464 PARAMETER Experiment Name: At_Germinating_Seeds_cDNA_P Parameter: Age (day) Value: 4 vs. 0
  misc_feature: MA Experiment 108464 PARAMETER Experiment Name: At_Germinating_Seeds_cDNA_P Parameter: Tissue Value: Germinating Seeds
  misc_feature: MA Experiment ID: 108474 Result: Down-regulated in Transcription
  misc_feature: MA Experiment 108474 PARAMETER Experiment Name: At_Drought_Flowers_cDNA_P Parameter: Timepoint (hr) Value: null
  misc_feature: MA Experiment 108474 PARAMETER Experiment Name: At_Drought_Flowers_cDNA_P Parameter: Treatment Value: Drought vs. No Drought
  misc_feature: MA Experiment ID: 108573 Result: Down-regulated in Transcription
  misc_feature: MA Experiment 108573 PARAMETER Experiment Name: At_Drought_cDNA_P Parameter: Timepoint (hr) Value: 6
  misc_feature: MA Experiment 108573 PARAMETER Experiment Name: At_Drought_cDNA_P Parameter: Tissue Value: Aerial
  misc_feature: MA Experiment 108573 PARAMETER Experiment Name: At_Drought_cDNA_P Parameter: Treatment Value: Drought vs. No Drought
  misc_feature: MA Experiment ID: 108577 Result: Down-regulated in Transcription
  misc_feature: MA Experiment 108577 PARAMETER Experiment Name: At_42deg_Heat_cDNA_P Parameter: Temperature (deg C) Value: 42 vs. 22
  misc_feature: MA Experiment 108577 PARAMETER Experiment Name: At_42deg_Heat_cDNA_P Parameter: Timepoint (hr) Value: 6
  misc_feature: MA Experiment 108577 PARAMETER Experiment Name: At_42deg_Heat_cDNA_P Parameter: Tissue Value: Aerial
  misc_feature: MA Experiment ID: 20000179 Result: Up-regulated in Transcription
  misc_feature: MA Experiment 20000179 PARAMETER Experiment Name: At_Germinating_Seeds_P Parameter: Age (hr) Value: 6 vs. 0
  misc_feature: MA Experiment 20000179 PARAMETER Experiment Name: At_Germinating_Seeds_P Parameter: Tissue Value: Germinating Seeds
  misc_feature: MA Experiment ID: 20000180 Result: Up-regulated in Transcription
  misc_feature: MA Experiment 20000180 PARAMETER Experiment Name: At_Germinating_Seeds_P Parameter: Age (hr) Value: 24 vs. 0
  misc_feature: MA Experiment 20000180 PARAMETER Experiment Name: At_Germinating_Seeds_P Parameter: Tissue Value: Germinating Seeds
  misc_feature: MA Experiment ID: 20000184 Result: Up-regulated in Transcription
  misc_feature: MA Experiment 20000184 PARAMETER Experiment Name: At_Shoots__P Parameter: Age (day) Value: 7
  misc_feature: MA Experiment 20000184 PARAMETER Experiment Name: At_Shoots__P Parameter: Tissue Value: Shoots vs. Whole Plant
  misc_feature: MA Experiment ID: 20000185 Result: Up-regulated in Transcription
  misc_feature: MA Experiment 20000185 PARAMETER Experiment Name: At_Roots__P Parameter: Age (day) Value: 7 vs. 21
  misc_feature: MA Experiment 20000185 PARAMETER Experiment Name: At_Roots__P Parameter: Organism Value: A. thaliana
  misc_feature: MA Experiment 20000185 PARAMETER Experiment Name: At_Roots__P Parameter: Tissue Value: Roots vs. Whole Plant
  misc_feature: MA Experiment ID: 20000227 Result: Up-regulated in Transcription
  misc_feature: MA Experiment 20000227 PARAMETER Experiment Name: At_Root-Tips-vs-Tops_P Parameter: Tissue Value: Root Tips vs. Root Tops
  misc_feature: MA Experiment ID: 20000234 Result: Up-regulated in Transcription
  misc_feature: MA Experiment 20000234 PARAMETER Experiment Name: At_Siliques_P Parameter: Age (day) Value: 21
  misc_feature: MA Experiment 20000234 PARAMETER Experiment Name: At_Siliques_P Parameter: Organism Value: A. thaliana
  misc_feature: MA Experiment 20000234 PARAMETER Experiment Name: At_Siliques_P Parameter: Plant Line Value: WS
  misc_feature: MA Experiment 20000234 PARAMETER Experiment Name: At_Siliques_P Parameter: Tissue Value: Less Than 5mm Siliques vs. Whole Plant
  misc_feature: MA Experiment ID: 20000235 Result: Up-regulated in Transcription
  misc_feature: MA Experiment 20000235 PARAMETER Experiment Name: At_Siliques_P Parameter: Age (day) Value: 21
  misc_feature: MA Experiment 20000235 PARAMETER Experiment Name: At_Siliques_P Parameter: Organism Value: A. thaliana
  misc_feature: MA Experiment 20000235 PARAMETER Experiment Name: At_Siliques_P Parameter: Plant Line Value: WS
  misc_feature: MA Experiment 20000235 PARAMETER Experiment Name: At_Siliques_P Parameter: Tissue Value: 5-10mm Siliques vs. Whole Plant
  misc_feature: MA Experiment ID: 20000438 Result: Up-regulated in Transcription
  misc_feature: MA Experiment 20000438 PARAMETER Experiment Name: At_Shoots__P Parameter: Age (day) Value: 14
  misc_feature: MA Experiment 20000438 PARAMETER Experiment Name: At_Shoots__P Parameter: Tissue Value: Shoots vs. Whole Plant
  misc_feature: MA Experiment ID: 20000439 Result: Up-regulated in Transcription
  misc_feature: MA Experiment 20000439 PARAMETER Experiment Name: At_Roots__P Parameter: Age (day) Value: 14 vs. 21
  misc_feature: MA Experiment 20000439 PARAMETER Experiment Name: At_Roots__P Parameter: Organism Value: A. thaliana
  misc_feature: MA Experiment 20000439 PARAMETER Experiment Name: At_Roots__P Parameter: Tissue Value: Roots vs. Whole Plant
  misc_feature: MA Experiment ID: 20000495 Result: Up-regulated in Transcription
  misc_feature: MA Experiment 20000495 PARAMETER Experiment Name: At_Guard_Cells_P Parameter: Harvest Date Value: 8/2/2002
  misc_feature: MA Experiment 20000495 PARAMETER Experiment Name: At_Guard_Cells_P Parameter: Organism Value: A. thaliana
  misc_feature: MA Experiment 20000495 PARAMETER Experiment Name: At_Guard_Cells_P Parameter: Tissue Value: Guard Cells vs. Leaves
  misc_feature: MA Experiment ID: 20000527 Result: Down-regulated in Transcription
  misc_feature: MA Experiment 20000527 PARAMETER Experiment Name: At_10percent_PEG_P Parameter: Age (day) Value: 20
  misc_feature: MA Experiment 20000527 PARAMETER Experiment Name: At_10percent_PEG_P Parameter: Organism Value: A. thaliana
  misc_feature: MA Experiment 20000527 PARAMETER Experiment Name: At_10percent_PEG_P Parameter: Plant Line Value: WS
  misc_feature: MA Experiment 20000527 PARAMETER Experiment Name: At_10percent_PEG_P Parameter: Timepoint (day) Value: 20
  misc_feature: MA Experiment 20000527 PARAMETER Experiment Name: At_10percent_PEG_P Parameter: Tissue Value: Whole Plant
  misc_feature: MA Experiment 20000527 PARAMETER Experiment Name: At_10percent_PEG_P Parameter: Treatment Value: 10percent PEG vs. No Treatment
  misc_feature: MA Experiment ID: 20000794 Result: Down-regulated in Transcription
  misc_feature: MA Experiment 20000794 PARAMETER Experiment Name: At_Petals_P Parameter: Age (day) Value: 23-25 days
  misc_feature: MA Experiment 20000794 PARAMETER Experiment Name: At_Petals_P Parameter: Plant Line Value: WS
  misc_feature: MA Experiment 20000794 PARAMETER Experiment Name: At_Petals_P Parameter: Tissue Value: Petals vs. Whole plant
  misc_feature: MA Experiment ID: 20001451 Result: Up-regulated in Transcription
  misc_feature: MA Experiment 20001451 PARAMETER Experiment Name: At_Far-red-induction_P Parameter: Age (day) Value: 7
  misc_feature: MA Experiment 20001451 PARAMETER Experiment Name: At_Far-red-induction_P Parameter: Light Value: Far-red vs. White
  misc_feature: MA Experiment 20001451 PARAMETER Experiment Name: At_Far-red-induction_P Parameter: Organism Value: A. thaliana
  misc_feature: MA Experiment 20001451 PARAMETER Experiment Name: At_Far-red-induction_P Parameter: Plant Line Value: Columbia
  misc_feature: MA Experiment 20001451 PARAMETER Experiment Name: At_Far-red-induction_P Parameter: Timepoint (hr) Value: 24
  misc_feature: MA Experiment 20001451 PARAMETER Experiment Name: At_Far-red-induction_P Parameter: Tissue Value: Whole Plant
  misc_feature: MA Experiment ID: 20001555 Result: Down-regulated in Transcription
  misc_feature: MA Experiment 20001555 PARAMETER Experiment Name: At_Drought_Soil_Dry_P Parameter: Age (day) Value: 24
  misc_feature: MA Experiment 20001555 PARAMETER Experiment Name: At_Drought_Soil_Dry_P Parameter: Organism Value: A. thaliana
  misc_feature: MA Experiment 20001555 PARAMETER Experiment Name: At_Drought_Soil_Dry_P Parameter: Plant Line Value: WS
  misc_feature: MA Experiment 20001555 PARAMETER Experiment Name: At_Drought_Soil_Dry_P Parameter: Post Timepoint (hr) Value: None
  misc_feature: MA Experiment 20001555 PARAMETER Experiment Name: At_Drought_Soil_Dry_P Parameter: Post-Treatment Value: None
  misc_feature: MA Experiment 20001555 PARAMETER Experiment Name: At_Drought_Soil_Dry_P Parameter: Timepoint (day) Value: 10
  misc_feature: MA Experiment 20001555 PARAMETER Experiment Name: At_Drought_Soil_Dry_P Parameter: Treatment Value: Drought vs. No Drought
  misc_feature: MA Experiment ID: 20001560 Result: Up-regulated in Transcription
  misc_feature: MA Experiment 20001560 PARAMETER Experiment Name: At_Drought_Soil_Dry_P Parameter: Age (day) Value: 28
  misc_feature: MA Experiment 20001560 PARAMETER Experiment Name: At_Drought_Soil_Dry_P Parameter: Organism Value: A. thaliana
  misc_feature: MA Experiment 20001560 PARAMETER Experiment Name: At_Drought_Soil_Dry_P Parameter: Plant Line Value: WS
  misc_feature: MA Experiment 20001560 PARAMETER Experiment Name: At_Drought_Soil_Dry_P Parameter: Post Timepoint (hr) Value: None
  misc_feature: MA Experiment 20001560 PARAMETER Experiment Name: At_Drought_Soil_Dry_P Parameter: Post-Treatment Value: None
  misc_feature: MA Experiment 20001560 PARAMETER Experiment Name: At_Drought_Soil_Dry_P Parameter: Timepoint (day) Value: 14
  misc_feature: MA Experiment 20001560 PARAMETER Experiment Name: At_Drought_Soil_Dry_P Parameter: Treatment Value: Drought vs. No Drought
  misc_feature: MA Experiment ID: 20001911 Result: Down-regulated in Transcription
  misc_feature: MA Experiment 20001911 PARAMETER Experiment Name: At_Drought_Reproduction_P Parameter: Age (day) Value: 40
  misc_feature: MA Experiment 20001911 PARAMETER Experiment Name: At_Drought_Reproduction_P Parameter: Organism Value: A. thaliana
  misc_feature: MA Experiment 20001911 PARAMETER Experiment Name: At_Drought_Reproduction_P Parameter: Plant Line Value: WS
  misc_feature: MA Experiment 20001911 PARAMETER Experiment Name: At_Drought_Reproduction_P Parameter: Timepoint (day) Value: 10
  misc_feature: MA Experiment 20001911 PARAMETER Experiment Name: At_Drought_Reproduction_P Parameter: Tissue Value: Flowers
  misc_feature: MA Experiment 20001911 PARAMETER Experiment Name: At_Drought_Reproduction_P Parameter: Treatment Value: Drought vs. No Drought
agcattttcaacatttctattaatatttccatagactagatctctctttcttatacatccatatcaccgatgatgcctcgccgtgacgtcctcttcctctcactcctcctcgtcatcgccaccgtctccgctgtcgcattagccgacgatgaagcagattgtgtctacacattcttccttagaaccggatcaaccttcaaagccggtacagattcgatcataagcgctagagtctacgacaaatacggagactacatcgggatccgaaacctagaagcatggggtggtttaatgggaccaggttacaactactacgagaggggtaatctcgacattttcagtgggaaagcaccatgtcttccgagcccagtctgttcattaaatctgacctctgacggctccggtgaccaccacggttggtatgttaactacgtggaagtcacgacagccggagttcatgcaaagtgctcgtaccaaagctttgatgttgagcaatggcttgcgtccgatacatcgccgtatgagctcagtgctgttcggaataactgtccagtttcgcttagggaaagtgtcggtcgggtcgggtctgagatccggaagactctctcttggatcgtgtgagagtagtgaatgaaatgtcaaatgtgtatgtgtgtgtgtaacttggagagttgttctttgttgtcttgtgaacgtgtgatggcaataatgaaaatgattcgatcgaataaaagttccgttctttgtt

SEQ ID NO: 29707 - protein, 183 aa, Arabidopsis thaliana
  peptide (1)..(183): Ceres Seq. ID no. 13486684
  misc_feature (31)..(155): Pfam Name: PLAT/LH2 domain Pfam Description: PLAT/LH2 domain
  misc_feature (31)..(160): Homolog of NCBI NO: 21740887 NR Description: OSJNBa0036B21.1 [Oryza sativa (japonica
  misc_feature (10)..(160): Homolog of NCBI NO: 10241929 NR Description: elicitor inducible protein [Nicotiana tabacum]
  misc_feature (26)..(163): Homolog of NCBI NO: 32492139 NR Description: OSJNBa0036B21.2 [Oryza sativa (japonica
  misc_feature (12)..(160): Homolog of NCBI NO: 7542598 NR Description: TMV-induced protein I [Capsicum annuum]
  misc_feature (21)..(160): Homolog of NCBI NO: 32492140 NR Description: OSJNBa0036B21.4 [Oryza sativa (japonica
  misc_feature (2)..(128): Homolog of NCBI NO: 15982879 NR Description: AT4g39730/T19P19_120 [Arabidopsis thaliana]
  misc_feature (2)..(183): Homolog of NCBI NO: 15236014 NR Description: expressed protein [Arabidopsis thaliana]
  misc_feature (10)..(183): Homolog of NCBI NO: 12667247 NR Description: dehydration stress-induced protein [Brassica
  misc_feature (2)..(183): Homolog of NCBI NO: 21553555 NR Description: dehydration stress-induced protein [Arabidopsis
  misc_feature (1)..(183): Homolog of NCBI NO: 18399899 NR Description: expressed protein [Arabidopsis thaliana]
MMPRRDVLFLSLLLVIATVSAVALADDEADCVYTFFLRTGSTFKAGTDSIISARVYDKYGDYIGIRNLEAWGGLMGPGYNYYERGNLDIFSGKAPCLPSPVCSLNLTSDGSGDHHGWYVNYVEVTTAGVHAKCSYQSFDVEQWLASDTSPYELSAVRNNCPVSLRESVGRVGSEIRKTLSWIV

SEQ ID NO: 29708 - protein, 182 aa, Arabidopsis thaliana
  peptide (1)..(182): Ceres Seq. ID no. 13486685
  misc_feature (30)..(154): Pfam Name: PLAT/LH2 domain Pfam Description: PLAT/LH2 domain
  misc_feature (30)..(159): Homolog of NCBI NO: 21740887 NR Description: OSJNBa0036B21.1 [Oryza sativa (japonica
  misc_feature (9)..(159): Homolog of NCBI NO: 10241929 NR Description: elicitor inducible protein [Nicotiana tabacum]
  misc_feature (25)..(162): Homolog of NCBI NO: 32492139 NR Description: OSJNBa0036B21.2 [Oryza sativa (japonica
  misc_feature (11)..(159): Homolog of NCBI NO: 7542598 NR Description: TMV-induced protein I [Capsicum annuum]
  misc_feature (20)..(159): Homolog of NCBI NO: 32492140 NR Description: OSJNBa0036B21.4 [Oryza sativa (japonica
  misc_feature (1)..(127): Homolog of NCBI NO: 15982879 NR Description: AT4g39730/T19P19_120 [Arabidopsis thaliana]
  misc_feature (1)..(182): Homolog of NCBI NO: 15236014 NR Description: expressed protein [Arabidopsis thaliana]
  misc_feature (9)..(182): Homolog of NCBI NO: 12667247 NR Description: dehydration stress-induced protein [Brassica
  misc_feature (1)..(182): Homolog of NCBI NO: 21553555 NR Description: dehydration stress-induced protein [Arabidopsis
  misc_feature (1)..(182): Homolog of NCBI NO: 18399899 NR Description: expressed protein [Arabidopsis thaliana]
MPRRDVLFLSLLLVIATVSAVALADDEADCVYTFFLRTGSTFKAGTDSIISARVYDKYGDYIGIRNLEAWGGLMGPGYNYYERGNLDIFSGKAPCLPSPVCSLNLTSDGSGDHHGWYVNYVEVTTAGVHAKCSYQSFDVEQWLASDTSPYELSAVRNNCPVSLRESVGRVGSEIRKTLSWIV

SEQ ID NO: 29709 - protein, 109 aa, Arabidopsis thaliana
  peptide (1)..(109): Ceres Seq. ID no. 13486686
  misc_feature (1)..(81): Pfam Name: PLAT/LH2 domain Pfam Description: PLAT/LH2 domain
  misc_feature (1)..(86): Homolog of NCBI NO: 21740887 NR Description: OSJNBa0036B21.1 [Oryza sativa (japonica
  misc_feature (1)..(86): Homolog of NCBI NO: 10241929 NR Description: elicitor inducible protein [Nicotiana tabacum]
  misc_feature (1)..(89): Homolog of NCBI NO: 32492139 NR Description: OSJNBa0036B21.2 [Oryza sativa (japonica
  misc_feature (1)..(86): Homolog of NCBI NO: 7542598 NR Description: TMV-induced protein I [Capsicum annuum]
  misc_feature (1)..(86): Homolog of NCBI NO: 32492140 NR Description: OSJNBa0036B21.4 [Oryza sativa (japonica
  misc_feature (1)..(54): Homolog of NCBI NO: 15982879 NR Description: AT4g39730/T19P19_120 [Arabidopsis thaliana]
  misc_feature (1)..(109): Homolog of NCBI NO: 15236014 NR Description: expressed protein [Arabidopsis thaliana]
  misc_feature (1)..(109): Homolog of NCBI NO: 12667247 NR Description: dehydration stress-induced protein [Brassica
  misc_feature (1)..(109): Homolog of NCBI NO: 21553555 NR Description: dehydration stress-induced protein [Arabidopsis
  misc_feature (1)..(109): Homolog of NCBI NO: 18399899 NR Description: expressed protein [Arabidopsis thaliana]
MGPGYNYYERGNLDIFSGKAPCLPSPVCSLNLTSDGSGDHHGWYVNYVEVTTAGVHAKCSYQSFDVEQWLASDTSPYELSAVRNNCPVSLRESVGRVGSEIRKTLSWIV

SEQ ID NO: 29710 - DNA, 1417 bp, Arabidopsis thaliana
  misc_feature (1)..(1417): Ceres Seq. ID no. 12336041
  misc_feature: MA Experiment ID: 108462 Result: Down-regulated in Transcription
  misc_feature: MA Experiment 108462 PARAMETER Experiment Name: At_Germinating_Seeds_cDNA_P Parameter: Age (day) Value: 2 vs. 0
  misc_feature: MA Experiment 108462 PARAMETER Experiment Name: At_Germinating_Seeds_cDNA_P Parameter: Tissue Value: Germinating Seeds
  misc_feature: MA Experiment ID: 108463 Result: Down-regulated in Transcription
  misc_feature: MA Experiment 108463 PARAMETER Experiment Name: At_Germinating_Seeds_cDNA_P Parameter: Age (day) Value: 3 vs. 0
  misc_feature: MA Experiment 108463 PARAMETER Experiment Name: At_Germinating_Seeds_cDNA_P Parameter: Tissue Value: Germinating Seeds
  misc_feature: MA Experiment ID: 108569 Result: Up-regulated in Transcription
  misc_feature: MA Experiment 108569 PARAMETER Experiment Name: At_0.001%_MeJA__cDNA_P Parameter: Timepoint (hr) Value: 6
  misc_feature: MA Experiment 108569 PARAMETER Experiment Name: At_0.001%_MeJA__cDNA_P Parameter: Tissue Value: Aerial
  misc_feature: MA Experiment 108569 PARAMETER Experiment Name: At_0.001%_MeJA__cDNA_P Parameter: Treatment Value: 0.001% MeJA vs. No Treatment
  misc_feature: MA Experiment ID: 20000087 Result: Down-regulated in Transcription
  misc_feature: MA Experiment 20000087 PARAMETER Experiment Name: At_100uM_ABA_Mutants_cDNA_P Parameter: Plant Line Value: WS
  misc_feature: MA Experiment 20000087 PARAMETER Experiment Name: At_100uM_ABA_Mutants_cDNA_P Parameter: Timepoint (hr) Value: 6
  misc_feature: MA Experiment 20000087 PARAMETER Experiment Name: At_100uM_ABA_Mutants_cDNA_P Parameter: Tissue Value: Aerial
  misc_feature: MA Experiment 20000087 PARAMETER Experiment Name: At_100uM_ABA_Mutants_cDNA_P Parameter: Treatment Value: 100uM ABA vs. No Treatment
  misc_feature: MA Experiment ID: 20000184 Result: Up-regulated in Transcription
  misc_feature: MA Experiment 20000184 PARAMETER Experiment Name: At_Shoots__P Parameter: Age (day) Value: 7
  misc_feature: MA Experiment 20000184 PARAMETER Experiment Name: At_Shoots__P Parameter: Tissue Value: Shoots vs. Whole Plant
  misc_feature: MA Experiment ID: 20000185 Result: Up-regulated in Transcription
  misc_feature: MA Experiment 20000185 PARAMETER Experiment Name: At_Roots__P Parameter: Age (day) Value: 7 vs. 21
  misc_feature: MA Experiment 20000185 PARAMETER Experiment Name: At_Roots__P Parameter: Organism Value: A. thaliana
  misc_feature: MA Experiment 20000185 PARAMETER Experiment Name: At_Roots__P Parameter: Tissue Value: Roots vs. Whole Plant
  misc_feature: MA Experiment ID: 20000286 Result: Up-regulated in Transcription
  misc_feature: MA Experiment 20000286 PARAMETER Experiment Name: At_Open_Flower_P Parameter: Age (day) Value: 21
  misc_feature: MA Experiment 20000286 PARAMETER Experiment Name: At_Open_Flower_P Parameter: Plant Line Value: WS
  misc_feature: MA Experiment 20000286 PARAMETER Experiment Name: At_Open_Flower_P Parameter: Tissue Value: Half Open vs. Whole Plant
  misc_feature: MA Experiment ID: 20000439 Result: Up-regulated in Transcription
  misc_feature: MA Experiment 20000439 PARAMETER Experiment Name: At_Roots__P Parameter: Age (day) Value: 14 vs. 21
  misc_feature: MA Experiment 20000439 PARAMETER Experiment Name: At_Roots__P Parameter: Organism Value: A. thaliana
  misc_feature: MA Experiment 20000439 PARAMETER Experiment Name: At_Roots__P Parameter: Tissue Value: Roots vs. Whole Plant
  misc_feature: MA Experiment ID: 20001557 Result: Up-regulated in Transcription
  misc_feature: MA Experiment 20001557 PARAMETER Experiment Name: At_Drought_Soil_Dry_P Parameter: Age (day) Value: 27
  misc_feature: MA Experiment 20001557 PARAMETER Experiment Name: At_Drought_Soil_Dry_P Parameter: Organism Value: A. thaliana
  misc_feature: MA Experiment 20001557 PARAMETER Experiment Name: At_Drought_Soil_Dry_P Parameter: Plant Line Value: WS
  misc_feature: MA Experiment 20001557 PARAMETER Experiment Name: At_Drought_Soil_Dry_P Parameter: Post Timepoint (hr) Value: 3
  misc_feature: MA Experiment 20001557 PARAMETER Experiment Name: At_Drought_Soil_Dry_P Parameter: Post-Treatment Value: Re-Water vs. No Drought
  misc_feature: MA Experiment 20001557 PARAMETER Experiment Name: At_Drought_Soil_Dry_P Parameter: Timepoint (day) Value: 13
  misc_feature: MA Experiment 20001557 PARAMETER Experiment Name: At_Drought_Soil_Dry_P Parameter: Treatment Value: Drought vs. No Drought
  misc_feature: MA Experiment ID: 20001558 Result: Up-regulated in Transcription
  misc_feature: MA Experiment 20001558 PARAMETER Experiment Name: At_Drought_Soil_Dry_P Parameter: Age (day) Value: 27
  misc_feature: MA Experiment 20001558 PARAMETER Experiment Name: At_Drought_Soil_Dry_P Parameter: Organism Value: A. thaliana
  misc_feature: MA Experiment 20001558 PARAMETER Experiment Name: At_Drought_Soil_Dry_P Parameter: Plant Line Value: WS
  misc_feature: MA Experiment 20001558 PARAMETER Experiment Name: At_Drought_Soil_Dry_P Parameter: Post Timepoint (hr) Value: 6
  misc_feature: MA Experiment 20001558 PARAMETER Experiment Name: At_Drought_Soil_Dry_P Parameter: Post-Treatment Value: Re-Water vs. No Drought
  misc_feature: MA Experiment 20001558 PARAMETER Experiment Name: At_Drought_Soil_Dry_P Parameter: Timepoint (day) Value: 13
  misc_feature: MA Experiment 20001558 PARAMETER Experiment Name: At_Drought_Soil_Dry_P Parameter: Treatment Value: Drought vs. No Drought
tctatctcagtttcgagactcattgcctcgccgagagagaaggagacgccatggaaaggcttcttcaaccatcttcttcttcttcctcaatttctccttccaaattcccttcacggacttctcctttccttccccgtctccgctcatcgggtctgagctttgtctcgactcaccggcccgagtcacgccgagtcagctcaatttcctgcaacagttcccagattccgtcactgtatacgcctataggatctaacacaactaacaattccttcaatgggtctcccaaatcggatgaatcgaaacctaatcccggatttctcacacggatcgcgacgtcggcttctgagcagcgaaagacgttatctactggaaccgttatactaatctctgcagtagctgtgcttttgcttaacccgcttcttgcaccacctgctttcgctagctttcaaactgcagctaaatccggttggctaacaagtgcgtggaccggtttccttgctggttgcttgcacacgctctcaggacctgatcacctcgctgctttagctccgctttcgatcggacgcagcaaaatggaaagtgctgctgttggagctctctggggatgtgggcatgatgctggtcaagtcatctttggtttactgtttctgctacttaaagaccggcttcacattgaagtattacaaacttggggtacaagaattgtgggattgactcttgttattatcggtgctatgggaatcaaggaagcttctgagattccagaaccttgtgtcgctttagaaaccgacatcagcatggtatcaacagagaaagaagccttaccactgcccaaaaagaagaagatcgggtttgctacatttgcaactggagtggttcacgggttgcaaccggatgctctgatgattgttttgcctgcattagctctcccatcacggttagcagggtctgcgtttttgataatgtttctggttgggacagttatagcgatgggaagttacacagcgtttattgggtcttgcagtgaggctttgaaagagaaagttccaaggatcacagagaaactaacttgggtttcgtcacttgtggctattggtcttggattgggaattgtcatcagccctttctttggttttagcctctactgagaaagtaaaagcttcttcaggtaaatgagacaagttgaaatctttgtagttcttatagaagaaagagagttttttttgggtccatatcactcgtattattgtcacctgtacgaacaaaatctcgtaatcttgcttcagaaactcctctcggagaaaaccatttggtgattctttttattttccttatttttaagagaagtttggttttggttctgaattatcgatcaactgcatgtaaccatactttgtaatattatcaaattttaacc

SEQ ID NO: 29711 - protein, 381 aa, Arabidopsis thaliana
  peptide (1)..(381): Ceres Seq. ID no. 12336042
  misc_feature (157)..(343): Homolog of NCBI NO: 33862611 NR Description: marine cyanobacterial conserved hypothetical
  misc_feature (121)..(381): Homolog of NCBI NO: 21397272 NR Description: Hypothetical protein [Oryza sativa (japonica
  misc_feature (110)..(381): Homolog of NCBI NO: 34897966 NR Description: hypothetical protein~similar to Arabidopsis
  misc_feature (17)..(381): Homolog of NCBI NO: 21592431 NR Description: unknown [Arabidopsis thaliana]
  misc_feature (17)..(381): Homolog of NCBI NO: 15724154 NR Description: At2g16800/T24I21.21 [Arabidopsis thaliana]
  misc_feature (17)..(381): Homolog of NCBI NO: 18398217 NR Description: expressed protein
  misc_feature (118)..(381): Homolog of NCBI NO: 7486794 NR Description: hypothetical protein M4E13.135 - Arabidopsis
  misc_feature (17)..(381): Homolog of NCBI NO: 18418571 NR Description: putative protein
YLSFETHCLAEREGDAMERLLQPSSSSSSISPSKFPSRTSPFLPRLRSSGLSFVSTHRPESRRVSSISCNSSQIPSLYTPIGSNTTNNSFNGSPKSDESKPNPGFLTRIATSASEQRKTLSTGTVILISAVAVLLLNPLLAPPAFASFQTAAKSGWLTSAWTGFLAGCLHTLSGPDHLAALAPLSIGRSKMESAAVGALWGCGHDAGQVIFGLLFLLLKDRLHIEVLQTWGTRIVGLTLVIIGAMGIKEASEIPEPCVALETDISMVSTEKEALPLPKKKKIGFATFATGVVHGLQPDALMIVLPALALPSRLAGSAFLIMFLVGTVIAMGSYTAFIGSCSEALKEKVPRITEKLTWVSSLVAIGLGLGIVISPFFGFSLY

SEQ ID NO: 29712 - protein, 365 aa, Arabidopsis thaliana
  peptide (1)..(365): Ceres Seq. ID no. 12336043
  misc_feature (141)..(327): Homolog of NCBI NO: 33862611 NR Description: marine cyanobacterial conserved hypothetical
  misc_feature (105)..(365): Homolog of NCBI NO: 21397272 NR Description: Hypothetical protein [Oryza sativa (japonica
  misc_feature (94)..(365): Homolog of NCBI NO: 34897966 NR Description: hypothetical protein~similar to Arabidopsis
  misc_feature (1)..(365): Homolog of NCBI NO: 21592431 NR Description: unknown [Arabidopsis thaliana]
  misc_feature (1)..(365): Homolog of NCBI NO: 15724154 NR Description: At2g16800/T24I21.21 [Arabidopsis thaliana]
  misc_feature (1)..(365): Homolog of NCBI NO: 18398217 NR Description: expressed protein
  misc_feature (102)..(365): Homolog of NCBI NO: 7486794 NR Description: hypothetical protein M4E13.135 - Arabidopsis
  misc_feature (1)..(365): Homolog of NCBI NO: 18418571 NR Description: putative protein
MERLLQPSSSSSSISPSKFPSRTSPFLPRLRSSGLSFVSTHRPESRRVSSISCNSSQIPSLYTPIGSNTTNNSFNGSPKSDESKPNPGFLTRIATSASEQRKTLSTGTVILISAVAVLLLNPLLAPPAFASFQTAAKSGWLTSAWTGFLAGCLHTLSGPDHLAALAPLSIGRSKMESAAVGALWGCGHDAGQVIFGLLFLLLKDRLHIEVLQTWGTRIVGLTLVIIGAMGIKEASEIPEPCVALETDISMVSTEKEALPLPKKKKIGFATFATGVVHGLQPDALMIVLPALALPSRLAGSAFLIMFLVGTVIAMGSYTAFIGSCSEALKEKVPRITEKLTWVSSLVAIGLGLGIVISPFFGFSLY

SEQ ID NO: 29713 - protein, 191 aa, Arabidopsis thaliana
  peptide (1)..(191): Ceres Seq. ID no. 12336044
  misc_feature (1)..(153): Homolog of NCBI NO: 33862611 NR Description: marine cyanobacterial conserved hypothetical
  misc_feature (1)..(191): Homolog of NCBI NO: 21397272 NR Description: Hypothetical protein [Oryza sativa (japonica
  misc_feature (1)..(191): Homolog of NCBI NO: 34897966 NR Description: hypothetical protein~similar to Arabidopsis
  misc_feature (1)..(191): Homolog of NCBI NO: 21592431 NR Description: unknown [Arabidopsis thaliana]
  misc_feature (1)..(191): Homolog of NCBI NO: 15724154 NR Description: At2g16800/T24I21.21 [Arabidopsis thaliana]
  misc_feature (1)..(191): Homolog of NCBI NO: 18398217 NR Description: expressed protein
  misc_feature (1)..(191): Homolog of NCBI NO: 7486794 NR Description: hypothetical protein M4E13.135 - Arabidopsis
  misc_feature (1)..(191): Homolog of NCBI NO: 18418571 NR Description: putative protein
MESAAVGALWGCGHDAGQVIFGLLFLLLKDRLHIEVLQTWGTRIVGLTLVIIGAMGIKEASEIPEPCVALETDISMVSTEKEALPLPKKKKIGFATFATGVVHGLQPDALMIVLPALALPSRLAGSAFLIMFLVGTVIAMGSYTAFIGSCSEALKEKVPRITEKLTWVSSLVAIGLGLGIVISPFFGFSLY

SEQ ID NO: 29714 - DNA, 832 bp, Arabidopsis thaliana
  misc_feature (1)..(832): Ceres Seq. ID no. 13491488
  misc_feature: MA Experiment ID: 108561 Result: Up-regulated in Transcription
  misc_feature: MA Experiment 108561 PARAMETER Experiment Name: At_100uM_ABA_cDNA_P Parameter: Timepoint (hr) Value: 6
  misc_feature: MA Experiment 108561 PARAMETER Experiment Name: At_100uM_ABA_cDNA_P Parameter: Tissue Value: Aerial
  misc_feature: MA Experiment 108561 PARAMETER Experiment Name: At_100uM_ABA_cDNA_P Parameter: Treatment Value: 100uM ABA vs. No Treatment
  misc_feature: MA Experiment ID: 108569 Result: Up-regulated in Transcription
  misc_feature: MA Experiment 108569 PARAMETER Experiment Name: At_0.001%_MeJA__cDNA_P Parameter: Timepoint (hr) Value: 6
  misc_feature: MA Experiment 108569 PARAMETER Experiment Name: At_0.001%_MeJA__cDNA_P Parameter: Tissue Value: Aerial
  misc_feature: MA Experiment 108569 PARAMETER Experiment Name: At_0.001%_MeJA__cDNA_P Parameter: Treatment Value: 0.001% MeJA vs. No Treatment
  misc_feature: MA Experiment ID: 108577 Result: Down-regulated in Transcription
  misc_feature: MA Experiment 108577 PARAMETER Experiment Name: At_42deg_Heat_cDNA_P Parameter: Temperature (deg C) Value: 42 vs. 22
  misc_feature: MA Experiment 108577 PARAMETER Experiment Name: At_42deg_Heat_cDNA_P Parameter: Timepoint (hr) Value: 6
  misc_feature: MA Experiment 108577 PARAMETER Experiment Name: At_42deg_Heat_cDNA_P Parameter: Tissue Value: Aerial
  misc_feature: MA Experiment ID: 108594 Result: Down-regulated in Transcription
  misc_feature: MA Experiment 108594 PARAMETER Experiment Name: At_Ler-rhl_Root_cDNA_P Parameter: Plant Line Value: null
  misc_feature: MA Experiment ID: 108595 Result: Up-regulated in Transcription
  misc_feature: MA Experiment 108595 PARAMETER Experiment Name: At_Ler-pi_Ovule_cDNA_P Parameter: Plant Line Value: null
  misc_feature: MA Experiment ID: 20000169 Result: Up-regulated in Transcription
  misc_feature: MA Experiment 20000169 PARAMETER Experiment Name: At_100uM_ABA_P Parameter: Age (day) Value: 14
  misc_feature: MA Experiment 20000169 PARAMETER Experiment Name: At_100uM_ABA_P Parameter: Organism Value: A. thaliana
  misc_feature: MA Experiment 20000169 PARAMETER Experiment Name: At_100uM_ABA_P Parameter: Plant Line Value: WS
  misc_feature: MA Experiment 20000169 PARAMETER Experiment Name: At_100uM_ABA_P Parameter: Timepoint (hr) Value: 6
  misc_feature: MA Experiment 20000169 PARAMETER Experiment Name: At_100uM_ABA_P Parameter: Tissue Value: Aerial
  misc_feature: MA Experiment 20000169 PARAMETER Experiment Name: At_100uM_ABA_P Parameter: Treatment Value: 100uM ABA vs. No Treatment
  misc_feature: MA Experiment ID: 20000180 Result: Up-regulated in Transcription
  misc_feature: MA Experiment 20000180 PARAMETER Experiment Name: At_Germinating_Seeds_P Parameter: Age (hr) Value: 24 vs. 0
  misc_feature: MA Experiment 20000180 PARAMETER Experiment Name: At_Germinating_Seeds_P Parameter: Tissue Value: Germinating Seeds
  misc_feature: MA Experiment ID: 20000211 Result: Up-regulated in Transcription
  misc_feature: MA Experiment 20000211 PARAMETER Experiment Name: At_0.001percent_MeJA__P Parameter: Age (day) Value: 14
  misc_feature: MA Experiment 20000211 PARAMETER Experiment Name: At_0.001percent_MeJA__P Parameter: Organism Value: A. thaliana
  misc_feature: MA Experiment 20000211 PARAMETER Experiment Name: At_0.001percent_MeJA__P Parameter: Plant Line Value: WS
  misc_feature: MA Experiment 20000211 PARAMETER Experiment Name: At_0.001percent_MeJA__P Parameter: Timepoint (hr) Value: 1
  misc_feature: MA Experiment 20000211 PARAMETER Experiment Name: At_0.001percent_MeJA__P Parameter: Tissue Value: Aerial
  misc_feature: MA Experiment 20000211 PARAMETER Experiment Name: At_0.001percent_MeJA__P Parameter: Treatment Value: 0.001percent MeJA vs. No Treatment
  misc_feature: MA Experiment ID: 20000227 Result: Down-regulated in Transcription
  misc_feature: MA Experiment 20000227 PARAMETER Experiment Name: At_Root-Tips-vs-Tops_P Parameter: Tissue Value: Root Tips vs. Root Tops
  misc_feature: MA Experiment ID: 20000265 Result: Up-regulated in Transcription
  misc_feature: MA Experiment 20000265 PARAMETER Experiment Name: At_Open_Flower_P Parameter: Age (day) Value: 21
  misc_feature: MA Experiment 20000265 PARAMETER Experiment Name: At_Open_Flower_P Parameter: Plant Line Value: WS
  misc_feature: MA Experiment 20000265 PARAMETER Experiment Name: At_Open_Flower_P Parameter: Tissue Value: Closed Flower vs. Whole Plant
  misc_feature: MA Experiment ID: 20000436 Result: Up-regulated in Transcription
  misc_feature: MA Experiment 20000436 PARAMETER Experiment Name: At_Drought_P Parameter: Age (day) Value: 7
  misc_feature: MA Experiment 20000436 PARAMETER Experiment Name: At_Drought_P Parameter: Organism Value: A. thaliana
  misc_feature: MA Experiment 20000436 PARAMETER Experiment Name: At_Drought_P Parameter: Plant Line Value: WS
  misc_feature: MA Experiment 20000436 PARAMETER Experiment Name: At_Drought_P Parameter: Timepoint (hr) Value: 12
  misc_feature: MA Experiment 20000436 PARAMETER Experiment Name: At_Drought_P Parameter: Tissue Value: Whole Plant
  misc_feature: MA Experiment 20000436 PARAMETER Experiment Name: At_Drought_P Parameter: Treatment Value: Drought vs. No Drought
  misc_feature: MA Experiment ID: 20000451 Result: Down-regulated in Transcription
  misc_feature: MA Experiment 20000451 PARAMETER Experiment Name: At_CS6879_Shoots-Roots_P Parameter: Age (day) Value: 14
  misc_feature: MA Experiment 20000451 PARAMETER Experiment Name: At_CS6879_Shoots-Roots_P Parameter: Organism Value: A. thaliana
  misc_feature: MA Experiment 20000451 PARAMETER Experiment Name: At_CS6879_Shoots-Roots_P Parameter: Plant Line Value: CS6879 vs. WS
  misc_feature: MA Experiment 20000451 PARAMETER Experiment Name: At_CS6879_Shoots-Roots_P Parameter: Tissue Value: Roots
  misc_feature: MA Experiment ID: 20000453 Result: Up-regulated in Transcription
  misc_feature: MA Experiment 20000453 PARAMETER Experiment Name: At_100uM_ABA_P Parameter: Age (day) Value: 15
  misc_feature: MA Experiment 20000453 PARAMETER Experiment Name: At_100uM_ABA_P Parameter: Organism Value: A. thaliana
  misc_feature: MA Experiment 20000453 PARAMETER Experiment Name: At_100uM_ABA_P Parameter: Plant Line Value: WS
  misc_feature: MA Experiment 20000453 PARAMETER Experiment Name: At_100uM_ABA_P Parameter: Timepoint (hr) Value: 24
  misc_feature: MA Experiment 20000453 PARAMETER Experiment Name: At_100uM_ABA_P Parameter: Tissue Value: Aerial
  misc_feature: MA Experiment 20000453 PARAMETER Experiment Name: At_100uM_ABA_P Parameter: Treatment Value: 100uM ABA vs. No Treatment
  misc_feature: MA Experiment ID: 20001451 Result: Down-regulated in Transcription
  misc_feature: MA Experiment 20001451 PARAMETER Experiment Name: At_Far-red-induction_P Parameter: Age (day) Value: 7
  misc_feature: MA Experiment 20001451 PARAMETER Experiment Name: At_Far-red-induction_P Parameter: Light Value: Far-red vs. White
  misc_feature: MA Experiment 20001451 PARAMETER Experiment Name: At_Far-red-induction_P Parameter: Organism Value: A. thaliana
  misc_feature: MA Experiment 20001451 PARAMETER Experiment Name: At_Far-red-induction_P Parameter: Plant Line Value: Columbia
  misc_feature: MA Experiment 20001451 PARAMETER Experiment Name: At_Far-red-induction_P Parameter: Timepoint (hr) Value: 24
  misc_feature: MA Experiment 20001451 PARAMETER Experiment Name: At_Far-red-induction_P Parameter: Tissue Value: Whole Plant
  misc_feature: MA Experiment ID: 20001554 Result: Up-regulated in Transcription
  misc_feature: MA Experiment 20001554 PARAMETER Experiment Name: At_Drought_Soil_Dry_P Parameter: Age (day) Value: 21
  misc_feature: MA Experiment 20001554 PARAMETER Experiment Name: At_Drought_Soil_Dry_P Parameter: Organism Value: A. thaliana
  misc_feature: MA Experiment 20001554 PARAMETER Experiment Name: At_Drought_Soil_Dry_P Parameter: Plant Line Value: WS
  misc_feature: MA Experiment 20001554 PARAMETER Experiment Name: At_Drought_Soil_Dry_P Parameter: Post Timepoint (hr) Value: None
  misc_feature: MA Experiment 20001554 PARAMETER Experiment Name: At_Drought_Soil_Dry_P Parameter: Post-Treatment Value: None
  misc_feature: MA Experiment 20001554 PARAMETER Experiment Name: At_Drought_Soil_Dry_P Parameter: Timepoint (day) Value: 7
  misc_feature: MA Experiment 20001554 PARAMETER Experiment Name: At_Drought_Soil_Dry_P Parameter: Treatment Value: Drought vs. No Drought
  misc_feature: MA Experiment ID: 20001555 Result: Up-regulated in Transcription
  misc_feature: MA Experiment 20001555 PARAMETER Experiment Name: At_Drought_Soil_Dry_P Parameter: Age (day) Value: 24
  misc_feature: MA Experiment 20001555 PARAMETER Experiment Name: At_Drought_Soil_Dry_P Parameter: Organism Value: A. thaliana
  misc_feature: MA Experiment 20001555 PARAMETER Experiment Name: At_Drought_Soil_Dry_P Parameter: Plant Line Value: WS
  misc_feature: MA Experiment 20001555 PARAMETER Experiment Name: At_Drought_Soil_Dry_P Parameter: Post Timepoint (hr) Value: None
  misc_feature: MA Experiment 20001555 PARAMETER Experiment Name: At_Drought_Soil_Dry_P Parameter: Post-Treatment Value: None
  misc_feature: MA Experiment 20001555 PARAMETER Experiment Name: At_Drought_Soil_Dry_P Parameter: Timepoint (day) Value: 10
  misc_feature: MA Experiment 20001555 PARAMETER Experiment Name: At_Drought_Soil_Dry_P Parameter: Treatment Value: Drought vs. No Drought
  misc_feature: MA Experiment ID: 20001558 Result: Down-regulated in Transcription
  misc_feature: MA Experiment 20001558 PARAMETER Experiment Name: At_Drought_Soil_Dry_P Parameter: Age (day) Value: 27
  misc_feature: MA Experiment 20001558 PARAMETER Experiment Name: At_Drought_Soil_Dry_P Parameter: Organism Value: A. thaliana
  misc_feature: MA Experiment 20001558 PARAMETER Experiment Name: At_Drought_Soil_Dry_P Parameter: Plant Line Value: WS
  misc_feature: MA Experiment 20001558 PARAMETER Experiment Name: At_Drought_Soil_Dry_P Parameter: Post Timepoint (hr) Value: 6
  misc_feature: MA Experiment 20001558 PARAMETER Experiment Name: At_Drought_Soil_Dry_P Parameter: Post-Treatment Value: Re-Water vs. No Drought
  misc_feature: MA Experiment 20001558 PARAMETER Experiment Name: At_Drought_Soil_Dry_P Parameter: Timepoint (day) Value: 13
  misc_feature: MA Experiment 20001558 PARAMETER Experiment Name: At_Drought_Soil_Dry_P Parameter: Treatment Value: Drought vs. No Drought
  misc_feature: MA Experiment ID: 20001559 Result: Up-regulated in Transcription
  misc_feature: MA Experiment 20001559 PARAMETER Experiment Name: At_Drought_Soil_Dry_P Parameter: Age (day) Value: 28
  misc_feature: MA Experiment 20001559 PARAMETER Experiment Name: At_Drought_Soil_Dry_P Parameter: Organism Value: A. thaliana
  misc_feature: MA Experiment 20001559 PARAMETER Experiment Name: At_Drought_Soil_Dry_P Parameter: Plant Line Value: WS
  misc_feature: MA Experiment 20001559 PARAMETER Experiment Name: At_Drought_Soil_Dry_P Parameter: Post Timepoint (hr) Value: 29
  misc_feature: MA Experiment 20001559 PARAMETER Experiment Name: At_Drought_Soil_Dry_P Parameter: Post-Treatment Value: Re-Water vs. No Drought
  misc_feature: MA Experiment 20001559 PARAMETER Experiment Name: At_Drought_Soil_Dry_P Parameter: Timepoint (day) Value: 14
  misc_feature: MA Experiment 20001559 PARAMETER Experiment Name: At_Drought_Soil_Dry_P Parameter: Treatment Value: Drought vs. No Drought
aatcattcatccgtctctgcaaacaaaggaagaagaatcaagatggctctggaaatctgtgtgaaagctgctgttggtgctcctgatcatctcggcgactgtccgttcagccaacgggctcttctcacactcgaggagaagagtcttacctacaaaatccatctgattaacctctctgacaaaccccagtggttcttggacattagtcctcaagggaaagtaccagtgcttaagatcgacgacaagtgggtgactgattccgacgtcatcgttggtatactcgaggagaagtatcctgatccaccactcaagactcctgctgaatttgcctctgttggatccaacatttttggtacttttgggacattcttgaagagcaaagactccaatgacggatctgaacatgccttgcttgttgagctagaagctttggaaaaccatcttaagagtcacgatggcccttttatcgccggagaaagagtttccgcagtggatctaagcttagcaccaaagctttaccaccttcaagttgctcttggccatttcaaaagctggtctgtccctgagagctttccccatgtccataactacatgaagactctgttctcgctcgactcttttgagaaaactaagaccgaggaaaagtatgtgatctctggatgggctcccaaggttaacccttgaaactatgcaccgttatgagatcgttggtgtggtaatgttgttcaaggtctctctcttatatcagtcaaataatgtacttggacctttttatgtaatgtactgtatcaatcaaataagaagcctattttgaaataagatttgcctccat

SEQ ID NO: 29715 - protein, 227 aa, Arabidopsis thaliana
  peptide (1)..(227): Ceres Seq. ID no. 13491489
  misc_feature (133)..(205): Pfam Name: Glutathione S-transferase, C-terminal domain Pfam Description: Glutathione S-transferase, C-terminal domain
  misc_feature (142)..(227): Homolog of NCBI NO: 15223575 NR Description: dehydroascorbate reductase, putative [Arabidopsis
  misc_feature (15)..(226): Homolog of NCBI NO: 6939839 NR Description: GSH-dependent dehydroascorbate reductase 1
  misc_feature (18)..(227): Homolog of NCBI NO: 28192421 NR Description: dehydroascorbate reductase [Triticum aestivum]
  misc_feature (15)..(226): Homolog of NCBI NO: 28192425 NR Description: dehydroascorbate reductase [Oryza sativa]
  misc_feature (15)..(226): Homolog of NCBI NO: 15239354 NR Description: dehydroascorbate reductase, putative [Arabidopsis
  misc_feature (15)..(227): Homolog of NCBI NO: 28192427 NR Description: dehydroascorbate reductase [Nicotiana tabacum]
  misc_feature (15)..(226): Homolog of NCBI NO: 15222163 NR Description: dehydroascorbate reductase, putative [Arabidopsis
  misc_feature (15)..(226): Homolog of NCBI NO: 21593056 NR Description: GSH-dependent dehydroascorbate reductase 1,
  misc_feature (15)..(215): Homolog of NCBI NO: 25402899 NR Description: protein F18O14.33 [imported] - Arabidopsis
  misc_feature (15)..(227): Homolog of NCBI NO: 15223576 NR Description: dehydroascorbate reductase, putative [Arabidopsis
NHSSVSANKGRRIKMALEICVKAAVGAPDHLGDCPFSQRALLTLEEKSLTYKIHLINLSDKPQWFLDISPQGKVPVLKIDDKWVTDSDVIVGILEEKYPDPPLKTPAEFASVGSNIFGTFGTFLKSKDSNDGSEHALLVELEALENHLKSHDGPFIAGERVSAVDLSLAPKLYHLQVALGHFKSWSVPESFPHVHNYMKTLFSLDSFEKTKTEEKYVISGWAPKVNP

SEQ ID NO: 29716 - protein, 213 aa, Arabidopsis thaliana
  peptide (1)..(213): Ceres Seq. ID no. 13491490
  misc_feature (119)..(191): Pfam Name: Glutathione S-transferase, C-terminal domain Pfam Description: Glutathione S-transferase, C-terminal domain
  misc_feature (128)..(213): Homolog of NCBI NO: 15223575 NR Description: dehydroascorbate reductase, putative [Arabidopsis
  misc_feature (1)..(212): Homolog of NCBI NO: 6939839 NR Description: GSH-dependent dehydroascorbate reductase 1
  misc_feature (4)..(213): Homolog of NCBI NO: 28192421 NR Description: dehydroascorbate reductase [Triticum aestivum]
  misc_feature (1)..(212): Homolog of NCBI NO: 28192425 NR Description: dehydroascorbate reductase [Oryza sativa]
  misc_feature (1)..(212): Homolog of NCBI NO: 15239354 NR Description: dehydroascorbate reductase, putative [Arabidopsis
  misc_feature (1)..(213): Homolog of NCBI NO: 28192427 NR Description: dehydroascorbate reductase [Nicotiana tabacum]
  misc_feature (1)..(212): Homolog of NCBI NO: 15222163 NR Description: dehydroascorbate reductase, putative [Arabidopsis
  misc_feature (1)..(212): Homolog of NCBI NO: 21593056 NR Description: GSH-dependent dehydroascorbate reductase 1,
  misc_feature (1)..(201): Homolog of NCBI NO: 25402899 NR Description: protein F18O14.33 [imported] - Arabidopsis
  misc_feature (1)..(213): Homolog of NCBI NO: 15223576 NR Description: dehydroascorbate reductase, putative [Arabidopsis
MALEICVKAAVGAPDHLGDCPFSQRALLTLEEKSLTYKIHLINLSDKPQWFLDISPQGKVPVLKIDDKWVTDSDVIVGILEEKYPDPPLKTPAEFASVGSNIFGTFGTFLKSKDSNDGSEHALLVELEALENHLKSHDGPFIAGERVSAVDLSLAPKLYHLQVALGHFKSWSVPESFPHVHNYMKTLFSLDSFEKTKTEEKYVISGWAPKVNP

SEQ ID NO: 29717 - DNA, 720 bp, Arabidopsis thaliana
  misc_feature (1)..(720): Ceres Seq. ID no. 12329948
  misc_feature: MA Experiment ID: 108461 Result: Down-regulated in Transcription
  misc_feature: MA Experiment 108461 PARAMETER Experiment Name: At_Germinating_Seeds_cDNA_P Parameter: Age (day) Value: 1 vs. 0
  misc_feature: MA Experiment 108461 PARAMETER Experiment Name: At_Germinating_Seeds_cDNA_P Parameter: Tissue Value: Germinating Seeds
  misc_feature: MA Experiment ID: 108462 Result: Down-regulated in Transcription
  misc_feature: MA Experiment 108462 PARAMETER Experiment Name: At_Germinating_Seeds_cDNA_P Parameter: Age (day) Value: 2 vs. 0
  misc_feature: MA Experiment 108462 PARAMETER Experiment Name: At_Germinating_Seeds_cDNA_P Parameter: Tissue Value: Germinating Seeds
  misc_feature: MA Experiment ID: 108463 Result: Down-regulated in Transcription
  misc_feature: MA Experiment 108463 PARAMETER Experiment Name: At_Germinating_Seeds_cDNA_P Parameter: Age (day) Value: 3 vs. 0
  misc_feature: MA Experiment 108463 PARAMETER Experiment Name: At_Germinating_Seeds_cDNA_P Parameter: Tissue Value: Germinating Seeds
  misc_feature: MA Experiment ID: 108464 Result: Down-regulated in Transcription
  misc_feature: MA Experiment 108464 PARAMETER Experiment Name: At_Germinating_Seeds_cDNA_P Parameter: Age (day) Value: 4 vs. 0
  misc_feature: MA Experiment 108464 PARAMETER Experiment Name: At_Germinating_Seeds_cDNA_P Parameter: Tissue Value: Germinating Seeds
  misc_feature: MA Experiment ID: 108609 Result: Up-regulated in Transcription
  misc_feature: MA Experiment 108609 PARAMETER Experiment Name: At_100uM_ABA_cDNA_P Parameter: Timepoint (hr) Value: 24
  misc_feature: MA Experiment 108609 PARAMETER Experiment Name: At_100uM_ABA_cDNA_P Parameter: Tissue Value: Aerial
  misc_feature: MA Experiment 108609 PARAMETER Experiment Name: At_100uM_ABA_cDNA_P Parameter: Treatment Value: 100uM ABA vs. No Treatment
  misc_feature: MA Experiment ID: 20000113 Result: Up-regulated in Transcription
  misc_feature: MA Experiment 20000113 PARAMETER Experiment Name: At_42deg_Heat_cDNA_P Parameter: Temperature (deg C) Value: 42 vs. 22
  misc_feature: MA Experiment 20000113 PARAMETER Experiment Name: At_42deg_Heat_cDNA_P Parameter: Timepoint (hr) Value: 8
  misc_feature: MA Experiment 20000113 PARAMETER Experiment Name: At_42deg_Heat_cDNA_P Parameter: Tissue Value: Aerial
  misc_feature: MA Experiment ID: 20000227 Result: Down-regulated in Transcription
  misc_feature: MA Experiment 20000227 PARAMETER Experiment Name: At_Root-Tips-vs-Tops_P Parameter: Tissue Value: Root Tips vs. Root Tops
  misc_feature: MA Experiment ID: 20001555 Result: Up-regulated in Transcription
  misc_feature: MA Experiment 20001555 PARAMETER Experiment Name: At_Drought_Soil_Dry_P Parameter: Age (day) Value: 24
  misc_feature: MA Experiment 20001555 PARAMETER Experiment Name: At_Drought_Soil_Dry_P Parameter: Organism Value: A. thaliana
  misc_feature: MA Experiment 20001555 PARAMETER Experiment Name: At_Drought_Soil_Dry_P Parameter: Plant Line Value: WS
  misc_feature: MA Experiment 20001555 PARAMETER Experiment Name: At_Drought_Soil_Dry_P Parameter: Post Timepoint (hr) Value: None
  misc_feature: MA Experiment 20001555 PARAMETER Experiment Name: At_Drought_Soil_Dry_P Parameter: Post-Treatment Value: None
  misc_feature: MA Experiment 20001555 PARAMETER Experiment Name: At_Drought_Soil_Dry_P Parameter: Timepoint (day) Value: 10
  misc_feature: MA Experiment 20001555 PARAMETER Experiment Name: At_Drought_Soil_Dry_P Parameter: Treatment Value: Drought vs. No Drought
cctttttcagttgctctttcttggtgggaactgtttgagctcgagttctatgatgaacgtgagccggccggcgattcacccggttgatgctcttccggtggctcctactgccggagcgatcgatagaccaccagtgaggatgaaggatgtgcaaggcatgcccggaaccaccggcggtctcatcctccgtctctctcagttcgttcccgctcttatctccgtctccgtcatggtcactacctccgacttccgctccgccaccgcattctgttgcttggttcttgcggttagtctgcaaagcctgtggagcttgtctctatttcttgtcgatgcttatgctcttctagtgagaagaagccttcgaaatcactctgttgttcaatgtttcactgttggagatggagtcacatctacgctcacatttgcagctgcatctgcgtctgctggcataactgtactcatcaacgatcttggacaatgtaacgtgaatcactgcacaaggtttgagactgccacagcaatggccttcatcagctggtttgcggtgtctccttcctttattctcaacttctggtccttagccacccactaaatatatagcacacaagttgagttcagagaaatccatctttctagtataatgtaaataaagggtggagtataatgtatcgcttgattagcaaatgttttgagacagatattatattggaaaatcatagt

SEQ ID NO: 29718 - protein, 196 aa, Arabidopsis thaliana
  peptide (1)..(196): Ceres Seq. ID no. 12329949
  misc_feature (52)..(181): Pfam Name: Domain of unknown function (DUF588) Pfam Description: Domain of unknown function (DUF588)
  misc_feature (47)..(153): Homolog of NCBI NO: 7939530 NR Description: gb|AAD20689.1~gene_id:K14B15.11~similar to
  misc_feature (70)..(195): Homolog of NCBI NO: 11357817 NR Description: hypothetical protein F5K20.150 - Arabidopsis
  misc_feature (47)..(193): Homolog of NCBI NO: 22330130 NR Description: hypothetical protein; protein id: At1g49405.1
  misc_feature (47)..(193): Homolog of NCBI NO: 15241672 NR Description: putative protein; protein id: At5g02060.1
  misc_feature (47)..(195): Homolog of NCBI NO: 18409932 NR Description: putative protein
  misc_feature (47)..(195): Homolog of NCBI NO: 30686969 NR Description: expressed protein [Arabidopsis thaliana]
  misc_feature (53)..(179): Homolog of NCBI NO: 26006486 NR Description: Unknown protein [Oryza sativa (japonica
  misc_feature (18)..(195): Homolog of NCBI NO: 18401722 NR Description: expressed protein
  misc_feature (18)..(196): Homolog of NCBI NO: 25408537 NR Description: hypothetical protein At2g37200 [imported] -
  misc_feature (17)..(196): Homolog of NCBI NO: 30687069 NR Description: expressed protein [Arabidopsis thaliana]
LFQLLFLGGNCLSSSSMMNVSRPAIHPVDALPVAPTAGAIDRPPVRMKDVQGMPGTTGGLILRLSQFVPALISVSVMVTTSDFRSATAFCCLVLAVSLQSLWSLSLFLVDAYALLVRRSLRNHSVVQCFTVGDGVTSTLTFAAASASAGITVLINDLGQCNVNHCTRFETATAMAFISWFAVSPSFILNFWSLATH

SEQ ID NO: 29719 - protein, 180 aa, Arabidopsis thaliana
  peptide (1)..(180): Ceres Seq. ID no. 12329950
  misc_feature (36)..(165): Pfam Name: Domain of unknown function (DUF588) Pfam Description: Domain of unknown function (DUF588)
  misc_feature (31)..(137): Homolog of NCBI NO: 7939530 NR Description: gb|AAD20689.1~gene_id:K14B15.11~similar to
  misc_feature (54)..(179): Homolog of NCBI NO: 11357817 NR Description: hypothetical protein F5K20.150 - Arabidopsis
  misc_feature (31)..(177): Homolog of NCBI NO: 22330130 NR Description: hypothetical protein; protein id: At1g49405.1
  misc_feature (31)..(177): Homolog of NCBI NO: 15241672 NR Description: putative protein; protein id: At5g02060.1
  misc_feature (31)..(179): Homolog of NCBI NO: 18409932 NR Description: putative protein
  misc_feature (31)..(179): Homolog of NCBI NO: 30686969 NR Description: expressed protein [Arabidopsis thaliana]
  misc_feature (37)..(163): Homolog of NCBI NO: 26006486 NR Description: Unknown protein [Oryza sativa (japonica
  misc_feature (2)..(179): Homolog of NCBI NO: 18401722 NR Description: expressed protein
  misc_feature (2)..(180): Homolog of NCBI NO: 25408537 NR Description: hypothetical protein At2g37200 [imported] -
  misc_feature (1)..(180): Homolog of NCBI NO: 30687069 NR Description: expressed protein [Arabidopsis thaliana]
MMNVSRPAIHPVDALPVAPTAGAIDRPPVRMKDVQGMPGTTGGLILRLSQFVPALISVSVMVTTSDFRSATAFCCLVLAVSLQSLWSLSLFLVDAYALLVRRSLRNHSVVQCFTVGDGVTSTLTFAAASASAGITVLINDLGQCNVNHCTRFETATAMAFISWFAVSPSFILNFWSLATH

SEQ ID NO: 29720 - protein, 179 aa, Arabidopsis thaliana
  peptide (1)..(179): Ceres Seq. ID no. 12329951
  misc_feature (35)..(164): Pfam Name: Domain of unknown function (DUF588) Pfam Description: Domain of unknown function (DUF588)
  misc_feature (30)..(136): Homolog of NCBI NO: 7939530 NR Description: gb|AAD20689.1~gene_id:K14B15.11~similar to
  misc_feature (53)..(178): Homolog of NCBI NO: 11357817 NR Description: hypothetical protein F5K20.150 - Arabidopsis
  misc_feature (30)..(176): Homolog of NCBI NO: 22330130 NR Description: hypothetical protein; protein id: At1g49405.1
  misc_feature (30)..(176): Homolog of NCBI NO: 15241672 NR Description: putative protein; protein id: At5g02060.1
  misc_feature (30)..(178): Homolog of NCBI NO: 18409932 NR Description: putative protein
  misc_feature (30)..(178): Homolog of NCBI NO: 30686969 NR Description: expressed protein [Arabidopsis thaliana]
  misc_feature (36)..(162): Homolog of NCBI NO: 26006486 NR Description: Unknown protein [Oryza sativa (japonica
  misc_feature (1)..(178): Homolog of NCBI NO: 18401722 NR Description: expressed protein
  misc_feature (1)..(179): Homolog of NCBI NO: 25408537 NR Description: hypothetical protein At2g37200 [imported] -
  misc_feature (1)..(179): Homolog of NCBI NO: 30687069 NR Description: expressed protein [Arabidopsis thaliana]
MNVSRPAIHPVDALPVAPTAGAIDRPPVRMKDVQGMPGTTGGLILRLSQFVPALISVSVMVTTSDFRSATAFCCLVLAVSLQSLWSLSLFLVDAYALLVRRSLRNHSVVQCFTVGDGVTSTLTFAAASASAGITVLINDLGQCNVNHCTRFETATAMAFISWFAVSPSFILNFWSLATH

SEQ ID NO: 29721 - DNA, 812 bp, Arabidopsis thaliana
  misc_feature (1)..(812): Ceres Seq. ID no. 12332051
  misc_feature: MA Experiment ID: 108577 Result: Down-regulated in Transcription
  misc_feature: MA Experiment 108577 PARAMETER Experiment Name: At_42deg_Heat_cDNA_P Parameter: Temperature (deg C) Value: 42 vs. 22
  misc_feature: MA Experiment 108577 PARAMETER Experiment Name: At_42deg_Heat_cDNA_P Parameter: Timepoint (hr) Value: 6
  misc_feature: MA Experiment 108577 PARAMETER Experiment Name: At_42deg_Heat_cDNA_P Parameter: Tissue Value: Aerial
  misc_feature: MA Experiment ID: 20000179 Result: Up-regulated in Transcription
  misc_feature: MA Experiment 20000179 PARAMETER Experiment Name: At_Germinating_Seeds_P Parameter: Age (hr) Value: 6 vs. 0
  misc_feature: MA Experiment 20000179 PARAMETER Experiment Name: At_Germinating_Seeds_P Parameter: Tissue Value: Germinating Seeds
  misc_feature: MA Experiment ID: 20000180 Result: Up-regulated in Transcription
  misc_feature: MA Experiment 20000180 PARAMETER Experiment Name: At_Germinating_Seeds_P Parameter: Age (hr) Value: 24 vs. 0
  misc_feature: MA Experiment 20000180 PARAMETER Experiment Name: At_Germinating_Seeds_P Parameter: Tissue Value: Germinating Seeds
  misc_feature: MA Experiment ID: 20000184 Result: Down-regulated in Transcription
  misc_feature: MA Experiment 20000184 PARAMETER Experiment Name: At_Shoots__P Parameter: Age (day) Value: 7
  misc_feature: MA Experiment 20000184 PARAMETER Experiment Name: At_Shoots__P Parameter: Tissue Value: Shoots vs. Whole Plant
  misc_feature: MA Experiment ID: 20000234 Result: Up-regulated in Transcription
  misc_feature: MA Experiment 20000234 PARAMETER Experiment Name: At_Siliques_P Parameter: Age (day) Value: 21
  misc_feature: MA Experiment 20000234 PARAMETER Experiment Name: At_Siliques_P Parameter: Organism Value: A. thaliana
  misc_feature: MA Experiment 20000234 PARAMETER Experiment Name: At_Siliques_P Parameter: Plant Line Value: WS
  misc_feature: MA Experiment 20000234 PARAMETER Experiment Name: At_Siliques_P Parameter: Tissue Value: Less Than 5mm Siliques vs. Whole Plant
  misc_feature: MA Experiment ID: 20000265 Result: Up-regulated in Transcription
  misc_feature: MA Experiment 20000265 PARAMETER Experiment Name: At_Open_Flower_P Parameter: Age (day) Value: 21
  misc_feature: MA Experiment 20000265 PARAMETER Experiment Name: At_Open_Flower_P Parameter: Plant Line Value: WS
  misc_feature: MA Experiment 20000265 PARAMETER Experiment Name: At_Open_Flower_P Parameter: Tissue Value: Closed Flower vs. Whole Plant
  misc_feature: MA Experiment ID: 20000495 Result: Up-regulated in Transcription
  misc_feature: MA Experiment 20000495 PARAMETER Experiment Name: At_Guard_Cells_P Parameter: Harvest Date Value: 8/2/2002
  misc_feature: MA Experiment 20000495 PARAMETER Experiment Name: At_Guard_Cells_P Parameter: Organism Value: A. thaliana
  misc_feature: MA Experiment 20000495 PARAMETER Experiment Name: At_Guard_Cells_P Parameter: Tissue Value: Guard Cells vs. Leaves
  misc_feature: MA Experiment ID: 20001911 Result: Down-regulated in Transcription
  misc_feature: MA Experiment 20001911 PARAMETER Experiment Name: At_Drought_Reproduction_P Parameter: Age (day) Value: 40
  misc_feature: MA Experiment 20001911 PARAMETER Experiment Name: At_Drought_Reproduction_P Parameter: Organism Value: A. thaliana
  misc_feature: MA Experiment 20001911 PARAMETER Experiment Name: At_Drought_Reproduction_P Parameter: Plant Line Value: WS
  misc_feature: MA Experiment 20001911 PARAMETER Experiment Name: At_Drought_Reproduction_P Parameter: Timepoint (day) Value: 10
  misc_feature: MA Experiment 20001911 PARAMETER Experiment Name: At_Drought_Reproduction_P Parameter: Tissue Value: Flowers
  misc_feature: MA Experiment 20001911 PARAMETER Experiment Name: At_Drought_Reproduction_P Parameter: Treatment Value: Drought vs. No Drought
aaaaagaaaaaaaaacgctcgtcttcttcttcttcttcttcttatattacttcttcctcccacacagacaaattttgtaacgaagacgggatcgcgataagatcccggtgatcgaaaagccctaagaagtaattttcaagggaaagggacttaaagatgcatacttttggttacagagcaaatgctctgctcactttcgcagtcacggctcttgctttcatttgcgcaatcgcgtccttctcagacaaattcagcaaccaaaatccttctgctgagatccagatacttaatatcaatcggtttaagaagcaatctcatggtaacgatgaggtcagcttgacactggacatatcagcagacttgcaatcactttttacttggaacaccaaacaggtttttgttttcgtagcagcagagtatgaaaccccaaagaattccctgaatcaggtttctctatgggatgccattattcctgccaaggaacatgccaaattccggattcaagtctcaaacaagtaccgtttcatcgatcagggacagaatcttcggggcaaagacttcaacttgacattacactggcatgtcatgcccaagaccgggaagatgtttgctgacaagatagtcttgcctggttacagtttaccagatgcatacagatgatgaagattgaataaaacatcaaacctagtccaagactttttgtatttcagttttctgaaaagttttagactttcttttattccaaagaaaactaattcaaaagtactattgttctcttagaatcaaacaaaactattctttttagtgatctt

SEQ ID NO: 29722 - protein, 167 aa, Arabidopsis thaliana
  peptide (1)..(167): Ceres Seq. ID no. 12332052
  misc_feature (1)..(167): Pfam Name: Signal peptidase subunit Pfam Description: Signal peptidase subunit
  misc_feature (1)..(148): Homolog of NCBI NO: 39587410 NR Description: Hypothetical protein CBG22979 [Caenorhabditis
  misc_feature (1)..(148): Homolog of NCBI NO: 27708196 NR Description: similar to RIKEN cDNA 6530401D17
  misc_feature (1)..(148): Homolog of NCBI NO: 26390287 NR Description: unnamed protein product [Mus musculus]
  misc_feature (1)..(148): Homolog of NCBI NO: 11345462 NR Description: hypothetical protein FLJ22649 similar to signal
  misc_feature (1)..(148): Homolog of NCBI NO: 134791 NR Description: Microsomal signal peptidase 23 kDa subunit (SPase
  misc_feature (1)..(166): Homolog of NCBI NO: 34895578 NR Description: unnamed protein product [Oryza sativa (japonica
  misc_feature (1)..(167): Homolog of NCBI NO: 28558783 NR Description: signal peptidase protein-like protein [Cucumis
  misc_feature (1)..(167): Homolog of NCBI NO: 15240934 NR Description: signal peptidase
  misc_feature (1)..(167): Homolog of NCBI NO: 18397160 NR Description: expressed protein
MHTFGYRANALLTFAVTALAFICAIASFSDKFSNQNPSAEIQILNINRFKKQSHGNDEVSLTLDISADLQSLFTWNTKQVFVFVAAEYETPKNSLNQVSLWDAIIPAKEHAKFRIQVSNKYRFIDQGQNLRGKDFNLTLHWHVMPKTGKMFADKIVLPGYSLPDAYR

SEQ ID NO: 29723 - DNA, 1127 bp, Arabidopsis thaliana
  misc_feature (1)..(1127): Ceres Seq. ID no. 12348491
  misc_feature: MA Experiment ID: 108461 Result: Up-regulated in Transcription
  misc_feature: MA Experiment 108461 PARAMETER Experiment Name: At_Germinating_Seeds_cDNA_P Parameter: Age (day) Value: 1 vs. 0
  misc_feature: MA Experiment 108461 PARAMETER Experiment Name: At_Germinating_Seeds_cDNA_P Parameter: Tissue Value: Germinating Seeds
  misc_feature: MA Experiment ID: 108462 Result: Up-regulated in Transcription
  misc_feature: MA Experiment 108462 PARAMETER Experiment Name: At_Germinating_Seeds_cDNA_P Parameter: Age (day) Value: 2 vs. 0
  misc_feature: MA Experiment 108462 PARAMETER Experiment Name: At_Germinating_Seeds_cDNA_P Parameter: Tissue Value: Germinating Seeds
  misc_feature: MA Experiment ID: 108463 Result: Up-regulated in Transcription
  misc_feature: MA Experiment 108463 PARAMETER Experiment Name: At_Germinating_Seeds_cDNA_P Parameter: Age (day) Value: 3 vs. 0
  misc_feature: MA Experiment 108463 PARAMETER Experiment Name: At_Germinating_Seeds_cDNA_P Parameter: Tissue Value: Germinating Seeds
  misc_feature: MA Experiment ID: 20000112 Result: Down-regulated in Transcription
  misc_feature: MA Experiment 20000112 PARAMETER Experiment Name: At_42deg_Heat_cDNA_P Parameter: Temperature (deg C) Value: 42 vs. 22
  misc_feature: MA Experiment 20000112 PARAMETER Experiment Name: At_42deg_Heat_cDNA_P Parameter: Timepoint (hr) Value: 2
  misc_feature: MA Experiment 20000112 PARAMETER Experiment Name: At_42deg_Heat_cDNA_P Parameter: Tissue Value: Aerial
  misc_feature: MA Experiment ID: 20000113 Result: Down-regulated in Transcription
  misc_feature: MA Experiment 20000113 PARAMETER Experiment Name: At_42deg_Heat_cDNA_P Parameter: Temperature (deg C) Value: 42 vs. 22
  misc_feature: MA Experiment 20000113 PARAMETER Experiment Name: At_42deg_Heat_cDNA_P Parameter: Timepoint (hr) Value: 8
  misc_feature: MA Experiment 20000113 PARAMETER Experiment Name: At_42deg_Heat_cDNA_P Parameter: Tissue Value: Aerial
  misc_feature: MA Experiment ID: 20000171 Result: Down-regulated in Transcription
  misc_feature: MA Experiment 20000171 PARAMETER Experiment Name: At_42deg_Heat_P Parameter: Age (day) Value: 14
  misc_feature: MA Experiment 20000171 PARAMETER Experiment Name: At_42deg_Heat_P Parameter: Organism Value: A. thaliana
  misc_feature: MA Experiment 20000171 PARAMETER Experiment Name: At_42deg_Heat_P Parameter: Plant Line Value: WS
  misc_feature: MA Experiment 20000171 PARAMETER Experiment Name: At_42deg_Heat_P Parameter: Temperature (deg C) Value: 42 vs. 22
  misc_feature: MA Experiment 20000171 PARAMETER Experiment Name: At_42deg_Heat_P Parameter: Timepoint (hr) Value: 1
  misc_feature: MA Experiment 20000171 PARAMETER Experiment Name: At_42deg_Heat_P Parameter: Tissue Value: Aerial
  misc_feature: MA Experiment ID: 20000173 Result: Down-regulated in Transcription
  misc_feature: MA Experiment 20000173 PARAMETER Experiment Name: At_42deg_Heat_P Parameter: Age (day) Value: 14
  misc_feature: MA Experiment 20000173 PARAMETER Experiment Name: At_42deg_Heat_P Parameter: Organism Value: A. thaliana
  misc_feature: MA Experiment 20000173 PARAMETER Experiment Name: At_42deg_Heat_P Parameter: Plant Line Value: WS
  misc_feature: MA Experiment 20000173 PARAMETER Experiment Name: At_42deg_Heat_P Parameter: Temperature (deg C) Value: 42 vs. 22
  misc_feature: MA Experiment 20000173 PARAMETER Experiment Name: At_42deg_Heat_P Parameter: Timepoint (hr) Value: 6
  misc_feature: MA Experiment 20000173 PARAMETER Experiment Name: At_42deg_Heat_P Parameter: Tissue Value: Aerial
  misc_feature: MA Experiment ID: 20000179 Result: Up-regulated in Transcription
  misc_feature: MA Experiment 20000179 PARAMETER Experiment Name: At_Germinating_Seeds_P Parameter: Age (hr) Value: 6 vs. 0
  misc_feature: MA Experiment 20000179 PARAMETER Experiment Name: At_Germinating_Seeds_P Parameter: Tissue Value: Germinating Seeds
  misc_feature: MA Experiment ID: 20000180 Result: Up-regulated in Transcription
  misc_feature: MA Experiment 20000180 PARAMETER Experiment Name: At_Germinating_Seeds_P Parameter: Age (hr) Value: 24 vs. 0
  misc_feature: MA Experiment 20000180 PARAMETER Experiment Name: At_Germinating_Seeds_P Parameter: Tissue Value: Germinating Seeds
  misc_feature: MA Experiment ID: 20000211 Result: Up-regulated in Transcription
  misc_feature: MA Experiment 20000211 PARAMETER Experiment Name: At_0.001percent_MeJA__P Parameter: Age (day) Value: 14
  misc_feature: MA Experiment 20000211 PARAMETER Experiment Name: At_0.001percent_MeJA__P Parameter: Organism Value: A. thaliana
  misc_feature: MA Experiment 20000211 PARAMETER Experiment Name: At_0.001percent_MeJA__P Parameter: Plant Line Value: WS
  misc_feature: MA Experiment 20000211 PARAMETER Experiment Name: At_0.001percent_MeJA__P Parameter: Timepoint (hr) Value: 1
  misc_feature: MA Experiment 20000211 PARAMETER Experiment Name: At_0.001percent_MeJA__P Parameter: Tissue Value: Aerial
  misc_feature: MA Experiment 20000211 PARAMETER Experiment Name: At_0.001percent_MeJA__P Parameter: Treatment Value: 0.001percent MeJA vs. No Treatment
  misc_feature: MA Experiment ID: 20000224 Result: Down-regulated in Transcription
  misc_feature: MA Experiment ID: 20000227 Result: Down-regulated in Transcription
  misc_feature: MA Experiment 20000227 PARAMETER Experiment Name: At_Root-Tips-vs-Tops_P Parameter: Tissue Value: Root Tips vs. Root Tops
  misc_feature: MA Experiment ID: 20000234 Result: Down-regulated in Transcription
  misc_feature: MA Experiment 20000234 PARAMETER Experiment Name: At_Siliques_P Parameter: Age (day) Value: 21
  misc_feature: MA Experiment 20000234 PARAMETER Experiment Name: At_Siliques_P Parameter: Organism Value: A. thaliana
  misc_feature: MA Experiment 20000234 PARAMETER Experiment Name: At_Siliques_P Parameter: Plant Line Value: WS
  misc_feature: MA Experiment 20000234 PARAMETER Experiment Name: At_Siliques_P Parameter: Tissue Value: Less Than 5mm Siliques vs. Whole Plant
  misc_feature: MA Experiment ID: 20001556 Result: Down-regulated in Transcription
  misc_feature: MA Experiment 20001556 PARAMETER Experiment Name: At_Drought_Soil_Dry_P Parameter: Age (day) Value: 26
  misc_feature: MA Experiment 20001556 PARAMETER Experiment Name: At_Drought_Soil_Dry_P Parameter: Organism Value: A. thaliana
  misc_feature: MA Experiment 20001556 PARAMETER Experiment Name: At_Drought_Soil_Dry_P Parameter: Plant Line Value: WS
  misc_feature: MA Experiment 20001556 PARAMETER Experiment Name: At_Drought_Soil_Dry_P Parameter: Post Timepoint (hr) Value: None
  misc_feature: MA Experiment 20001556 PARAMETER Experiment Name: At_Drought_Soil_Dry_P Parameter: Post-Treatment Value: None
  misc_feature: MA Experiment 20001556 PARAMETER Experiment Name: At_Drought_Soil_Dry_P Parameter: Timepoint (day) Value: 12
  misc_feature: MA Experiment 20001556 PARAMETER Experiment Name: At_Drought_Soil_Dry_P Parameter: Treatment Value: Drought vs. No Drought
  misc_feature: MA Experiment ID: 20001557 Result: Down-regulated in Transcription
  misc_feature: MA Experiment 20001557 PARAMETER Experiment Name: At_Drought_Soil_Dry_P Parameter: Age (day) Value: 27
  misc_feature: MA Experiment 20001557 PARAMETER Experiment Name: At_Drought_Soil_Dry_P Parameter: Organism Value: A. thaliana
  misc_feature: MA Experiment 20001557 PARAMETER Experiment Name: At_Drought_Soil_Dry_P Parameter: Plant Line Value: WS
  misc_feature: MA Experiment 20001557 PARAMETER Experiment Name: At_Drought_Soil_Dry_P Parameter: Post Timepoint (hr) Value: 3
  misc_feature: MA Experiment 20001557 PARAMETER Experiment Name: At_Drought_Soil_Dry_P Parameter: Post-Treatment Value: Re-Water vs. No Drought
  misc_feature: MA Experiment 20001557 PARAMETER Experiment Name: At_Drought_Soil_Dry_P Parameter: Timepoint (day) Value: 13
  misc_feature: MA Experiment 20001557 PARAMETER Experiment Name: At_Drought_Soil_Dry_P Parameter: Treatment Value: Drought vs. No Drought
  misc_feature: MA Experiment ID: 20001559 Result: Down-regulated in Transcription
  misc_feature: MA Experiment 20001559 PARAMETER Experiment Name: At_Drought_Soil_Dry_P Parameter: Age (day) Value: 28
  misc_feature: MA Experiment 20001559 PARAMETER Experiment Name: At_Drought_Soil_Dry_P Parameter: Organism Value: A. thaliana
  misc_feature: MA Experiment 20001559 PARAMETER Experiment Name: At_Drought_Soil_Dry_P Parameter: Plant Line Value: WS
  misc_feature: MA Experiment 20001559 PARAMETER Experiment Name: At_Drought_Soil_Dry_P Parameter: Post Timepoint (hr) Value: 29
  misc_feature: MA Experiment 20001559 PARAMETER Experiment Name: At_Drought_Soil_Dry_P Parameter: Post-Treatment Value: Re-Water vs. No Drought
  misc_feature: MA Experiment 20001559 PARAMETER Experiment Name: At_Drought_Soil_Dry_P Parameter: Timepoint (day) Value: 14
  misc_feature: MA Experiment 20001559 PARAMETER Experiment Name: At_Drought_Soil_Dry_P Parameter: Treatment Value: Drought vs. No Drought
acattttgaaaaaaacatttttttgtaattcaattattcgacacaaccaatcccatctcttgtttcacttccgccctccatctttcttcgtgattgagagaatcttcaacgaaagaaagcaacttttttttgggtgaaattcacacacaaccaaggtttttcttcttcttcttcttctccagttcctacagaatcatgcctgacaagaatatcgtagaggacgttatcggtgatttggtggataacttcacggagactgttcagaagaacaaacatggttcctccttcttcgaacaagaagattccgtcagttctcgtttcaaccgtttgtttgatcgccagaagccaattcatcatgtcttaggcggtggcaaatctgctgatgtgttgttatggaggaacaagaagatctctgcaagtgttttgatgggagctaccgcaatttgggtgctttttgaatggatcaatttccatttcctgtctctcgtttgctatgccctcttgcttggtatgattgcacaattcgtttggtctaacgcctctggattcttaaaccgctcacagtctagagtgcctcgcctagttcttccaaaggatttctttgctgaagtcggtgtggccgttggaaaagaagttaaccgcggtttgttgtttcttcaggacttggcttgtaaagggaatttgaaacagttcctcatggctgtaatcggactatgggtagctgcaatggtcgggagctgttgcaatttcctaactgttttgtatatcgggtttgttggggcacacacaatgccggttctgtatgagagatacgaagacgaagtggatggttttatggattctatgattatgaagtttcatagtcattacaagaagcttgatactgggtttctcagtagaatcccaagtggaaagtttggattaaagaagcgtgagtgactaaatcactcaagcattttcttattttaccttgtttgttgttagaacaatatggattatggtttgctaaatgaatgttttggagaatattattcattcatgtagattttgtgtatttccttactaaacaataccttgtccatgtatttgtcaataccttggttaataacagaatcatcatatttgtc

SEQ ID NO: 29724 - protein, 247 aa, Arabidopsis thaliana
  peptide (1)..(247): Ceres Seq. ID no. 12348492
  misc_feature (12)..(247): Homolog of NCBI NO: 15237093 NR Description: putative protein
  misc_feature (4)..(245): Homolog of NCBI NO: 15238125 NR Description: putative protein
  misc_feature (23)..(247): Homolog of NCBI NO: 15236556 NR Description: putative protein
  misc_feature (14)..(246): Homolog of NCBI NO: 18406991 NR Description: expressed protein
  misc_feature (44)..(245): Homolog of NCBI NO: 34904202 NR Description: P0492F05.25 [Oryza sativa (japonica
  misc_feature (4)..(245): Homolog of NCBI NO: 34909318 NR Description: OSJNBb0021A09.5 [Oryza sativa (japonica
  misc_feature (1)..(247): Homolog of NCBI NO: 34899590 NR Description: hypothetical protein~similar to Oryza sativa
  misc_feature (4)..(247): Homolog of NCBI NO: 34897094 NR Description: unknown protein [Oryza sativa (japonica
  misc_feature (1)..(247): Homolog of NCBI NO: 18398810 NR Description: expressed protein
  misc_feature (1)..(247): Homolog of NCBI NO: 30681227 NR Description: expressed protein [Arabidopsis thaliana]
MPDKNIVEDVIGDLVDNFTETVQKNKHGSSFFEQEDSVSSRFNRLFDRQKPIHHVLGGGKSADVLLWRNKKISASVLMGATAIWVLFEWINFHFLSLVCYALLLGMIAQFVWSNASGFLNRSQSRVPRLVLPKDFFAEVGVAVGKEVNRGLLFLQDLACKGNLKQFLMAVIGLWVAAMVGSCCNFLTVLYIGFVGAHTMPVLYERYEDEVDGFMDSMIMKFHSHYKKLDTGFLSRIPSGKFGLKKRE

SEQ ID NO: 29725 - protein, 170 aa, Arabidopsis thaliana
  peptide (1)..(170): Ceres Seq. ID no. 12348493
  misc_feature (1)..(170): Homolog of NCBI NO: 15237093 NR Description: putative protein
  misc_feature (1)..(168): Homolog of NCBI NO: 15238125 NR Description: putative protein
  misc_feature (1)..(170): Homolog of NCBI NO: 15236556 NR Description: putative protein
  misc_feature (1)..(169): Homolog of NCBI NO: 18406991 NR Description: expressed protein
  misc_feature (1)..(168): Homolog of NCBI NO: 34904202 NR Description: P0492F05.25 [Oryza sativa (japonica
  misc_feature (1)..(168): Homolog of NCBI NO: 34909318 NR Description: OSJNBb0021A09.5 [Oryza sativa (japonica
  misc_feature (1)..(170): Homolog of NCBI NO: 34899590 NR Description: hypothetical protein~similar to Oryza sativa
  misc_feature (1)..(170): Homolog of NCBI NO: 34897094 NR Description: unknown protein [Oryza sativa (japonica
  misc_feature (1)..(170): Homolog of NCBI NO: 18398810 NR Description: expressed protein
  misc_feature (1)..(170): Homolog of NCBI NO: 30681227 NR Description: expressed protein [Arabidopsis thaliana]
MGATAIWVLFEWINFHFLSLVCYALLLGMIAQFVWSNASGFLNRSQSRVPRLVLPKDFFAEVGVAVGKEVNRGLLFLQDLACKGNLKQFLMAVIGLWVAAMVGSCCNFLTVLYIGFVGAHTMPVLYERYEDEVDGFMDSMIMKFHSHYKKLDTGFLSRIPSGKFGLKKRE

SEQ ID NO: 29726 - protein, 142 aa, Arabidopsis thaliana
  peptide (1)..(142): Ceres Seq. ID no. 12348494
  misc_feature (1)..(142): Homolog of NCBI NO: 15237093 NR Description: putative protein
  misc_feature (1)..(140): Homolog of NCBI NO: 15238125 NR Description: putative protein
  misc_feature (1)..(142): Homolog of NCBI NO: 15236556 NR Description: putative protein
  misc_feature (1)..(141): Homolog of NCBI NO: 18406991 NR Description: expressed protein
  misc_feature (1)..(140): Homolog of NCBI NO: 34904202 NR Description: P0492F05.25 [Oryza sativa (japonica
  misc_feature (1)..(140): Homolog of NCBI NO: 34909318 NR Description: OSJNBb0021A09.5 [Oryza sativa (japonica
  misc_feature (1)..(142): Homolog of NCBI NO: 34899590 NR Description: hypothetical protein~similar to Oryza sativa
  misc_feature (1)..(142): Homolog of NCBI NO: 34897094 NR Description: unknown protein [Oryza sativa (japonica
  misc_feature (1)..(142): Homolog of NCBI NO: 18398810 NR Description: expressed protein
  misc_feature (1)..(142): Homolog of NCBI NO: 30681227 NR Description: expressed protein [Arabidopsis thaliana]
MIAQFVWSNASGFLNRSQSRVPRLVLPKDFFAEVGVAVGKEVNRGLLFLQDLACKGNLKQFLMAVIGLWVAAMVGSCCNFLTVLYIGFVGAHTMPVLYERYEDEVDGFMDSMIMKFHSHYKKLDTGFLSRIPSGKFGLKKRE

SEQ ID NO: 29727 - DNA, 1076 bp, Arabidopsis thaliana; identical to SEQ ID NO: 22642
  misc_feature (1)..(1076): Ceres Seq. ID no. 13588829
  misc_feature: MA Experiment ID: 20000794 Result: Down-regulated in Transcription
  misc_feature: MA Experiment 20000794 PARAMETER Experiment Name: At_Petals_P Parameter: Age (day) Value: 23-25 days
  misc_feature: MA Experiment 20000794 PARAMETER Experiment Name: At_Petals_P Parameter: Plant Line Value: WS
  misc_feature: MA Experiment 20000794 PARAMETER Experiment Name: At_Petals_P Parameter: Tissue Value: Petals vs. Whole plant
  misc_feature: MA Experiment ID: 20001451 Result: Down-regulated in Transcription
  misc_feature: MA Experiment 20001451 PARAMETER Experiment Name: At_Far-red-induction_P Parameter: Age (day) Value: 7
  misc_feature: MA Experiment 20001451 PARAMETER Experiment Name: At_Far-red-induction_P Parameter: Light Value: Far-red vs. White
  misc_feature: MA Experiment 20001451 PARAMETER Experiment Name: At_Far-red-induction_P Parameter: Organism Value: A. thaliana
  misc_feature: MA Experiment 20001451 PARAMETER Experiment Name: At_Far-red-induction_P Parameter: Plant Line Value: Columbia
  misc_feature: MA Experiment 20001451 PARAMETER Experiment Name: At_Far-red-induction_P Parameter: Timepoint (hr) Value: 24
  misc_feature: MA Experiment 20001451 PARAMETER Experiment Name: At_Far-red-induction_P Parameter: Tissue Value: Whole Plant
  misc_feature: MA Experiment ID: 20001557 Result: Up-regulated in Transcription
  misc_feature: MA Experiment 20001557 PARAMETER Experiment Name: At_Drought_Soil_Dry_P Parameter: Age (day) Value: 27
  misc_feature: MA Experiment 20001557 PARAMETER Experiment Name: At_Drought_Soil_Dry_P Parameter: Organism Value: A. thaliana
  misc_feature: MA Experiment 20001557 PARAMETER Experiment Name: At_Drought_Soil_Dry_P Parameter: Plant Line Value: WS
  misc_feature: MA Experiment 20001557 PARAMETER Experiment Name: At_Drought_Soil_Dry_P Parameter: Post Timepoint (hr) Value: 3
  misc_feature: MA Experiment 20001557 PARAMETER Experiment Name: At_Drought_Soil_Dry_P Parameter: Post-Treatment Value: Re-Water vs. No Drought
  misc_feature: MA Experiment 20001557 PARAMETER Experiment Name: At_Drought_Soil_Dry_P Parameter: Timepoint (day) Value: 13
  misc_feature: MA Experiment 20001557 PARAMETER Experiment Name: At_Drought_Soil_Dry_P Parameter: Treatment Value: Drought vs. No Drought
  misc_feature: MA Experiment ID: 20001558 Result: Up-regulated in Transcription
  misc_feature: MA Experiment 20001558 PARAMETER Experiment Name: At_Drought_Soil_Dry_P Parameter: Age (day) Value: 27
  misc_feature: MA Experiment 20001558 PARAMETER Experiment Name: At_Drought_Soil_Dry_P Parameter: Organism Value: A. thaliana
  misc_feature: MA Experiment 20001558 PARAMETER Experiment Name: At_Drought_Soil_Dry_P Parameter: Plant Line Value: WS
  misc_feature: MA Experiment 20001558 PARAMETER Experiment Name: At_Drought_Soil_Dry_P Parameter: Post Timepoint (hr) Value: 6
  misc_feature: MA Experiment 20001558 PARAMETER Experiment Name: At_Drought_Soil_Dry_P Parameter: Post-Treatment Value: Re-Water vs. No Drought
  misc_feature: MA Experiment 20001558 PARAMETER Experiment Name: At_Drought_Soil_Dry_P Parameter: Timepoint (day) Value: 13
  misc_feature: MA Experiment 20001558 PARAMETER Experiment Name: At_Drought_Soil_Dry_P Parameter: Treatment Value: Drought vs. No Drought
  misc_feature: MA Experiment ID: 20001757 Result: Up-regulated in Transcription
  misc_feature: MA Experiment 20001757 PARAMETER Experiment Name: At_50mM_NH4NO3_L-to-H_P Parameter: Timepoint (hr) Value: 6
  misc_feature: MA Experiment 20001757 PARAMETER Experiment Name: At_50mM_NH4NO3_L-to-H_P Parameter: Tissue Value: Leaf
  misc_feature: MA Experiment 20001757 PARAMETER Experiment Name: At_50mM_NH4NO3_L-to-H_P Parameter: Treatment Value: 50mM NH4NO3 vs 100mM Mannitol

SEQ ID NO: 29728 - protein, 250 aa, Arabidopsis thaliana [sequence omitted]

SEQ ID NO: 29729 - protein, 207 aa, Arabidopsis thaliana; identical to SEQ ID NO: 22644
  peptide (1)..(207): Ceres Seq. ID no. 15220913
  misc_feature (61)..(145): Pfam Name: Ribosomal protein S3, C-terminal domain Pfam Description: Ribosomal protein S3, C-terminal domain
  misc_feature (61)..(145): Pfam Name: Ribosomal protein S3, C-terminal domain Pfam Description: Ribosomal protein S3, C-terminal domain
  misc_feature (61)..(145): Pfam Name: Ribosomal protein S3, C-terminal domain Pfam Description: Ribosomal protein S3, C-terminal domain
  misc_feature (1)..(179): Homolog of NCBI NO: 27735393 NR Description: Similar to ribosomal protein S3 [Xenopus laevis]
  misc_feature (1)..(206): Homolog of NCBI NO: 2500399 NR Description: 40S ribosomal protein S3
  misc_feature (1)..(179): Homolog of NCBI NO: 15718687 NR Description: ribosomal protein S3; 40S ribosomal protein S3
  misc_feature (1)..(179): Homolog of NCBI NO: 12847921 NR Description: unnamed protein product [Mus musculus]
  misc_feature (1)..(185): Homolog of NCBI NO: 133940 NR Description: 40S ribosomal protein S3A (S1A)
  misc_feature (1)..(179): Homolog of NCBI NO: 27735393 NR Description: Similar to ribosomal protein S3 [Xenopus laevis]
  misc_feature (1)..(179): Homolog of NCBI NO: 15718687 NR Description: ribosomal protein S3; 40S ribosomal protein S3
  misc_feature (1)..(185): Homolog of NCBI NO: 133940 NR Description: 40S ribosomal protein S3A (S1A)
  misc_feature (1)..(179): Homolog of NCBI NO: 12847921 NR Description: unnamed protein product [Mus musculus]
  misc_feature (1)..(179): Homolog of NCBI NO: 15718687 NR Description: ribosomal protein S3; 40S ribosomal protein S3
  misc_feature (1)..(206): Homolog of NCBI NO: 2500399 NR Description: 40S ribosomal protein S3
  misc_feature (1)..(179): Homolog of NCBI NO: 27735393 NR Description: Similar to ribosomal protein S3 [Xenopus laevis]
  misc_feature (1)..(207): Homolog of NCBI NO: 15225107 NR Description: 40S ribosomal protein S3 (RPS3A) [Arabidopsis
  misc_feature (1)..(204): Homolog of NCBI NO: 15232352 NR Description: 40S ribosomal protein S3 (RPS3B) [Arabidopsis
  misc_feature (1)..(207): Homolog of NCBI NO: 15238533 NR Description: 40S ribosomal protein S3 (RPS3C) [Arabidopsis
  misc_feature (1)..(186): Homolog of NCBI NO: 14192875 NR Description: Putative 40S ribosomal protein; contains
  misc_feature (1)..(180): Homolog of NCBI NO: 22204124 NR Description: putative 40S ribosomal protein S3 [Triticum
  misc_feature (1)..(207): Homolog of NCBI NO: 15225107 NR Description: 40S ribosomal protein S3 (RPS3A) [Arabidopsis
  misc_feature (1)..(204): Homolog of NCBI NO: 15232352 NR Description: 40S ribosomal protein S3 (RPS3B) [Arabidopsis
  misc_feature (1)..(207): Homolog of NCBI NO: 15238533 NR Description: 40S ribosomal protein S3 (RPS3C) [Arabidopsis
  misc_feature (1)..(186): Homolog of NCBI NO: 14192875 NR Description: Putative 40S ribosomal protein; contains
  misc_feature (1)..(180): Homolog of NCBI NO: 22204124 NR Description: putative 40S ribosomal protein S3 [Triticum
  misc_feature (1)..(185): Homolog of NCBI NO: 133940 NR Description: 40S ribosomal protein S3A (S1A)
  misc_feature (1)..(179): Homolog of NCBI NO: 12847921 NR Description: unnamed protein product [Mus musculus]
  misc_feature (1)..(206): Homolog of NCBI NO: 2500399 NR Description: 40S ribosomal protein S3
  misc_feature (1)..(180): Homolog of NCBI NO: 22204124 NR Description: putative 40S ribosomal protein S3 [Triticum
  misc_feature (1)..(186): Homolog of NCBI NO: 14192875 NR Description: Putative 40S ribosomal protein; contains
  misc_feature (1)..(207): Homolog of NCBI NO: 15238533 NR Description: 40S ribosomal protein S3 (RPS3C) [Arabidopsis
  misc_feature (1)..(204): Homolog of NCBI NO: 15232352 NR Description: 40S ribosomal protein S3 (RPS3B) [Arabidopsis
  misc_feature (1)..(207): Homolog of NCBI NO: 15225107 NR Description: 40S ribosomal protein S3 (RPS3A) [Arabidopsis

SEQ ID NO: 29730 - DNA, 873 bp, Arabidopsis thaliana
  misc_feature (1)..(873): Ceres Seq. ID no. 12369966
  misc_feature: MA Experiment ID: 20000179 Result: Up-regulated in Transcription
  misc_feature: MA Experiment 20000179 PARAMETER Experiment Name: At_Germinating_Seeds_P Parameter: Age (hr) Value: 6 vs. 0
  misc_feature: MA Experiment 20000179 PARAMETER Experiment Name: At_Germinating_Seeds_P Parameter: Tissue Value: Germinating Seeds
  misc_feature: MA Experiment ID: 20000180 Result: Up-regulated in Transcription
  misc_feature: MA Experiment 20000180 PARAMETER Experiment Name: At_Germinating_Seeds_P Parameter: Age (hr) Value: 24 vs. 0
  misc_feature: MA Experiment 20000180 PARAMETER Experiment Name: At_Germinating_Seeds_P Parameter: Tissue Value: Germinating Seeds
agctccatccaatatatcgtcttcttcctcctcgaaccaaaaacatcagtctctcctagtctcagcgctcgtgaaaatctgaaactctgcgttcgaattttcgaagaacattagagatctggtattatctggatccgatctgttcaccatggaggagaagaagacagaatcaaccaacaagaatgttaagaaggccaatctattggaccaccactcgatcaagcacatccttgacgaatccgtctccgatatcgttacgagccgtggctataaggaggatgtgagattgagcaacctcaaactgattttgggaacgattatcatcgttgttgctcttgttgctcaattctacaacaagaaattccctgagaacagggattttttgattggatgcatcgcattgtatgtagtgttgaatgcggtgttgcagctgattctgtacactaaggagaagaatgcgattttgttcacctatcctcctgagggatcattcaccagcactggtttggtggtatcttcaaagttgcccagattctctgatcagtacactctcaccatcgacagtgctgatccaaaatcaatctcagctgggaagtcagttcagctcaccaaaagtgtcacccaatggttcacgaaagatggagttcttgttgagggtttattctggaaagacgtagaagcactaatcaagaactatgcagaagaagaaccaaagaagaagaaatgatcatcttccagagaaatatatgcttttgaaactccatatgttggcgttttagaatactaaatcgatggtgactttgtttagagatgaaactaatatttggatttttccttatagccaactttttgaattaatccgagattttatga

SEQ ID NO: 29731 - protein, 192 aa, Arabidopsis thaliana
  peptide (1)..(192): Ceres Seq. ID no. 12369967
  misc_feature (1)..(56): Homolog of NCBI NO: 15233420 NR Description: hypothetical protein; protein id: At4g04200.1
  misc_feature (109)..(192): Homolog of NCBI NO: 15233420 NR Description: hypothetical protein; protein id: At4g04200.1
  misc_feature (14)..(190): Homolog of NCBI NO: 38344552 NR Description: OSJNBa0027P08.20 [Oryza sativa (japonica
  misc_feature (1)..(107): Homolog of NCBI NO: 25408649 NR Description: hypothetical protein At2g39960 [imported] -
  misc_feature (1)..(192): Homolog of NCBI NO: 34365647 NR Description: At4g04200 [Arabidopsis thaliana]
  misc_feature (1)..(192): Homolog of NCBI NO: 30688096 NR Description: expressed protein [Arabidopsis thaliana]
MEEKKTESTNKNVKKANLLDHHSIKHILDESVSDIVTSRGYKEDVRLSNLKLILGTIIIVVALVAQFYNKKFPENRDFLIGCIALYVVLNAVLQLILYTKEKNAILFTYPPEGSFTSTGLVVSSKLPRFSDQYTLTIDSADPKSISAGKSVQLTKSVTQWFTKDGVLVEGLFWKDVEALIKNYAEEEPKKKK

SEQ ID NO: 29732 - DNA, 1347 bp, Arabidopsis thaliana
  misc_feature (1)..(1347): Ceres Seq. ID no. 12371997
  misc_feature: MA Experiment ID: 108461 Result: Up-regulated in Transcription
  misc_feature: MA Experiment 108461 PARAMETER Experiment Name: At_Germinating_Seeds_cDNA_P Parameter: Age (day) Value: 1 vs. 0
  misc_feature: MA Experiment 108461 PARAMETER Experiment Name: At_Germinating_Seeds_cDNA_P Parameter: Tissue Value: Germinating Seeds
  misc_feature: MA Experiment ID: 108462 Result: Up-regulated in Transcription
  misc_feature: MA Experiment 108462 PARAMETER Experiment Name: At_Germinating_Seeds_cDNA_P Parameter: Age (day) Value: 2 vs. 0
  misc_feature: MA Experiment 108462 PARAMETER Experiment Name: At_Germinating_Seeds_cDNA_P Parameter: Tissue Value: Germinating Seeds
  misc_feature: MA Experiment ID: 108463 Result: Up-regulated in Transcription
  misc_feature: MA Experiment 108463 PARAMETER Experiment Name: At_Germinating_Seeds_cDNA_P Parameter: Age (day) Value: 3 vs. 0
  misc_feature: MA Experiment 108463 PARAMETER Experiment Name: At_Germinating_Seeds_cDNA_P Parameter: Tissue Value: Germinating Seeds
  misc_feature: MA Experiment ID: 108464 Result: Up-regulated in Transcription
  misc_feature: MA Experiment 108464 PARAMETER Experiment Name: At_Germinating_Seeds_cDNA_P Parameter: Age (day) Value: 4 vs. 0
  misc_feature: MA Experiment 108464 PARAMETER Experiment Name: At_Germinating_Seeds_cDNA_P Parameter: Tissue Value: Germinating Seeds
  misc_feature: MA Experiment ID: 108474 Result: Down-regulated in Transcription
  misc_feature: MA Experiment 108474 PARAMETER Experiment Name: At_Drought_Flowers_cDNA_P Parameter: Timepoint (hr) Value: null
  misc_feature: MA Experiment 108474 PARAMETER Experiment Name: At_Drought_Flowers_cDNA_P Parameter: Treatment Value: Drought vs. No Drought
  misc_feature: MA Experiment ID: 108594 Result: Down-regulated in Transcription
  misc_feature: MA Experiment 108594 PARAMETER Experiment Name: At_Ler-rhl_Root_cDNA_P Parameter: Plant Line Value: null
  misc_feature: MA Experiment ID: 108595 Result: Up-regulated in Transcription
  misc_feature: MA Experiment 108595 PARAMETER Experiment Name: At_Ler-pi_Ovule_cDNA_P Parameter: Plant Line Value: null
  misc_feature: MA Experiment ID: 20000171 Result: Up-regulated in Transcription
  misc_feature: MA Experiment 20000171 PARAMETER Experiment Name: At_42deg_Heat_P Parameter: Age (day) Value: 14
  misc_feature: MA Experiment 20000171 PARAMETER Experiment Name: At_42deg_Heat_P Parameter: Organism Value: A. thaliana
  misc_feature: MA Experiment 20000171 PARAMETER Experiment Name: At_42deg_Heat_P Parameter: Plant Line Value: WS
  misc_feature: MA Experiment 20000171 PARAMETER Experiment Name: At_42deg_Heat_P Parameter: Temperature (deg C) Value: 42 vs. 22
  misc_feature: MA Experiment 20000171 PARAMETER Experiment Name: At_42deg_Heat_P Parameter: Timepoint (hr) Value: 1
  misc_feature: MA Experiment 20000171 PARAMETER Experiment Name: At_42deg_Heat_P Parameter: Tissue Value: Aerial
  misc_feature: MA Experiment ID: 20000184 Result: Up-regulated in Transcription
  misc_feature: MA Experiment 20000184 PARAMETER Experiment Name: At_Shoots__P Parameter: Age (day) Value: 7
  misc_feature: MA Experiment 20000184 PARAMETER Experiment Name: At_Shoots__P Parameter: Tissue Value: Shoots vs. Whole Plant
  misc_feature: MA Experiment ID: 20000185 Result: Up-regulated in Transcription
  misc_feature: MA Experiment 20000185 PARAMETER Experiment Name: At_Roots__P Parameter: Age (day) Value: 7 vs. 21
  misc_feature: MA Experiment 20000185 PARAMETER Experiment Name: At_Roots__P Parameter: Organism Value: A. thaliana
  misc_feature: MA Experiment 20000185 PARAMETER Experiment Name: At_Roots__P Parameter: Tissue Value: Roots vs. Whole Plant
  misc_feature: MA Experiment ID: 20000227 Result: Down-regulated in Transcription
  misc_feature: MA Experiment 20000227 PARAMETER Experiment Name: At_Root-Tips-vs-Tops_P Parameter: Tissue Value: Root Tips vs. Root Tops
  misc_feature: MA Experiment ID: 20000439 Result: Up-regulated in Transcription
  misc_feature: MA Experiment 20000439 PARAMETER Experiment Name: At_Roots__P Parameter: Age (day) Value: 14 vs. 21
  misc_feature: MA Experiment 20000439 PARAMETER Experiment Name: At_Roots__P Parameter: Organism Value: A. thaliana
  misc_feature: MA Experiment 20000439 PARAMETER Experiment Name: At_Roots__P Parameter: Tissue Value: Roots vs. Whole Plant
  misc_feature: MA Experiment ID: 20000527 Result: Down-regulated in Transcription
  misc_feature: MA Experiment 20000527 PARAMETER Experiment Name: At_10percent_PEG_P Parameter: Age (day) Value: 20
  misc_feature: MA Experiment 20000527 PARAMETER Experiment Name: At_10percent_PEG_P Parameter: Organism Value: A. thaliana
  misc_feature: MA Experiment 20000527 PARAMETER Experiment Name: At_10percent_PEG_P Parameter: Plant Line Value: WS
  misc_feature: MA Experiment 20000527 PARAMETER Experiment Name: At_10percent_PEG_P Parameter: Timepoint (day) Value: 20
  misc_feature: MA Experiment 20000527 PARAMETER Experiment Name: At_10percent_PEG_P Parameter: Tissue Value: Whole Plant
  misc_feature: MA Experiment 20000527 PARAMETER Experiment Name: At_10percent_PEG_P Parameter: Treatment Value: 10percent PEG vs. No Treatment
  misc_feature: MA Experiment ID: 20001911 Result: Down-regulated in Transcription
  misc_feature: MA Experiment 20001911 PARAMETER Experiment Name: At_Drought_Reproduction_P Parameter: Age (day) Value: 40
  misc_feature: MA Experiment 20001911 PARAMETER Experiment Name: At_Drought_Reproduction_P Parameter: Organism Value: A. thaliana
  misc_feature: MA Experiment 20001911 PARAMETER Experiment Name: At_Drought_Reproduction_P Parameter: Plant Line Value: WS
  misc_feature: MA Experiment 20001911 PARAMETER Experiment Name: At_Drought_Reproduction_P Parameter: Timepoint (day) Value: 10
  misc_feature: MA Experiment 20001911 PARAMETER Experiment Name: At_Drought_Reproduction_P Parameter: Tissue Value: Flowers
  misc_feature: MA Experiment 20001911 PARAMETER Experiment Name: At_Drought_Reproduction_P Parameter: Treatment Value: Drought vs. No Drought
accatgtcttcagatcaactaagcaaattccttgatagaaacaaaatggaagacaataaaagaaaagtattagatgaagaagcgaaagcttctctagacatatggaagtatgtctttgggtttgcagatatagcagctgcaaagtgtgccattgatcttaaaataccagaagccattgaaaaccatccttcttcacagcccgtaacactagccgaactctcctccgccgtctccgcctctccctcgcatctccgccgtataatgaggtttcttgtacaccaaggaatctttaaagaaatccccacaaaagatggtttagctacaggctacgttaatacgccactctctcgccgtttgatgatcacaagacgtgatggaaaatcgctggctccttttgttctcttcgaaacaactcccgagatgctcgctccatggttgagacttagctcagtcgtttcttcgccggtcaacggttcaactccaccaccgtttgatgcagtgcacggtaaggacgtgtggtcgttcgcgcaggataatcccttcctcagcgatatgatcaatgaggccatggcttgtgatgcaaggcgcgtggtgccacgtgtagccggagcttgtcacggcttgtttgatggcgtgactacgatggttgacgtaggaggtggtacgggagagacgatggggatgcttgtgaaggagtttccttggatcaaaggatttaactttgatcttcctcatgtcattgaagttgctgaagtcttggacggtgttgagaatgttgagggcgatatgtttgattctattccggcttgcgacgccattttcatcaagtgggtgttacacgattggggagacaaagattgcataaagatattgaagaattgcaaagaagcggtccctccaaatatcggaaaagtgttgatagtggaatcggtgatcggagagaataaaaagacgatgatagtggacgaacgagatgaaaagttagagcacgtgagattgatgcttgatatggtgatgatggctcacacaagcacaggcaaagaacggactttgaaagaatgggactttgttcttaaagaagctggctttgctcgatatgaggttagggacattgatgatgttcagagtcttataatcgcgtatcggtcttaagaggaggacatgaaagatatatctttcctttgaggaaaactcaataaattagtgattgttgatttggtgtttttatacagaacgacgtgtgggtgaataattgtgttgtgtgataataagtaaggcttgtttcagtatcagcagagttgttttttatttgtatttttcacatttttttatcattaatttccttgt

SEQ ID NO: 29733 - protein, 383 aa, Arabidopsis thaliana
  peptide (1)..(383): Ceres Seq. ID no. 12371998
  misc_feature (104)..(359): Pfam Name: O-methyltransferase Pfam Description: O-methyltransferase
  misc_feature (25)..(368): Homolog of NCBI NO: 33286372 NR Description: (R,S)-reticuline 7-O-methyltransferase [Papaver
  misc_feature (26)..(381): Homolog of NCBI NO: 2282586 NR Description: methyltransferase [Prunus armeniaca]
  misc_feature (25)..(381): Homolog of NCBI NO: 4574324 NR Description: caffeic acid ortho-methyltransferase [Pinus
  misc_feature (25)..(381): Homolog of NCBI NO: 7447883 NR Description: catechol O-methyltransferase homolog - Monterey
  misc_feature (25)..(381): Homolog of NCBI NO: 1777386 NR Description: caffeic acid O-methyltransferase
  misc_feature (24)..(381): Homolog of NCBI NO: 32440935 NR Description: caffeic acid O-methyltransferase [Rosa chinensis
  misc_feature (225)..(382): Homolog of NCBI NO: 33285922 NR Description: O-methyltransferase-like protein [Brassica rapa
  misc_feature (16)..(132): Homolog of NCBI NO: 15236280 NR Description: O-methyltransferase, family 2 family; protein id:
  misc_feature (167)..(383): Homolog of NCBI NO: 15236280 NR Description: O-methyltransferase, family 2 family; protein id:
  misc_feature (2)..(383): Homolog of NCBI NO: 15236282 NR Description: O-methyltransferase, family 2 family
TMSSDQLSKFLDRNKMEDNKRKVLDEEAKASLDIWKYVFGFADIAAAKCAIDLKIPEAIENHPSSQPVTLAELSSAVSASPSHLRRIMRFLVHQGIFKEIPTKDGLATGYVNTPLSRRLMITRRDGKSLAPFVLFETTPEMLAPWLRLSSVVSSPVNGSTPPPFDAVHGKDVWSFAQDNPFLSDMINEAMACDARRVVPRVAGACHGLFDGVTTMVDVGGGTGETMGMLVKEFPWIKGFNFDLPHVIEVAEVLDGVENVEGDMFDSIPACDAIFIKWVLHDWGDKDCIKILKNCKEAVPPNIGKVLIVESVIGENKKTMIVDERDEKLEHVRLMLDMVMMAHTSTGKERTLKEWDFVLKEAGFARYEVRDIDDVQSLIIAYRS

SEQ ID NO: 29734 - protein, 382 aa, Arabidopsis thaliana
  peptide (1)..(382): Ceres Seq. ID no. 12371999
  misc_feature (103)..(358): Pfam Name: O-methyltransferase Pfam Description: O-methyltransferase
  misc_feature (24)..(367): Homolog of NCBI NO: 33286372 NR Description: (R,S)-reticuline 7-O-methyltransferase [Papaver
  misc_feature (25)..(380): Homolog of NCBI NO: 2282586 NR Description: methyltransferase [Prunus armeniaca]
  misc_feature (24)..(380): Homolog of NCBI NO: 4574324 NR Description: caffeic acid ortho-methyltransferase [Pinus
  misc_feature (24)..(380): Homolog of NCBI NO: 7447883 NR Description: catechol O-methyltransferase homolog - Monterey
  misc_feature (24)..(380): Homolog of NCBI NO: 1777386 NR Description: caffeic acid O-methyltransferase
  misc_feature (23)..(380): Homolog of NCBI NO: 32440935 NR Description: caffeic acid O-methyltransferase [Rosa chinensis
  misc_feature (224)..(381): Homolog of NCBI NO: 33285922 NR Description: O-methyltransferase-like protein [Brassica rapa
  misc_feature (15)..(131): Homolog of NCBI NO: 15236280 NR Description: O-methyltransferase, family 2 family; protein id:
  misc_feature (166)..(382): Homolog of NCBI NO: 15236280 NR Description: O-methyltransferase, family 2 family; protein id:
  misc_feature (1)..(382): Homolog of NCBI NO: 15236282 NR Description: O-methyltransferase, family 2 family
MSSDQLSKFLDRNKMEDNKRKVLDEEAKASLDIWKYVFGFADIAAAKCAIDLKIPEAIENHPSSQPVTLAELSSAVSASPSHLRRIMRFLVHQGIFKEIPTKDGLATGYVNTPLSRRLMITRRDGKSLAPFVLFETTPEMLAPWLRLSSVVSSPVNGSTPPPFDAVHGKDVWSFAQDNPFLSDMINEAMACDARRVVPRVAGACHGLFDGVTTMVDVGGGTGETMGMLVKEFPWIKGFNFDLPHVIEVAEVLDGVENVEGDMFDSIPACDAIFIKWVLHDWGDKDCIKILKNCKEAVPPNIGKVLIVESVIGENKKTMIVDERDEKLEHVRLMLDMVMMAHTSTGKERTLKEWDFVLKEAGFARYEVRDIDDVQSLIIAYRS

SEQ ID NO: 29735 - protein, 368 aa, Arabidopsis thaliana
  peptide (1)..(368): Ceres Seq. ID no. 12372000
  misc_feature (89)..(344): Pfam Name: O-methyltransferase Pfam Description: O-methyltransferase
  misc_feature (10)..(353): Homolog of NCBI NO: 33286372 NR Description: (R,S)-reticuline 7-O-methyltransferase [Papaver
  misc_feature (11)..(366): Homolog of NCBI NO: 2282586 NR Description: methyltransferase [Prunus armeniaca]
  misc_feature (10)..(366): Homolog of NCBI NO: 4574324 NR Description: caffeic acid ortho-methyltransferase [Pinus
  misc_feature (10)..(366): Homolog of NCBI NO: 7447883 NR Description: catechol O-methyltransferase homolog - Monterey
  misc_feature (10)..(366): Homolog of NCBI NO: 1777386 NR Description: caffeic acid O-methyltransferase
  misc_feature (9)..(366): Homolog of NCBI NO: 32440935 NR Description: caffeic acid O-methyltransferase [Rosa chinensis
  misc_feature (210)..(367): Homolog of NCBI NO: 33285922 NR Description: O-methyltransferase-like protein [Brassica rapa
  misc_feature (1)..(117): Homolog of NCBI NO: 15236280 NR Description: O-methyltransferase, family 2 family; protein id:
  misc_feature (152)..(368): Homolog of NCBI NO: 15236280 NR Description: O-methyltransferase, family 2 family; protein id:
  misc_feature (1)..(368): Homolog of NCBI NO: 15236282 NR Description: O-methyltransferase, family 2 family
MEDNKRKVLDEEAKASLDIWKYVFGFADIAAAKCAIDLKIPEAIENHPSSQPVTLAELSSAVSASPSHLRRIMRFLVHQGIFKEIPTKDGLATGYVNTPLSRRLMITRRDGKSLAPFVLFETTPEMLAPWLRLSSVVSSPVNGSTPPPFDAVHGKDVWSFAQDNPFLSDMINEAMACDARRVVPRVAGACHGLFDGVTTMVDVGGGTGETMGMLVKEFPWIKGFNFDLPHVIEVAEVLDGVENVEGDMFDSIPACDAIFIKWVLHDWGDKDCIKILKNCKEAVPPNIGKVLIVESVIGENKKTMIVDERDEKLEHVRLMLDMVMMAHTSTGKERTLKEWDFVLKEAGFARYEVRDIDDVQSLIIAYRS

SEQ ID NO: 29736 - DNA, 1059 bp, Arabidopsis thaliana
  misc_feature (1)..(1059): Ceres Seq. ID no. 12396829
  misc_feature: MA Experiment ID: 20000180 Result: Down-regulated in Transcription
  misc_feature: MA Experiment 20000180 PARAMETER Experiment Name: At_Germinating_Seeds_P Parameter: Age (hr) Value: 24 vs. 0
  misc_feature: MA Experiment 20000180 PARAMETER Experiment Name: At_Germinating_Seeds_P Parameter: Tissue Value: Germinating Seeds
  misc_feature: MA Experiment ID: 20001557 Result: Up-regulated in Transcription
  misc_feature: MA Experiment 20001557 PARAMETER Experiment Name: At_Drought_Soil_Dry_P Parameter: Age (day) Value: 27
  misc_feature: MA Experiment 20001557 PARAMETER Experiment Name: At_Drought_Soil_Dry_P Parameter: Organism Value: A. thaliana
  misc_feature: MA Experiment 20001557 PARAMETER Experiment Name: At_Drought_Soil_Dry_P Parameter: Plant Line Value: WS
  misc_feature: MA Experiment 20001557 PARAMETER Experiment Name: At_Drought_Soil_Dry_P Parameter: Post Timepoint (hr) Value: 3
  misc_feature: MA Experiment 20001557 PARAMETER Experiment Name: At_Drought_Soil_Dry_P Parameter: Post-Treatment Value: Re-Water vs. No Drought
  misc_feature: MA Experiment 20001557 PARAMETER Experiment Name: At_Drought_Soil_Dry_P Parameter: Timepoint (day) Value: 13
  misc_feature: MA Experiment 20001557 PARAMETER Experiment Name: At_Drought_Soil_Dry_P Parameter: Treatment Value: Drought vs. No Drought
  misc_feature: MA Experiment ID: 20001558 Result: Up-regulated in Transcription
  misc_feature: MA Experiment 20001558 PARAMETER Experiment Name: At_Drought_Soil_Dry_P Parameter: Age (day) Value: 27
  misc_feature: MA Experiment 20001558 PARAMETER Experiment Name: At_Drought_Soil_Dry_P Parameter: Organism Value: A. thaliana
  misc_feature: MA Experiment 20001558 PARAMETER Experiment Name: At_Drought_Soil_Dry_P Parameter: Plant Line Value: WS
  misc_feature: MA Experiment 20001558 PARAMETER Experiment Name: At_Drought_Soil_Dry_P Parameter: Post Timepoint (hr) Value: 6
  misc_feature: MA Experiment 20001558 PARAMETER Experiment Name: At_Drought_Soil_Dry_P Parameter: Post-Treatment Value: Re-Water vs. No Drought
  misc_feature: MA Experiment 20001558 PARAMETER Experiment Name: At_Drought_Soil_Dry_P Parameter: Timepoint (day) Value: 13
  misc_feature: MA Experiment 20001558 PARAMETER Experiment Name: At_Drought_Soil_Dry_P Parameter: Treatment Value: Drought vs. No Drought
tctctccgtccaatttccgtctctctctctttttatctcaccgtctgatcgcttagaagcaaccatgcctcagggagattacatagatttgcacaggaagaggaatggatatcgcctcgaccacttcgagagaaagcgcaagaaggaggcgcgtgaagttcacaagcactccaccatggctcaaaagtctctaggtatcaagggtaagatgattgctaagaaaaactatgctgagaaagctctcatgaagaaaacattgaaaatgcatgaagagtcatcatcaaggcgtaaggctgatgagaatgttcaggaaggagctgttcctgcttatcttcttgatcgtgaagacaccactcgtgccaaggttcttagcaacaccattaaacaaaagaggaaagagaaagctggcaaatgggaggtccctcttccaaaggtccgtccagttgctgaagatgaaatgtttagagtgatccgatctggaaaaaggaaaactaaacaatggaagcggatggttacaaaagctacatttgttggacctgctttcacaaggaagcctccaaagtacgagcgtttcatccgtccatctggtcttcgtttcaccaaggcccacgtcactcaccctgaactaaaatgcactttctgtctcgagatcatcgggattaagaagaatcctaacggtcccatgtatacatcactcggtgtgatgaccaggggaacaatcatcgaggtcaatgtgagtgagcttggtcttgttacaccagctggaaaggttgtctggggaaaatacgctcaagtgacaaacaatccagagaacgacggatgtataaatgctgttttacttgtgtaaccaaatgtccggcactgtcgtagaagtatggatagagacgagaggaaggcgagaatcatgttggctagttttattttgttttctcctgaaacaattttgtgttatttcaagtttttttatgaatgtgtggttggtcttctcatcacattaactagctgctatgttagctttataagtatcccacattatgaaatttgttgcttctaatgtcc

SEQ ID NO: 29737 - protein, 281 aa, Arabidopsis thaliana
  peptide (1)..(281): Ceres Seq. ID no. 12396830
  misc_feature (22)..(258): Pfam Name: Ribosomal protein S8e Pfam Description: Ribosomal protein S8e
  misc_feature (21)..(281): Homolog of NCBI NO: 31224644 NR Description: ENSANGP00000023534 [Anopheles gambiae]
  misc_feature (22)..(281): Homolog of NCBI NO: 9438133 NR Description: unknown [Ochlerotatus triseriatus]
  misc_feature (22)..(281): Homolog of NCBI NO: 12856931 NR Description: unnamed protein product [Mus musculus]
  misc_feature (22)..(281): Homolog of NCBI NO: 34924868 NR Description: TGF beta-inducible nuclear protein 1 (CDK105
  misc_feature (22)..(281): Homolog of NCBI NO: 28278483 NR Description: Similar to RIKEN cDNA 5730427N09 gene [Danio
  misc_feature (22)..(281): Homolog of NCBI NO: 34925411 NR Description: TGF beta-inducible nuclear protein 1 (L-name
  misc_feature (22)..(281): Homolog of NCBI NO: 7662677 NR Description: hypothetical protein YR-29
  misc_feature (22)..(281): Homolog of NCBI NO: 33146852 NR Description: putative TGF(transfoming growth factor) beta
  misc_feature (22)..(281): Homolog of NCBI NO: 21553587 NR Description: unknown [Arabidopsis thaliana]
  misc_feature (22)..(281): Homolog of NCBI NO: 15240023 NR Description: putative protein
LSVQFPSLSLFISPSDRLEATMPQGDYIDLHRKRNGYRLDHFERKRKKEAREVHKHSTMAQKSLGIKGKMIAKKNYAEKALMKKTLKMHEESSSRRKADENVQEGAVPAYLLDREDTTRAKVLSNTIKQKRKEKAGKWEVPLPKVRPVAEDEMFRVIRSGKRKTKQWKRMVTKATFVGPAFTRKPPKYERFIRPSGLRFTKAHVTHPELKCTFCLEIIGIKKNPNGPMYTSLGVMTRGTIIEVNVSELGLVTPAGKVVWGKYAQVTNNPENDGCINAVLLV

SEQ ID NO: 29738 - protein, 260 aa, Arabidopsis thaliana
  peptide (1)..(260): Ceres Seq. ID no. 12396831
  misc_feature (1)..(237): Pfam Name: Ribosomal protein S8e Pfam Description: Ribosomal protein S8e
  misc_feature (1)..(260): Homolog of NCBI NO: 31224644 NR Description: ENSANGP00000023534 [Anopheles gambiae]
  misc_feature (1)..(260): Homolog of NCBI NO: 9438133 NR Description: unknown [Ochlerotatus triseriatus]
  misc_feature (1)..(260): Homolog of NCBI NO: 12856931 NR Description: unnamed protein product [Mus musculus]
  misc_feature (1)..(260): Homolog of NCBI NO: 34924868 NR Description: TGF beta-inducible nuclear protein 1 (CDK105
  misc_feature (1)..(260): Homolog of NCBI NO: 28278483 NR Description: Similar to RIKEN cDNA 5730427N09 gene [Danio
  misc_feature (1)..(260): Homolog of NCBI NO: 34925411 NR Description: TGF beta-inducible nuclear protein 1 (L-name
  misc_feature (1)..(260): Homolog of NCBI NO: 7662677 NR Description: hypothetical protein YR-29
  misc_feature (1)..(260): Homolog of NCBI NO: 33146852 NR Description: putative TGF(transfoming growth factor) beta
  misc_feature (1)..(260): Homolog of NCBI NO: 21553587 NR Description: unknown [Arabidopsis thaliana]
  misc_feature (1)..(260): Homolog of NCBI NO: 15240023 NR Description: putative protein
MPQGDYIDLHRKRNGYRLDHFERKRKKEAREVHKHSTMAQKSLGIKGKMIAKKNYAEKALMKKTLKMHEESSSRRKADENVQEGAVPAYLLDREDTTRAKVLSNTIKQKRKEKAGKWEVPLPKVRPVAEDEMFRVIRSGKRKTKQWKRMVTKATFVGPAFTRKPPKYERFIRPSGLRFTKAHVTHPELKCTFCLEIIGIKKNPNGPMYTSLGVMTRGTIIEVNVSELGLVTPAGKVVWGKYAQVTNNPENDGCINAVLLV

SEQ ID NO: 29739 - protein, 223 aa, Arabidopsis thaliana
  peptide (1)..(223): Ceres Seq. ID no. 12396832
  misc_feature (1)..(200): Pfam Name: Ribosomal protein S8e Pfam Description: Ribosomal protein S8e
  misc_feature (1)..(223): Homolog of NCBI NO: 31224644 NR Description: ENSANGP00000023534 [Anopheles gambiae]
  misc_feature (1)..(223): Homolog of NCBI NO: 9438133 NR Description: unknown [Ochlerotatus triseriatus]
  misc_feature (1)..(223): Homolog of NCBI NO: 12856931 NR Description: unnamed protein product [Mus musculus]
  misc_feature (1)..(223): Homolog of NCBI NO: 34924868 NR Description: TGF beta-inducible nuclear protein 1 (CDK105
  misc_feature (1)..(223): Homolog of NCBI NO: 28278483 NR Description: Similar to RIKEN cDNA 5730427N09 gene [Danio
  misc_feature (1)..(223): Homolog of NCBI NO: 34925411 NR Description: TGF beta-inducible nuclear protein 1 (L-name
  misc_feature (1)..(223): Homolog of NCBI NO: 7662677 NR Description: hypothetical protein YR-29
  misc_feature (1)..(223): Homolog of NCBI NO: 33146852 NR Description: putative TGF(transfoming growth factor) beta
  misc_feature (1)..(223): Homolog of NCBI NO: 21553587 NR Description: unknown [Arabidopsis thaliana]
  misc_feature (1)..(223): Homolog of NCBI NO: 15240023 NR Description: putative protein
MAQKSLGIKGKMIAKKNYAEKALMKKTLKMHEESSSRRKADENVQEGAVPAYLLDREDTTRAKVLSNTIKQKRKEKAGKWEVPLPKVRPVAEDEMFRVIRSGKRKTKQWKRMVTKATFVGPAFTRKPPKYERFIRPSGLRFTKAHVTHPELKCTFCLEIIGIKKNPNGPMYTSLGVMTRGTIIEVNVSELGLVTPAGKVVWGKYAQVTNNPENDGCINAVLLV

SEQ ID NO: 29740 - DNA, 976 bp, Arabidopsis thaliana
  misc_feature (1)..(976): Ceres Seq. ID no. 12322294
  misc_feature: MA Experiment ID: 108473 Result: Down-regulated in Transcription
  misc_feature: MA Experiment 108473 PARAMETER Experiment Name: At_Drought_Flowers_cDNA_P Parameter: Timepoint (hr) Value: 7 d
  misc_feature: MA Experiment 108473 PARAMETER Experiment Name: At_Drought_Flowers_cDNA_P Parameter: Tissue Value: Flower
  misc_feature: MA Experiment 108473 PARAMETER Experiment Name: At_Drought_Flowers_cDNA_P Parameter: Treatment Value: Drought vs. No Drought
  misc_feature: MA Experiment ID: 108595 Result: Up-regulated in Transcription
  misc_feature: MA Experiment 108595 PARAMETER Experiment Name: At_Ler-pi_Ovule_cDNA_P Parameter: Plant Line Value: null
  misc_feature: MA Experiment ID: 108668 Result: Down-regulated in Transcription
  misc_feature: MA Experiment 108668 PARAMETER Experiment Name: At_2mM_SA_cDNA_P Parameter: Plant Line Value: WS
  misc_feature: MA Experiment 108668 PARAMETER Experiment Name: At_2mM_SA_cDNA_P Parameter: Timepoint (hr) Value: 6
  misc_feature: MA Experiment 108668 PARAMETER Experiment Name: At_2mM_SA_cDNA_P Parameter: Treatment Value: 2mM SA vs. No Treatment
  misc_feature: MA Experiment ID: 20000069 Result: Down-regulated in Transcription
  misc_feature: MA Experiment 20000069 PARAMETER Experiment Name: At_100uM_ABA_Mutants_cDNA_P Parameter: Plant Line Value: CS23
  misc_feature: MA Experiment 20000069 PARAMETER Experiment Name: At_100uM_ABA_Mutants_cDNA_P Parameter: Timepoint (hr) Value: 6
  misc_feature: MA Experiment 20000069 PARAMETER Experiment Name: At_100uM_ABA_Mutants_cDNA_P Parameter: Tissue Value: Aerial
  misc_feature: MA Experiment 20000069 PARAMETER Experiment Name: At_100uM_ABA_Mutants_cDNA_P Parameter: Treatment Value: 100uM ABA vs. No Treatment
  misc_feature: MA Experiment ID: 20000072 Result: Down-regulated in Transcription
  misc_feature: MA Experiment 20000072 PARAMETER Experiment Name: At_100uM_ABA_Mutants_cDNA_P Parameter: Plant Line Value: CS8105
  misc_feature: MA Experiment 20000072 PARAMETER Experiment Name: At_100uM_ABA_Mutants_cDNA_P Parameter: Timepoint (hr) Value: 6
  misc_feature: MA Experiment 20000072 PARAMETER Experiment Name: At_100uM_ABA_Mutants_cDNA_P Parameter: Tissue Value: Aerial
  misc_feature: MA Experiment 20000072 PARAMETER Experiment Name: At_100uM_ABA_Mutants_cDNA_P Parameter: Treatment Value: 100uM ABA vs. No Treatment
  misc_feature: MA Experiment ID: 20000113 Result: Down-regulated in Transcription
  misc_feature: MA Experiment 20000113 PARAMETER Experiment Name: At_42deg_Heat_cDNA_P Parameter: Temperature (deg C) Value: 42 vs. 22
  misc_feature: MA Experiment 20000113 PARAMETER Experiment Name: At_42deg_Heat_cDNA_P Parameter: Timepoint (hr) Value: 8
  misc_feature: MA Experiment 20000113 PARAMETER Experiment Name: At_42deg_Heat_cDNA_P Parameter: Tissue Value: Aerial
  misc_feature: MA Experiment ID: 20000117 Result: Down-regulated in Transcription
  misc_feature: MA Experiment 20000117 PARAMETER Experiment Name: At_100uM_ABA_Mutants_cDNA_P Parameter: Plant Line Value: Columbia
  misc_feature: MA Experiment 20000117 PARAMETER Experiment Name: At_100uM_ABA_Mutants_cDNA_P Parameter: Timepoint (hr) Value: 6
  misc_feature: MA Experiment 20000117 PARAMETER Experiment Name: At_100uM_ABA_Mutants_cDNA_P Parameter: Tissue Value: Aerial
  misc_feature: MA Experiment 20000117 PARAMETER Experiment Name: At_100uM_ABA_Mutants_cDNA_P Parameter: Treatment Value: 100uM ABA vs. No Treatment
  misc_feature: MA Experiment ID: 20000180 Result: Up-regulated in Transcription
  misc_feature: MA Experiment 20000180 PARAMETER Experiment Name: At_Germinating_Seeds_P Parameter: Age (hr) Value: 24 vs. 0
  misc_feature: MA Experiment 20000180 PARAMETER Experiment Name: At_Germinating_Seeds_P Parameter: Tissue Value: Germinating Seeds
  misc_feature: MA Experiment ID: 20000184 Result: Down-regulated in Transcription
  misc_feature: MA Experiment 20000184 PARAMETER Experiment Name: At_Shoots__P Parameter: Age (day) Value: 7
  misc_feature: MA Experiment 20000184 PARAMETER Experiment Name: At_Shoots__P Parameter: Tissue Value: Shoots vs. Whole Plant
  misc_feature: MA Experiment ID: 20000185 Result: Down-regulated in Transcription
  misc_feature: MA Experiment 20000185 PARAMETER Experiment Name: At_Roots__P Parameter: Age (day) Value: 7 vs. 21
  misc_feature: MA Experiment 20000185 PARAMETER Experiment Name: At_Roots__P Parameter: Organism Value: A. thaliana
  misc_feature: MA Experiment 20000185 PARAMETER Experiment Name: At_Roots__P Parameter: Tissue Value: Roots vs. Whole Plant
  misc_feature: MA Experiment ID: 20000264 Result: Down-regulated in Transcription
  misc_feature: MA Experiment 20000264 PARAMETER Experiment Name: At_Open_Flower_P Parameter: Age (day) Value: 21
  misc_feature: MA Experiment 20000264 PARAMETER Experiment Name: At_Open_Flower_P Parameter: Plant Line Value: WS
  misc_feature: MA Experiment 20000264 PARAMETER Experiment Name: At_Open_Flower_P Parameter: Tissue Value: Open Flower vs. Whole Plant
  misc_feature: MA Experiment ID: 20000265 Result: Down-regulated in Transcription
  misc_feature: MA Experiment 20000265 PARAMETER Experiment Name: At_Open_Flower_P Parameter: Age (day) Value: 21
  misc_feature: MA Experiment 20000265 PARAMETER Experiment Name: At_Open_Flower_P Parameter: Plant Line Value: WS
  misc_feature: MA Experiment 20000265 PARAMETER Experiment Name: At_Open_Flower_P Parameter: Tissue Value: Closed Flower vs. Whole Plant
  misc_feature: MA Experiment ID: 20000286 Result: Down-regulated in Transcription
  misc_feature: MA Experiment 20000286 PARAMETER Experiment Name: At_Open_Flower_P Parameter: Age (day) Value: 21
  misc_feature: MA Experiment 20000286 PARAMETER Experiment Name: At_Open_Flower_P Parameter: Plant Line Value: WS
  misc_feature: MA Experiment 20000286 PARAMETER Experiment Name: At_Open_Flower_P Parameter: Tissue Value: Half Open vs. Whole Plant
  misc_feature: MA Experiment ID: 20000438 Result: Down-regulated in Transcription
  misc_feature: MA Experiment 20000438 PARAMETER Experiment Name: At_Shoots__P Parameter: Age (day) Value: 14
  misc_feature: MA Experiment 20000438 PARAMETER Experiment Name: At_Shoots__P Parameter: Tissue Value: Shoots vs. Whole Plant
  misc_feature: MA Experiment ID: 20000439 Result: Down-regulated in Transcription
  misc_feature: MA Experiment 20000439 PARAMETER Experiment Name: At_Roots__P Parameter: Age (day) Value: 14 vs. 21
  misc_feature: MA Experiment 20000439 PARAMETER Experiment Name: At_Roots__P Parameter: Organism Value: A. thaliana
  misc_feature: MA Experiment 20000439 PARAMETER Experiment Name: At_Roots__P Parameter: Tissue Value: Roots vs. Whole Plant
  misc_feature: MA Experiment ID: 20000495 Result: Up-regulated in Transcription
  misc_feature: MA Experiment 20000495 PARAMETER Experiment Name: At_Guard_Cells_P Parameter: Harvest Date Value: 8/2/2002
  misc_feature: MA Experiment 20000495 PARAMETER Experiment Name: At_Guard_Cells_P Parameter: Organism Value: A. thaliana
  misc_feature: MA Experiment 20000495 PARAMETER Experiment Name: At_Guard_Cells_P Parameter: Tissue Value: Guard Cells vs. Leaves
  misc_feature: MA Experiment ID: 20000527 Result: Down-regulated in Transcription
  misc_feature: MA Experiment 20000527 PARAMETER Experiment Name: At_10percent_PEG_P Parameter: Age (day) Value: 20
  misc_feature: MA Experiment 20000527 PARAMETER Experiment Name: At_10percent_PEG_P Parameter: Organism Value: A. thaliana
  misc_feature: MA Experiment 20000527 PARAMETER Experiment Name: At_10percent_PEG_P Parameter: Plant Line Value: WS
  misc_feature: MA Experiment 20000527 PARAMETER Experiment Name: At_10percent_PEG_P Parameter: Timepoint (day) Value: 20
  misc_feature: MA Experiment 20000527 PARAMETER Experiment Name: At_10percent_PEG_P Parameter: Tissue Value: Whole Plant
  misc_feature: MA Experiment 20000527 PARAMETER Experiment Name: At_10percent_PEG_P Parameter: Treatment Value: 10percent PEG vs. No Treatment
  misc_feature: MA Experiment ID: 20000794 Result: Down-regulated in Transcription
  misc_feature: MA Experiment 20000794 PARAMETER Experiment Name: At_Petals_P Parameter: Age (day) Value: 23-25 days
  misc_feature: MA Experiment 20000794 PARAMETER Experiment Name: At_Petals_P Parameter: Plant Line Value: WS
  misc_feature: MA Experiment 20000794 PARAMETER Experiment Name: At_Petals_P Parameter: Tissue Value: Petals vs. Whole plant
  misc_feature: MA Experiment ID: 20001555 Result: Down-regulated in Transcription
  misc_feature: MA Experiment 20001555 PARAMETER Experiment Name: At_Drought_Soil_Dry_P Parameter: Age (day) Value: 24
  misc_feature: MA Experiment 20001555 PARAMETER Experiment Name: At_Drought_Soil_Dry_P Parameter: Organism Value: A. thaliana
  misc_feature: MA Experiment 20001555 PARAMETER Experiment Name: At_Drought_Soil_Dry_P Parameter: Plant Line Value: WS
  misc_feature: MA Experiment 20001555 PARAMETER Experiment Name: At_Drought_Soil_Dry_P Parameter: Post Timepoint (hr) Value: None
  misc_feature: MA Experiment 20001555 PARAMETER Experiment Name: At_Drought_Soil_Dry_P Parameter: Post-Treatment Value: None
  misc_feature: MA Experiment 20001555 PARAMETER Experiment Name: At_Drought_Soil_Dry_P Parameter: Timepoint (day) Value: 10
  misc_feature: MA Experiment 20001555 PARAMETER Experiment Name: At_Drought_Soil_Dry_P Parameter: Treatment Value: Drought vs. No Drought
  misc_feature: MA Experiment ID: 20001556 Result: Down-regulated in Transcription
  misc_feature: MA Experiment 20001556 PARAMETER Experiment Name: At_Drought_Soil_Dry_P Parameter: Age (day) Value: 26
  misc_feature: MA Experiment 20001556 PARAMETER Experiment Name: At_Drought_Soil_Dry_P Parameter: Organism Value: A. thaliana
  misc_feature: MA Experiment 20001556 PARAMETER Experiment Name: At_Drought_Soil_Dry_P Parameter: Plant Line Value: WS
  misc_feature: MA Experiment 20001556 PARAMETER Experiment Name: At_Drought_Soil_Dry_P Parameter: Post Timepoint (hr) Value: None
  misc_feature: MA Experiment 20001556 PARAMETER Experiment Name: At_Drought_Soil_Dry_P Parameter: Post-Treatment Value: None
  misc_feature: MA Experiment 20001556 PARAMETER Experiment Name: At_Drought_Soil_Dry_P Parameter: Timepoint (day) Value: 12
  misc_feature: MA Experiment 20001556 PARAMETER Experiment Name: At_Drought_Soil_Dry_P Parameter: Treatment Value: Drought vs. No Drought
  misc_feature: MA Experiment ID: 20001558 Result: Down-regulated in Transcription
  misc_feature: MA Experiment 20001558 PARAMETER Experiment Name: At_Drought_Soil_Dry_P Parameter: Age (day) Value: 27
  misc_feature: MA Experiment 20001558 PARAMETER Experiment Name: At_Drought_Soil_Dry_P Parameter: Organism Value: A. thaliana
  misc_feature: MA Experiment 20001558 PARAMETER Experiment Name: At_Drought_Soil_Dry_P Parameter: Plant Line Value: WS
  misc_feature: MA Experiment 20001558 PARAMETER Experiment Name: At_Drought_Soil_Dry_P Parameter: Post Timepoint (hr) Value: 6
  misc_feature: MA Experiment 20001558 PARAMETER Experiment Name: At_Drought_Soil_Dry_P Parameter: Post-Treatment Value: Re-Water vs. No Drought
  misc_feature: MA Experiment 20001558 PARAMETER Experiment Name: At_Drought_Soil_Dry_P Parameter: Timepoint (day) Value: 13
  misc_feature: MA Experiment 20001558 PARAMETER Experiment Name: At_Drought_Soil_Dry_P Parameter: Treatment Value: Drought vs. No Drought
  misc_feature: MA Experiment ID: 20001559 Result: Down-regulated in Transcription
  misc_feature: MA Experiment 20001559 PARAMETER Experiment Name: At_Drought_Soil_Dry_P Parameter: Age (day) Value: 28
  misc_feature: MA Experiment 20001559 PARAMETER Experiment Name: At_Drought_Soil_Dry_P Parameter: Organism Value: A. thaliana
  misc_feature: MA Experiment 20001559 PARAMETER Experiment Name: At_Drought_Soil_Dry_P Parameter: Plant Line Value: WS
  misc_feature: MA Experiment 20001559 PARAMETER Experiment Name: At_Drought_Soil_Dry_P Parameter: Post Timepoint (hr) Value: 29
  misc_feature: MA Experiment 20001559 PARAMETER Experiment Name: At_Drought_Soil_Dry_P Parameter: Post-Treatment Value: Re-Water vs. No Drought
  misc_feature: MA Experiment 20001559 PARAMETER Experiment Name: At_Drought_Soil_Dry_P Parameter: Timepoint (day) Value: 14
  misc_feature: MA Experiment 20001559 PARAMETER Experiment Name: At_Drought_Soil_Dry_P Parameter: Treatment Value: Drought vs. No Drought
  misc_feature: MA Experiment ID: 20001768 Result: Up-regulated in Transcription
  misc_feature: MA Experiment 20001768 PARAMETER Experiment Name: At_Far-red-enriched-adult_P Parameter: Age (day) Value: 28
  misc_feature: MA Experiment 20001768 PARAMETER Experiment Name: At_Far-red-enriched-adult_P Parameter: Light Value: Far-red enriched vs. White
  misc_feature: MA Experiment 20001768 PARAMETER Experiment Name: At_Far-red-enriched-adult_P Parameter: Organism Value: A. thaliana
  misc_feature: MA Experiment 20001768 PARAMETER Experiment Name: At_Far-red-enriched-adult_P Parameter: Plant Line Value: Columbia
  misc_feature: MA Experiment 20001768 PARAMETER Experiment Name: At_Far-red-enriched-adult_P Parameter: Timepoint (hr) Value: 1
  misc_feature: MA Experiment 20001768 PARAMETER Experiment Name: At_Far-red-enriched-adult_P Parameter: Tissue Value: Aerial
  misc_feature: MA Experiment ID: 20001771 Result: Up-regulated in Transcription
  misc_feature: MA Experiment 20001771 PARAMETER Experiment Name: At_Far-red-enriched-adult_P Parameter: Age (day) Value: 28
  misc_feature: MA Experiment 20001771 PARAMETER Experiment Name: At_Far-red-enriched-adult_P Parameter: Light Value: Far-red enriched vs. White
  misc_feature: MA Experiment 20001771 PARAMETER Experiment Name: At_Far-red-enriched-adult_P Parameter: Organism Value: A. thaliana
  misc_feature: MA Experiment 20001771 PARAMETER Experiment Name: At_Far-red-enriched-adult_P Parameter: Plant Line Value: Columbia
  misc_feature: MA Experiment 20001771 PARAMETER Experiment Name: At_Far-red-enriched-adult_P Parameter: Timepoint (hr) Value: 16
  misc_feature: MA Experiment 20001771 PARAMETER Experiment Name: At_Far-red-enriched-adult_P Parameter: Tissue Value: Aerial
  misc_feature: MA Experiment ID: 20001773 Result: Up-regulated in Transcription
  misc_feature: MA Experiment 20001773 PARAMETER Experiment Name: At_Far-red-enriched-adult_P Parameter: Age (day) Value: 30
  misc_feature: MA Experiment 20001773 PARAMETER Experiment Name: At_Far-red-enriched-adult_P Parameter: Light Value: Far-red enriched vs. White
  misc_feature: MA Experiment 20001773 PARAMETER Experiment Name: At_Far-red-enriched-adult_P Parameter: Organism Value: A. thaliana
  misc_feature: MA Experiment 20001773 PARAMETER Experiment Name: At_Far-red-enriched-adult_P Parameter: Plant Line Value: Columbia
  misc_feature: MA Experiment 20001773 PARAMETER Experiment Name: At_Far-red-enriched-adult_P Parameter: Timepoint (hr) Value: 48
  misc_feature: MA Experiment 20001773 PARAMETER Experiment Name: At_Far-red-enriched-adult_P Parameter: Tissue Value: Aerial
  misc_feature: MA Experiment ID: 20001906 Result: Down-regulated in Transcription
  misc_feature: MA Experiment 20001906 PARAMETER Experiment Name: At_Drought_Reproduction_P Parameter: Age (day) Value: 35
  misc_feature: MA Experiment 20001906 PARAMETER Experiment Name: At_Drought_Reproduction_P Parameter: Organism Value: A. thaliana
  misc_feature: MA Experiment 20001906 PARAMETER Experiment Name: At_Drought_Reproduction_P Parameter: Plant Line Value: WS
  misc_feature: MA Experiment 20001906 PARAMETER Experiment Name: At_Drought_Reproduction_P Parameter: Timepoint (day) Value: 5
  misc_feature: MA Experiment 20001906 PARAMETER Experiment Name: At_Drought_Reproduction_P Parameter: Tissue Value: Siliques
  misc_feature: MA Experiment 20001906 PARAMETER Experiment Name: At_Drought_Reproduction_P Parameter: Treatment Value: Drought vs. No Drought
aacacaaacaaaatatcaacactcttgaaaacagagccatggaacattctctcatcatcctcctcttcaccgtcctcctcctcctcaccaccactcccggaatcctatctcagccctctccagccgtcgctccggccccaccaggacccacaaacgttaccaaaatcctagagaaagctggtcaattcaccgtcttcatccgactcctcaaatccactggagtcgctaaccaactctacggccaactaaacaactccgacaatggaatcactatattcgcaccgagtgattcctcgttcaccggtctcaaagccgggaccctaaattcgttaaccgatgagcaacaagtagagcttattcagtttcatgtcataccaagttacgtctcttcctcaaacttccaaacaataagtaaccctctccggactcaggccggtgactccgccgatggacattttcctctcaacgttaccaccagtggcaataccgtaaatatcacgtccggcgtaaccaacaccaccgtctccggcaatgtctacagcgatggacagctcgctgtttatcaggtcgataaggttttgcttccacaacaagttttcgatcctcgtcctcctgctccggctccggctccgtctgtatcgaaatcaaagaagaagaaggatgacagtgatagttccagtgatgattctccggcgatgcttcgtttgctttgcgtaatgttggttctgtgtgtgatgcggtgtcgttttgcgtcatgagtgtaatgctcgcatggttttatttgtgatgaaaagctttttttttttttgtgctgataaattgttattttttattactcatgattttctgccatgtgggtgattttggggatatatttgtgtcttggttttcatacgattttgtgttaatcaatccatttgttttttatattttcgtttatttttattaatacaaatcatattttccgtttttgtgc

SEQ ID NO: 29741 - protein, 251 aa, Arabidopsis thaliana
  peptide (1)..(251): Ceres Seq. ID no. 12322295
  misc_feature (49)..(195): Pfam Name: Fasciclin domain Pfam Description: Fasciclin domain
  misc_feature (24)..(217): Homolog of NCBI NO: 34910950 NR Description: putative arabinogalactan-like protein
  misc_feature (28)..(237): Homolog of NCBI NO: 2129473 NR Description: arabinogalactan-like protein - loblolly pine
  misc_feature (31)..(230): Homolog of NCBI NO: 34896012 NR Description: EST D25138(R3286) corresponds to a region of the gene.~Similar to Pinus taeda arabinogalactan-like protein
  misc_feature (21)..(231): Homolog of NCBI NO: 15242651 NR Description: fasciclin-like arabinogalactan-protein (FLA11)
  misc_feature (21)..(231): Homolog of NCBI NO: 21553523 NR Description: arabinogalactan protein-like [Arabidopsis
  misc_feature (24)..(231): Homolog of NCBI NO: 5919185 NR Description: arabinogalactan protein Pop14A9 [Populus x
  misc_feature (13)..(231): Homolog of NCBI NO: 30841338 NR Description: arabinogalactan protein [Gossypium hirsutum]
  misc_feature (13)..(251): Homolog of NCBI NO: 15294288 NR Description: AT5g60490/muf9_140 [Arabidopsis thaliana]
  misc_feature (13)..(250): Homolog of NCBI NO: 21553590 NR Description: arabinogalactan protein-like [Arabidopsis
  misc_feature (13)..(250): Homolog of NCBI NO: 15239344 NR Description: fasciclin-like arabinogalactan-protein (FLA12)
HKQNINTLENRAMEHSLIILLFTVLLLLTTTPGILSQPSPAVAPAPPGPTNVTKILEKAGQFTVFIRLLKSTGVANQLYGQLNNSDNGITIFAPSDSSFTGLKAGTLNSLTDEQQVELIQFHVIPSYVSSSNFQTISNPLRTQAGDSADGHFPLNVTTSGNTVNITSGVTNTTVSGNVYSDGQLAVYQVDKVLLPQQVFDPRPPAPAPAPSVSKSKKKKDDSDSSSDDSPAMLRLLCVMLVLCVMRCRFAS

SEQ ID NO: 29742 - protein, 239 aa, Arabidopsis thaliana
  peptide (1)..(239): Ceres Seq. ID no. 12322296
  misc_feature (37)..(183): Pfam Name: Fasciclin domain Pfam Description: Fasciclin domain
  misc_feature (12)..(205): Homolog of NCBI NO: 34910950 NR Description: putative arabinogalactan-like protein
  misc_feature (16)..(225): Homolog of NCBI NO: 2129473 NR Description: arabinogalactan-like protein - loblolly pine
  misc_feature (19)..(218): Homolog of NCBI NO: 34896012 NR Description: EST D25138(R3286) corresponds to a region of the gene.~Similar to Pinus taeda arabinogalactan-like protein
  misc_feature (9)..(219): Homolog of NCBI NO: 15242651 NR Description: fasciclin-like arabinogalactan-protein (FLA11)
  misc_feature (9)..(219): Homolog of NCBI NO: 21553523 NR Description: arabinogalactan protein-like [Arabidopsis
  misc_feature (12)..(219): Homolog of NCBI NO: 5919185 NR Description: arabinogalactan protein Pop14A9 [Populus x
  misc_feature (1)..(219): Homolog of NCBI NO: 30841338 NR Description: arabinogalactan protein [Gossypium hirsutum]
  misc_feature (1)..(239): Homolog of NCBI NO: 15294288 NR Description: AT5g60490/muf9_140 [Arabidopsis thaliana]
  misc_feature (1)..(238): Homolog of NCBI NO: 21553590 NR Description: arabinogalactan protein-like [Arabidopsis
  misc_feature (1)..(238): Homolog of NCBI NO: 15239344 NR Description: fasciclin-like arabinogalactan-protein (FLA12)
MEHSLIILLFTVLLLLTTTPGILSQPSPAVAPAPPGPTNVTKILEKAGQFTVFIRLLKSTGVANQLYGQLNNSDNGITIFAPSDSSFTGLKAGTLNSLTDEQQVELIQFHVIPSYVSSSNFQTISNPLRTQAGDSADGHFPLNVTTSGNTVNITSGVTNTTVSGNVYSDGQLAVYQVDKVLLPQQVFDPRPPAPAPAPSVSKSKKKKDDSDSSSDDSPAMLRLLCVMLVLCVMRCRFAS

SEQ ID NO: 29743 - DNA, 1153 bp, Arabidopsis thaliana
  misc_feature (1)..(1153): Ceres Seq. ID no. 13497626
  misc_feature: MA Experiment ID: 108464 Result: Down-regulated in Transcription
  misc_feature: MA Experiment 108464 PARAMETER Experiment Name: At_Germinating_Seeds_cDNA_P Parameter: Age (day) Value: 4 vs. 0
  misc_feature: MA Experiment 108464 PARAMETER Experiment Name: At_Germinating_Seeds_cDNA_P Parameter: Tissue Value: Germinating Seeds
  misc_feature: MA Experiment ID: 108595 Result: Up-regulated in Transcription
  misc_feature: MA Experiment 108595 PARAMETER Experiment Name: At_Ler-pi_Ovule_cDNA_P Parameter: Plant Line Value: null
  misc_feature: MA Experiment ID: 20000112 Result: Up-regulated in Transcription
  misc_feature: MA Experiment 20000112 PARAMETER Experiment Name: At_42deg_Heat_cDNA_P Parameter: Temperature (deg C) Value: 42 vs. 22
  misc_feature: MA Experiment 20000112 PARAMETER Experiment Name: At_42deg_Heat_cDNA_P Parameter: Timepoint (hr) Value: 2
  misc_feature: MA Experiment 20000112 PARAMETER Experiment Name: At_42deg_Heat_cDNA_P Parameter: Tissue Value: Aerial
  misc_feature: MA Experiment ID: 20000235 Result: Down-regulated in Transcription
  misc_feature: MA Experiment 20000235 PARAMETER Experiment Name: At_Siliques_P Parameter: Age (day) Value: 21
  misc_feature: MA Experiment 20000235 PARAMETER Experiment Name: At_Siliques_P Parameter: Organism Value: A. thaliana
  misc_feature: MA Experiment 20000235 PARAMETER Experiment Name: At_Siliques_P Parameter: Plant Line Value: WS
  misc_feature: MA Experiment 20000235 PARAMETER Experiment Name: At_Siliques_P Parameter: Tissue Value: 5-10mm Siliques vs. Whole Plant
aatcaaaacattttaaccaaacagcaaaatcaaaatcaaaatccaaagctaaaaaacagatactatcagataacatcaaaatatatagagacacaacaaatacaacatttatctatactagagtttattactatggcttttgatgaagatatgaaaatggcgtctttcttaagagaagaagaagaacaacactattctttatcaagactctccgtttgttccaactacgacggcgatgaagccgacggtgagtcttctgcttccgacgagaaacgtgttgtccacggcggaggagagaaatccatggaggagctaaatttttcagattctgataaagaatcaaccggttgtcaatctctcccggcgacacctccgagacggagacggcggagaggcggtggaggaggaggatatttagcggtgagttctccggtttccggcgataaagcttacgctagcgagaacgaagtacaaaagacgaataacaatcagaggagaaggaggagattgaaaccggagtgtccaccgtgggttgatagtatgcggaggagctacgtcggagatgaacagagtagtcacggtggttacggaggaggagtggtggttgttacgaggcctataggaggaggaaggccattgtgtatggatttagaagaagtcaaagcttgtaaagatttggggtttgagcttgaaccgggtcgggtttcgtattccgggtcaacggtggatactagtagtggcggcaattctcctatctcttctaaccaccgtatttcgagtcccggggatgatccaaaagacgtgaaagcgaggcttaaggcgtgggctcaagctgtggcttttgtgtccactactcatcatcaacctcctaattctttatgattcactttcttacaaaaaaaaattcacttcaaaaaaaaaataaaaaaaaattgcatgcattttcgagtttcatttttgaaaaattattttcgggtttttgatttgcttaattttttttttacagattttgttctgtttttgtgtgttgacggtgagattttggcaattgatatatggtcataagccaaaagtatagagttaaataagtttgatgattgacttctccagcattgtaatatttaacattttacattattgaaaaaattatacc

SEQ ID NO: 29744 - protein, 293 aa, Arabidopsis thaliana
  peptide (1)..(293): Ceres Seq. ID no. 13497627
  misc_feature (61)..(263): Homolog of NCBI NO: 15226471 NR Description: expressed protein [Arabidopsis thaliana]
  misc_feature (79)..(285): Homolog of NCBI NO: 34902536 NR Description: P0581F09.27 [Oryza sativa (japonica
  misc_feature (66)..(285): Homolog of NCBI NO: 15228678 NR Description: expressed protein [Arabidopsis thaliana]
  misc_feature (45)..(262): Homolog of NCBI NO: 25334719 NR Description: hypothetical protein AT4g01670 [imported] -
  misc_feature (45)..(293): Homolog of NCBI NO: 30678941 NR Description: expressed protein [Arabidopsis thaliana]
NQNILTKQQNQNQNPKLKNRYYQITSKYIETQQIQHLSILEFITMAFDEDMKMASFLREEEEQHYSLSRLSVCSNYDGDEADGESSASDEKRVVHGGGEKSMEELNFSDSDKESTGCQSLPATPPRRRRRRGGGGGGYLAVSSPVSGDKAYASENEVQKTNNNQRRRRRLKPECPPWVDSMRRSYVGDEQSSHGGYGGGVVVVTRPIGGGRPLCMDLEEVKACKDLGFELEPGRVSYSGSTVDTSSGGNSPISSNHRISSPGDDPKDVKARLKAWAQAVAFVSTTHHQPPNSL

SEQ ID NO: 29745 - protein, 249 aa, Arabidopsis thaliana
  peptide (1)..(249): Ceres Seq. ID no. 13497628
  misc_feature (17)..(219): Homolog of NCBI NO: 15226471 NR Description: expressed protein [Arabidopsis thaliana]
  misc_feature (35)..(241): Homolog of NCBI NO: 34902536 NR Description: P0581F09.27 [Oryza sativa (japonica
  misc_feature (22)..(241): Homolog of NCBI NO: 15228678 NR Description: expressed protein [Arabidopsis thaliana]
  misc_feature (1)..(218): Homolog of NCBI NO: 25334719 NR Description: hypothetical protein AT4g01670 [imported] -
  misc_feature (1)..(249): Homolog of NCBI NO: 30678941 NR Description: expressed protein [Arabidopsis thaliana]
MAFDEDMKMASFLREEEEQHYSLSRLSVCSNYDGDEADGESSASDEKRVVHGGGEKSMEELNFSDSDKESTGCQSLPATPPRRRRRRGGGGGGYLAVSSPVSGDKAYASENEVQKTNNNQRRRRRLKPECPPWVDSMRRSYVGDEQSSHGGYGGGVVVVTRPIGGGRPLCMDLEEVKACKDLGFELEPGRVSYSGSTVDTSSGGNSPISSNHRISSPGDDPKDVKARLKAWAQAVAFVSTTHHQPPNSL

SEQ ID NO: 29746 - protein, 243 aa, Arabidopsis thaliana
  peptide (1)..(243): Ceres Seq. ID no. 13497629
  misc_feature (11)..(213): Homolog of NCBI NO: 15226471 NR Description: expressed protein [Arabidopsis thaliana]
  misc_feature (29)..(235): Homolog of NCBI NO: 34902536 NR Description: P0581F09.27 [Oryza sativa (japonica
  misc_feature (16)..(235): Homolog of NCBI NO: 15228678 NR Description: expressed protein [Arabidopsis thaliana]
  misc_feature (1)..(212): Homolog of NCBI NO: 25334719 NR Description: hypothetical protein AT4g01670 [imported] -
  misc_feature (1)..(243): Homolog of NCBI NO: 30678941 NR Description: expressed protein [Arabidopsis thaliana]
MKMASFLREEEEQHYSLSRLSVCSNYDGDEADGESSASDEKRVVHGGGEKSMEELNFSDSDKESTGCQSLPATPPRRRRRRGGGGGGYLAVSSPVSGDKAYASENEVQKTNNNQRRRRRLKPECPPWVDSMRRSYVGDEQSSHGGYGGGVVVVTRPIGGGRPLCMDLEEVKACKDLGFELEPGRVSYSGSTVDTSSGGNSPISSNHRISSPGDDPKDVKARLKAWAQAVAFVSTTHHQPPNSL

SEQ ID NO: 29747 - DNA, 946 bp, Arabidopsis thaliana; identical to SEQ ID NO: 26202
  misc_feature (1)..(946): Ceres Seq. ID no. 13487250
  misc_feature: MA Experiment ID: 108434 Result: Up-regulated in Transcription
  misc_feature: MA Experiment 108434 PARAMETER Experiment Name: At_Root_Tips_cDNA_P Parameter: Tissue Value: Root Tips
  misc_feature: MA Experiment ID: 108461 Result: Up-regulated in Transcription
  misc_feature: MA Experiment 108461 PARAMETER Experiment Name: At_Germinating_Seeds_cDNA_P Parameter: Age (day) Value: 1 vs. 0
  misc_feature: MA Experiment 108461 PARAMETER Experiment Name: At_Germinating_Seeds_cDNA_P Parameter: Tissue Value: Germinating Seeds
  misc_feature: MA Experiment ID: 108488 Result: Up-regulated in Transcription
  misc_feature: MA Experiment ID: 20000069 Result: Up-regulated in Transcription
  misc_feature: MA Experiment 20000069 PARAMETER Experiment Name: At_100uM_ABA_Mutants_cDNA_P Parameter: Plant Line Value: CS23
  misc_feature: MA Experiment 20000069 PARAMETER Experiment Name: At_100uM_ABA_Mutants_cDNA_P Parameter: Timepoint (hr) Value: 6
  misc_feature: MA Experiment 20000069 PARAMETER Experiment Name: At_100uM_ABA_Mutants_cDNA_P Parameter: Tissue Value: Aerial
  misc_feature: MA Experiment 20000069 PARAMETER Experiment Name: At_100uM_ABA_Mutants_cDNA_P Parameter: Treatment Value: 100uM ABA vs. No Treatment
  misc_feature: MA Experiment ID: 20000072 Result: Up-regulated in Transcription
  misc_feature: MA Experiment 20000072 PARAMETER Experiment Name: At_100uM_ABA_Mutants_cDNA_P Parameter: Plant Line Value: CS8105
  misc_feature: MA Experiment 20000072 PARAMETER Experiment Name: At_100uM_ABA_Mutants_cDNA_P Parameter: Timepoint (hr) Value: 6
  misc_feature: MA Experiment 20000072 PARAMETER Experiment Name: At_100uM_ABA_Mutants_cDNA_P Parameter: Tissue Value: Aerial
  misc_feature: MA Experiment 20000072 PARAMETER Experiment Name: At_100uM_ABA_Mutants_cDNA_P Parameter: Treatment Value: 100uM ABA vs. No Treatment
  misc_feature: MA Experiment ID: 20000086 Result: Up-regulated in Transcription
  misc_feature: MA Experiment 20000086 PARAMETER Experiment Name: At_100uM_ABA_Mutants_cDNA_P Parameter: Plant Line Value: CS22
  misc_feature: MA Experiment 20000086 PARAMETER Experiment Name: At_100uM_ABA_Mutants_cDNA_P Parameter: Timepoint (hr) Value: 6
  misc_feature: MA Experiment 20000086 PARAMETER Experiment Name: At_100uM_ABA_Mutants_cDNA_P Parameter: Tissue Value: Aerial
  misc_feature: MA Experiment 20000086 PARAMETER Experiment Name: At_100uM_ABA_Mutants_cDNA_P Parameter: Treatment Value: 100uM ABA vs. No Treatment
  misc_feature: MA Experiment ID: 20000087 Result: Up-regulated in Transcription
  misc_feature: MA Experiment 20000087 PARAMETER Experiment Name: At_100uM_ABA_Mutants_cDNA_P Parameter: Plant Line Value: WS
  misc_feature: MA Experiment 20000087 PARAMETER Experiment Name: At_100uM_ABA_Mutants_cDNA_P Parameter: Timepoint (hr) Value: 6
  misc_feature: MA Experiment 20000087 PARAMETER Experiment Name: At_100uM_ABA_Mutants_cDNA_P Parameter: Tissue Value: Aerial
  misc_feature: MA Experiment 20000087 PARAMETER Experiment Name: At_100uM_ABA_Mutants_cDNA_P Parameter: Treatment Value: 100uM ABA vs. No Treatment
  misc_feature: MA Experiment ID: 20000089 Result: Up-regulated in Transcription
  misc_feature: MA Experiment ID: 20000090 Result: Up-regulated in Transcription
  misc_feature: MA Experiment ID: 20000117 Result: Up-regulated in Transcription
  misc_feature: MA Experiment 20000117 PARAMETER Experiment Name: At_100uM_ABA_Mutants_cDNA_P Parameter: Plant Line Value: Columbia
  misc_feature: MA Experiment 20000117 PARAMETER Experiment Name: At_100uM_ABA_Mutants_cDNA_P Parameter: Timepoint (hr) Value: 6
  misc_feature: MA Experiment 20000117 PARAMETER Experiment Name: At_100uM_ABA_Mutants_cDNA_P Parameter: Tissue Value: Aerial
  misc_feature: MA Experiment 20000117 PARAMETER Experiment Name: At_100uM_ABA_Mutants_cDNA_P Parameter: Treatment Value: 100uM ABA vs. No Treatment
  misc_feature: MA Experiment ID: 20000173 Result: Down-regulated in Transcription
  misc_feature: MA Experiment 20000173 PARAMETER Experiment Name: At_42deg_Heat_P Parameter: Age (day) Value: 14
  misc_feature: MA Experiment 20000173 PARAMETER Experiment Name: At_42deg_Heat_P Parameter: Organism Value: A. thaliana
  misc_feature: MA Experiment 20000173 PARAMETER Experiment Name: At_42deg_Heat_P Parameter: Plant Line Value: WS
  misc_feature: MA Experiment 20000173 PARAMETER Experiment Name: At_42deg_Heat_P Parameter: Temperature (deg C) Value: 42 vs. 22
  misc_feature: MA Experiment 20000173 PARAMETER Experiment Name: At_42deg_Heat_P Parameter: Timepoint (hr) Value: 6
  misc_feature: MA Experiment 20000173 PARAMETER Experiment Name: At_42deg_Heat_P Parameter: Tissue Value: Aerial
  misc_feature: MA Experiment ID: 20000439 Result: Up-regulated in Transcription
  misc_feature: MA Experiment 20000439 PARAMETER Experiment Name: At_Roots__P Parameter: Age (day) Value: 14 vs. 21
  misc_feature: MA Experiment 20000439 PARAMETER Experiment Name: At_Roots__P Parameter: Organism Value: A. thaliana
  misc_feature: MA Experiment 20000439 PARAMETER Experiment Name: At_Roots__P Parameter: Tissue Value: Roots vs. Whole Plant
  misc_feature: MA Experiment ID: 20000794 Result: Down-regulated in Transcription
  misc_feature: MA Experiment 20000794 PARAMETER Experiment Name: At_Petals_P Parameter: Age (day) Value: 23-25 days
  misc_feature: MA Experiment 20000794 PARAMETER Experiment Name: At_Petals_P Parameter: Plant Line Value: WS
  misc_feature: MA Experiment 20000794 PARAMETER Experiment Name: At_Petals_P Parameter: Tissue Value: Petals vs. Whole plant
  misc_feature: MA Experiment ID: 20001905 Result: Down-regulated in Transcription
  misc_feature: MA Experiment 20001905 PARAMETER Experiment Name: At_Drought_Reproduction_P Parameter: Age (day) Value: 40
  misc_feature: MA Experiment 20001905 PARAMETER Experiment Name: At_Drought_Reproduction_P Parameter: Organism Value: A. thaliana
  misc_feature: MA Experiment 20001905 PARAMETER Experiment Name: At_Drought_Reproduction_P Parameter: Plant Line Value: WS
  misc_feature: MA Experiment 20001905 PARAMETER Experiment Name: At_Drought_Reproduction_P Parameter: Timepoint (day) Value: 10
  misc_feature: MA Experiment 20001905 PARAMETER Experiment Name: At_Drought_Reproduction_P Parameter: Tissue Value: Rosettes
  misc_feature: MA Experiment 20001905 PARAMETER Experiment Name: At_Drought_Reproduction_P Parameter: Treatment Value: Drought vs. No Drought
  misc_feature: MA Experiment ID: 20001911 Result: Down-regulated in Transcription
  misc_feature: MA Experiment 20001911 PARAMETER Experiment Name: At_Drought_Reproduction_P Parameter: Age (day) Value: 40
  misc_feature: MA Experiment 20001911 PARAMETER Experiment Name: At_Drought_Reproduction_P Parameter: Organism Value: A. thaliana
  misc_feature: MA Experiment 20001911 PARAMETER Experiment Name: At_Drought_Reproduction_P Parameter: Plant Line Value: WS
  misc_feature: MA Experiment 20001911 PARAMETER Experiment Name: At_Drought_Reproduction_P Parameter: Timepoint (day) Value: 10
  misc_feature: MA Experiment 20001911 PARAMETER Experiment Name: At_Drought_Reproduction_P Parameter: Tissue Value: Flowers
  misc_feature: MA Experiment 20001911 PARAMETER Experiment Name: At_Drought_Reproduction_P Parameter: Treatment Value: Drought vs. No Drought

SEQ ID NO: 29748 - protein, 223 aa, Arabidopsis thaliana; identical to SEQ ID NO: 26203
  peptide (1)..(223): Ceres Seq. ID no. 13487251
  misc_feature (20)..(214): Pfam Name: Emopamil binding protein Pfam Description: Emopamil binding protein
  misc_feature (20)..(214): Pfam Name: Emopamil binding protein Pfam Description: Emopamil binding protein
  misc_feature (6)..(221): Homolog of NCBI NO: 5729810 NR Description: emopamil binding protein (sterol isomerase)
  misc_feature (6)..(195): Homolog of NCBI NO: 12848900 NR Description: unnamed protein product [Mus musculus]
  misc_feature (6)..(220): Homolog of NCBI NO: 18202586 NR Description: 3-beta-hydroxysteroid-delta(8),delta(7)-isomerase delta-isomerase) (Delta8-delta7 sterol isomerase) (D8-D7 sterol
  misc_feature (6)..(221): Homolog of NCBI NO: 6681255 NR Description: phenylalkylamine Ca2+ antagonist (emopamil)
  misc_feature (1)..(221): Homolog of NCBI NO: 16923992 NR Description: phenylalkylamine Ca2+ antagonist (emopamil)
  misc_feature (6)..(221): Homolog of NCBI NO: 5729810 NR Description: emopamil binding protein (sterol isomerase)
  misc_feature (6)..(220): Homolog of NCBI NO: 18202586 NR Description: 3-beta-hydroxysteroid-delta(8),delta(7)-isomerase delta-isomerase) (Delta8-delta7 sterol isomerase) (D8-D7 sterol
  misc_feature (1)..(221): Homolog of NCBI NO: 16923992 NR Description: phenylalkylamine Ca2+ antagonist (emopamil)
  misc_feature (1)..(223): Homolog of NCBI NO: 21554213 NR Description: C-8,7 sterol isomerase [Arabidopsis thaliana]
  misc_feature (1)..(223): Homolog of NCBI NO: 15223758 NR Description: C-8,7 sterol isomerase [Arabidopsis thaliana]
  misc_feature (1)..(223): Homolog of NCBI NO: 4098989 NR Description: phenylalkylamine binding protein homolog
  misc_feature (6)..(217): Homolog of NCBI NO: 34894044 NR Description: putative C-8,7 sterol isomerase
  misc_feature (6)..(221): Homolog of NCBI NO: 33417065 NR Description: Unknown (protein for MGC:68833) [Xenopus laevis]
  misc_feature (6)..(221): Homolog of NCBI NO: 6681255 NR Description: phenylalkylamine Ca2+ antagonist (emopamil)
  misc_feature (6)..(195): Homolog of NCBI NO: 12848900 NR Description: unnamed protein product [Mus musculus]
  misc_feature (6)..(221): Homolog of NCBI NO: 33417065 NR Description: Unknown (protein for MGC:68833) [Xenopus laevis]
  misc_feature (6)..(217): Homolog of NCBI NO: 34894044 NR Description: putative C-8,7 sterol isomerase
  misc_feature (1)..(223): Homolog of NCBI NO: 4098989 NR Description: phenylalkylamine binding protein homolog
  misc_feature (1)..(223): Homolog of NCBI NO: 15223758 NR Description: C-8,7 sterol isomerase [Arabidopsis thaliana]
  misc_feature (1)..(223): Homolog of NCBI NO: 21554213 NR Description: C-8,7 sterol isomerase [Arabidopsis thaliana]

SEQ ID NO: 29749 - protein, 201 aa, Arabidopsis thaliana; identical to SEQ ID NO: 26204
  peptide (1)..(201): Ceres Seq. ID no. 13487252
  misc_feature (1)..(192): Pfam Name: Emopamil binding protein Pfam Description: Emopamil binding protein
  misc_feature (1)..(192): Pfam Name: Emopamil binding protein Pfam Description: Emopamil binding protein
  misc_feature (1)..(199): Homolog of NCBI NO: 5729810 NR Description: emopamil binding protein (sterol isomerase)
  misc_feature (1)..(173): Homolog of NCBI NO: 12848900 NR Description: unnamed protein product [Mus musculus]
  misc_feature (1)..(198): Homolog of NCBI NO: 18202586 NR Description: 3-beta-hydroxysteroid-delta(8),delta(7)-isomerase delta-isomerase) (Delta8-delta7 sterol isomerase) (D8-D7 sterol
  misc_feature (1)..(199): Homolog of NCBI NO: 6681255 NR Description: phenylalkylamine Ca2+ antagonist (emopamil)
  misc_feature (1)..(199): Homolog of NCBI NO: 16923992 NR Description: phenylalkylamine Ca2+ antagonist (emopamil)
  misc_feature (1)..(199): Homolog of NCBI NO: 5729810 NR Description: emopamil binding protein (sterol isomerase)
  misc_feature (1)..(198): Homolog of NCBI NO: 18202586 NR Description: 3-beta-hydroxysteroid-delta(8),delta(7)-isomerase delta-isomerase) (Delta8-delta7 sterol isomerase) (D8-D7 sterol
  misc_feature (1)..(199): Homolog of NCBI NO: 16923992 NR Description: phenylalkylamine Ca2+ antagonist (emopamil)
  misc_feature (1)..(201): Homolog of NCBI NO: 21554213 NR Description: C-8,7 sterol isomerase [Arabidopsis thaliana]
  misc_feature (1)..(201): Homolog of NCBI NO: 15223758 NR Description: C-8,7 sterol isomerase [Arabidopsis thaliana]
  misc_feature (1)..(201): Homolog of NCBI NO: 4098989 NR Description: phenylalkylamine binding protein homolog
  misc_feature (1)..(195): Homolog of NCBI NO: 34894044 NR Description: putative C-8,7 sterol isomerase
  misc_feature (1)..(199): Homolog of NCBI NO: 33417065 NR Description: Unknown (protein for MGC:68833) [Xenopus laevis]
  misc_feature (1)..(199): Homolog of NCBI NO: 6681255 NR Description: phenylalkylamine Ca2+ antagonist (emopamil)
  misc_feature (1)..(173): Homolog of NCBI NO: 12848900 NR Description: unnamed protein product [Mus musculus]
  misc_feature (1)..(199): Homolog of NCBI NO: 33417065 NR Description: Unknown (protein for MGC:68833) [Xenopus laevis]
  misc_feature (1)..(195): Homolog of NCBI NO: 34894044 NR Description: putative C-8,7 sterol isomerase
  misc_feature (1)..(201): Homolog of NCBI NO: 4098989 NR Description: phenylalkylamine binding protein homolog
  misc_feature (1)..(201): Homolog of NCBI NO: 15223758 NR Description: C-8,7 sterol isomerase [Arabidopsis thaliana]
  misc_feature (1)..(201): Homolog of NCBI NO: 21554213 NR Description: C-8,7 sterol isomerase [Arabidopsis thaliana]

SEQ ID NO: 29750 - protein, 199 aa, Arabidopsis thaliana; identical to SEQ ID NO: 26205
  peptide (1)..(199): Ceres Seq. ID no. 13487253
  misc_feature (1)..(190): Pfam Name: Emopamil binding protein Pfam Description: Emopamil binding protein
  misc_feature (1)..(190): Pfam Name: Emopamil binding protein Pfam Description: Emopamil binding protein
  misc_feature (1)..(197): Homolog of NCBI NO: 5729810 NR Description: emopamil binding protein (sterol isomerase)
  misc_feature (1)..(171): Homolog of NCBI NO: 12848900 NR Description: unnamed protein product [Mus musculus]
  misc_feature (1)..(196): Homolog of NCBI NO: 18202586 NR Description: 3-beta-hydroxysteroid-delta(8),delta(7)-isomerase delta-isomerase) (Delta8-delta7 sterol isomerase) (D8-D7 sterol
  misc_feature (1)..(197): Homolog of NCBI NO: 6681255 NR Description: phenylalkylamine Ca2+ antagonist (emopamil)
  misc_feature (1)..(197): Homolog of NCBI NO: 16923992 NR Description: phenylalkylamine Ca2+ antagonist (emopamil)
  misc_feature (1)..(197): Homolog of NCBI NO: 5729810 NR Description: emopamil binding protein (sterol isomerase)
  misc_feature (1)..(196): Homolog of NCBI NO: 18202586 NR Description: 3-beta-hydroxysteroid-delta(8),delta(7)-isomerase delta-isomerase) (Delta8-delta7 sterol isomerase) (D8-D7 sterol
  misc_feature (1)..(197): Homolog of NCBI NO: 16923992 NR Description: phenylalkylamine Ca2+ antagonist (emopamil)
  misc_feature (1)..(199): Homolog of NCBI NO: 21554213 NR Description: C-8,7 sterol isomerase [Arabidopsis thaliana]
  misc_feature (1)..(199): Homolog of NCBI NO: 15223758 NR Description: C-8,7 sterol isomerase [Arabidopsis thaliana]
  misc_feature (1)..(199): Homolog of NCBI NO: 4098989 NR Description: phenylalkylamine binding protein homolog
  misc_feature (1)..(193): Homolog of NCBI NO: 34894044 NR Description: putative C-8,7 sterol isomerase
  misc_feature (1)..(197): Homolog of NCBI NO: 33417065 NR Description: Unknown (protein for MGC:68833) [Xenopus laevis]
  misc_feature (1)..(197): Homolog of NCBI NO: 6681255 NR Description: phenylalkylamine Ca2+ antagonist (emopamil)
  misc_feature (1)..(171): Homolog of NCBI NO: 12848900 NR Description: unnamed protein product [Mus musculus]
  misc_feature (1)..(197): Homolog of NCBI NO: 33417065 NR Description: Unknown (protein for MGC:68833) [Xenopus laevis]
  misc_feature (1)..(193): Homolog of NCBI NO: 34894044 NR Description: putative C-8,7 sterol isomerase
  misc_feature (1)..(199): Homolog of NCBI NO: 4098989 NR Description: phenylalkylamine binding protein homolog
  misc_feature (1)..(199): Homolog of NCBI NO: 15223758 NR Description: C-8,7 sterol isomerase [Arabidopsis thaliana]
  misc_feature (1)..(199): Homolog of NCBI NO: 21554213 NR Description: C-8,7 sterol isomerase [Arabidopsis thaliana]

SEQ ID NO: 29751 - DNA, 1151 bp, Arabidopsis thaliana
  misc_feature (1)..(1151): Ceres Seq. ID no. 13490670
  misc_feature: MA Experiment ID: 108435 Result: Up-regulated in Transcription
  misc_feature: MA Experiment 108435 PARAMETER Experiment Name: At_stm_Mutants_cDNA_P Parameter: Plant Line Value: wt Landsburg vs stm
  misc_feature: MA Experiment 108435 PARAMETER Experiment Name: At_stm_Mutants_cDNA_P Parameter: Tissue Value: Shoot Apical Meristem Region
  misc_feature: MA Experiment ID: 108462 Result: Up-regulated in Transcription
  misc_feature: MA Experiment 108462 PARAMETER Experiment Name: At_Germinating_Seeds_cDNA_P Parameter: Age (day) Value: 2 vs. 0
  misc_feature: MA Experiment 108462 PARAMETER Experiment Name: At_Germinating_Seeds_cDNA_P Parameter: Tissue Value: Germinating Seeds
  misc_feature: MA Experiment ID: 108463 Result: Up-regulated in Transcription
  misc_feature: MA Experiment 108463 PARAMETER Experiment Name: At_Germinating_Seeds_cDNA_P Parameter: Age (day) Value: 3 vs. 0
  misc_feature: MA Experiment 108463 PARAMETER Experiment Name: At_Germinating_Seeds_cDNA_P Parameter: Tissue Value: Germinating Seeds
  misc_feature: MA Experiment ID: 108464 Result: Up-regulated in Transcription
  misc_feature: MA Experiment 108464 PARAMETER Experiment Name: At_Germinating_Seeds_cDNA_P Parameter: Age (day) Value: 4 vs. 0
  misc_feature: MA Experiment 108464 PARAMETER Experiment Name: At_Germinating_Seeds_cDNA_P Parameter: Tissue Value: Germinating Seeds
  misc_feature: MA Experiment ID: 108474 Result: Down-regulated in Transcription
  misc_feature: MA Experiment 108474 PARAMETER Experiment Name: At_Drought_Flowers_cDNA_P Parameter: Timepoint (hr) Value: null
  misc_feature: MA Experiment 108474 PARAMETER Experiment Name: At_Drought_Flowers_cDNA_P Parameter: Treatment Value: Drought vs. No Drought
  misc_feature: MA Experiment ID: 108561 Result: Down-regulated in Transcription
  misc_feature: MA Experiment 108561 PARAMETER Experiment Name: At_100uM_ABA_cDNA_P Parameter: Timepoint (hr) Value: 6
  misc_feature: MA Experiment 108561 PARAMETER Experiment Name: At_100uM_ABA_cDNA_P Parameter: Tissue Value: Aerial
  misc_feature: MA Experiment 108561 PARAMETER Experiment Name: At_100uM_ABA_cDNA_P Parameter: Treatment Value: 100uM ABA vs. No Treatment
  misc_feature: MA Experiment ID: 108576 Result: Down-regulated in Transcription
  misc_feature: MA Experiment 108576 PARAMETER Experiment Name: At_42deg_Heat_cDNA_P Parameter: Temperature (deg C) Value: 42 vs. 22
  misc_feature: MA Experiment 108576 PARAMETER Experiment Name: At_42deg_Heat_cDNA_P Parameter: Timepoint (hr) Value: 1
  misc_feature: MA Experiment 108576 PARAMETER Experiment Name: At_42deg_Heat_cDNA_P Parameter: Tissue Value: Aerial
  misc_feature: MA Experiment ID: 108577 Result: Down-regulated in Transcription
  misc_feature: MA Experiment 108577 PARAMETER Experiment Name: At_42deg_Heat_cDNA_P Parameter: Temperature (deg C) Value: 42 vs. 22
  misc_feature: MA Experiment 108577 PARAMETER Experiment Name: At_42deg_Heat_cDNA_P Parameter: Timepoint (hr) Value: 6
  misc_feature: MA Experiment 108577 PARAMETER Experiment Name: At_42deg_Heat_cDNA_P Parameter: Tissue Value: Aerial
  misc_feature: MA Experiment ID: 108595 Result: Down-regulated in Transcription
  misc_feature: MA Experiment 108595 PARAMETER Experiment Name: At_Ler-pi_Ovule_cDNA_P Parameter: Plant Line Value: null
  misc_feature: MA Experiment ID: 108605 Result: Down-regulated in Transcription
  misc_feature: MA Experiment 108605 PARAMETER Experiment Name: At_100uM_ABA_cDNA_P Parameter: Timepoint (hr) Value: 6
  misc_feature: MA Experiment 108605 PARAMETER Experiment Name: At_100uM_ABA_cDNA_P Parameter: Tissue Value: Aerial
  misc_feature: MA Experiment 108605 PARAMETER Experiment Name: At_100uM_ABA_cDNA_P Parameter: Treatment Value: 100uM ABA vs. No Treatment
  misc_feature: MA Experiment ID: 108607 Result: Down-regulated in Transcription
  misc_feature: MA Experiment 108607 PARAMETER Experiment Name: At_100uM_ABA_cDNA_P Parameter: Timepoint (hr) Value: 4
  misc_feature: MA Experiment 108607 PARAMETER Experiment Name: At_100uM_ABA_cDNA_P Parameter: Tissue Value: Aerial
  misc_feature: MA Experiment 108607 PARAMETER Experiment Name: At_100uM_ABA_cDNA_P Parameter: Treatment Value: 100uM ABA vs. No Treatment
  misc_feature: MA Experiment ID: 108668 Result: Down-regulated in Transcription
  misc_feature: MA Experiment 108668 PARAMETER Experiment Name: At_2mM_SA_cDNA_P Parameter: Plant Line Value: WS
  misc_feature: MA Experiment 108668 PARAMETER Experiment Name: At_2mM_SA_cDNA_P Parameter: Timepoint (hr) Value: 6
  misc_feature: MA Experiment 108668 PARAMETER Experiment Name: At_2mM_SA_cDNA_P Parameter: Treatment Value: 2mM SA vs. No Treatment
  misc_feature: MA Experiment ID: 20000070 Result: Down-regulated in Transcription
  misc_feature: MA Experiment 20000070 PARAMETER Experiment Name: At_100uM_ABA_Mutants_cDNA_P Parameter: Plant Line Value: CS24
  misc_feature: MA Experiment 20000070 PARAMETER Experiment Name: At_100uM_ABA_Mutants_cDNA_P Parameter: Timepoint (hr) Value: 6
  misc_feature: MA Experiment 20000070 PARAMETER Experiment Name: At_100uM_ABA_Mutants_cDNA_P Parameter: Tissue Value: Aerial
  misc_feature: MA Experiment 20000070 PARAMETER Experiment Name: At_100uM_ABA_Mutants_cDNA_P Parameter: Treatment Value: 100uM ABA vs. No Treatment
  misc_feature: MA Experiment ID: 20000071 Result: Down-regulated in Transcription
  misc_feature: MA Experiment 20000071 PARAMETER Experiment Name: At_100uM_ABA_Mutants_cDNA_P Parameter: Plant Line Value: CS8104
  misc_feature: MA Experiment 20000071 PARAMETER Experiment Name: At_100uM_ABA_Mutants_cDNA_P Parameter: Timepoint (hr) Value: 6
  misc_feature: MA Experiment 20000071 PARAMETER Experiment Name: At_100uM_ABA_Mutants_cDNA_P Parameter: Tissue Value: Aerial
  misc_feature: MA Experiment 20000071 PARAMETER Experiment Name: At_100uM_ABA_Mutants_cDNA_P Parameter: Treatment Value: 100uM ABA vs. No Treatment
  misc_feature: MA Experiment ID: 20000087 Result: Down-regulated in Transcription
  misc_feature: MA Experiment 20000087 PARAMETER Experiment Name: At_100uM_ABA_Mutants_cDNA_P Parameter: Plant Line Value: WS
  misc_feature: MA Experiment 20000087 PARAMETER Experiment Name: At_100uM_ABA_Mutants_cDNA_P Parameter: Timepoint (hr) Value: 6
  misc_feature: MA Experiment 20000087 PARAMETER Experiment Name: At_100uM_ABA_Mutants_cDNA_P Parameter: Tissue Value: Aerial
  misc_feature: MA Experiment 20000087 PARAMETER Experiment Name: At_100uM_ABA_Mutants_cDNA_P Parameter: Treatment Value: 100uM ABA vs. No Treatment
  misc_feature: MA Experiment ID: 20000112 Result: Down-regulated in Transcription
  misc_feature: MA Experiment 20000112 PARAMETER Experiment Name: At_42deg_Heat_cDNA_P Parameter: Temperature (deg C) Value: 42 vs. 22
  misc_feature: MA Experiment 20000112 PARAMETER Experiment Name: At_42deg_Heat_cDNA_P Parameter: Timepoint (hr) Value: 2
  misc_feature: MA Experiment 20000112 PARAMETER Experiment Name: At_42deg_Heat_cDNA_P Parameter: Tissue Value: Aerial
  misc_feature: MA Experiment ID: 20000113 Result: Down-regulated in Transcription
  misc_feature: MA Experiment 20000113 PARAMETER Experiment Name: At_42deg_Heat_cDNA_P Parameter: Temperature (deg C) Value: 42 vs. 22
  misc_feature: MA Experiment 20000113 PARAMETER Experiment Name: At_42deg_Heat_cDNA_P Parameter: Timepoint (hr) Value: 8
  misc_feature: MA Experiment 20000113 PARAMETER Experiment Name: At_42deg_Heat_cDNA_P Parameter: Tissue Value: Aerial
  misc_feature: MA Experiment ID: 20000117 Result: Down-regulated in Transcription
  misc_feature: MA Experiment 20000117 PARAMETER Experiment Name: At_100uM_ABA_Mutants_cDNA_P Parameter: Plant Line Value: Columbia
  misc_feature: MA Experiment 20000117 PARAMETER Experiment Name: At_100uM_ABA_Mutants_cDNA_P Parameter: Timepoint (hr) Value: 6
  misc_feature: MA Experiment 20000117 PARAMETER Experiment Name: At_100uM_ABA_Mutants_cDNA_P Parameter: Tissue Value: Aerial
  misc_feature: MA Experiment 20000117 PARAMETER Experiment Name: At_100uM_ABA_Mutants_cDNA_P Parameter: Treatment Value: 100uM ABA vs. No Treatment
  misc_feature: MA Experiment ID: 20000169 Result: Down-regulated in Transcription
  misc_feature: MA Experiment 20000169 PARAMETER Experiment Name: At_100uM_ABA_P Parameter: Age (day) Value: 14
  misc_feature: MA Experiment 20000169 PARAMETER Experiment Name: At_100uM_ABA_P Parameter: Organism Value: A. thaliana
  misc_feature: MA Experiment 20000169 PARAMETER Experiment Name: At_100uM_ABA_P Parameter: Plant Line Value: WS
  misc_feature: MA Experiment 20000169 PARAMETER Experiment Name: At_100uM_ABA_P Parameter: Timepoint (hr) Value: 6
  misc_feature: MA Experiment 20000169 PARAMETER Experiment Name: At_100uM_ABA_P Parameter: Tissue Value: Aerial
  misc_feature: MA Experiment 20000169 PARAMETER Experiment Name: At_100uM_ABA_P Parameter: Treatment Value: 100uM ABA vs. No Treatment
  misc_feature: MA Experiment ID: 20000173 Result: Down-regulated in Transcription
  misc_feature: MA Experiment 20000173 PARAMETER Experiment Name: At_42deg_Heat_P Parameter: Age (day) Value: 14
  misc_feature: MA Experiment 20000173 PARAMETER Experiment Name: At_42deg_Heat_P Parameter: Organism Value: A. thaliana
  misc_feature: MA Experiment 20000173 PARAMETER Experiment Name: At_42deg_Heat_P Parameter: Plant Line Value: WS
  misc_feature: MA Experiment 20000173 PARAMETER Experiment Name: At_42deg_Heat_P Parameter: Temperature (deg C) Value: 42 vs. 22
  misc_feature: MA Experiment 20000173 PARAMETER Experiment Name: At_42deg_Heat_P Parameter: Timepoint (hr) Value: 6
  misc_feature: MA Experiment 20000173 PARAMETER Experiment Name: At_42deg_Heat_P Parameter: Tissue Value: Aerial
  misc_feature: MA Experiment ID: 20000180 Result: Up-regulated in Transcription
  misc_feature: MA Experiment 20000180 PARAMETER Experiment Name: At_Germinating_Seeds_P Parameter: Age (hr) Value: 24 vs. 0
  misc_feature: MA Experiment 20000180 PARAMETER Experiment Name: At_Germinating_Seeds_P Parameter: Tissue Value: Germinating Seeds
  misc_feature: MA Experiment ID: 20000182 Result: Down-regulated in Transcription
  misc_feature: MA Experiment 20000182 PARAMETER Experiment Name: At_2mM_SA_P Parameter: Age (day) Value: 14
  misc_feature: MA Experiment 20000182 PARAMETER Experiment Name: At_2mM_SA_P Parameter: Organism Value: A. thaliana
  misc_feature: MA Experiment 20000182 PARAMETER Experiment Name: At_2mM_SA_P Parameter: Plant Line Value: WS
  misc_feature: MA Experiment 20000182 PARAMETER Experiment Name: At_2mM_SA_P Parameter: Timepoint (hr) Value: 6
  misc_feature: MA Experiment 20000182 PARAMETER Experiment Name: At_2mM_SA_P Parameter: Tissue Value: Aerial
  misc_feature: MA Experiment 20000182 PARAMETER Experiment Name: At_2mM_SA_P Parameter: Treatment Value: 2mM SA vs. No Treatment
  misc_feature: MA Experiment ID: 20000185 Result: Down-regulated in Transcription
  misc_feature: MA Experiment 20000185 PARAMETER Experiment Name: At_Roots__P Parameter: Age (day) Value: 7 vs. 21
  misc_feature: MA Experiment 20000185 PARAMETER Experiment Name: At_Roots__P Parameter: Organism Value: A. thaliana
  misc_feature: MA Experiment 20000185 PARAMETER Experiment Name: At_Roots__P Parameter: Tissue Value: Roots vs. Whole Plant
  misc_feature: MA Experiment ID: 20000224 Result: Down-regulated in Transcription
  misc_feature: MA Experiment ID: 20000227 Result: Up-regulated in Transcription
  misc_feature: MA Experiment 20000227 PARAMETER Experiment Name: At_Root-Tips-vs-Tops_P Parameter: Tissue Value: Root Tips vs. Root Tops
  misc_feature: MA Experiment ID: 20000234 Result: Down-regulated in Transcription
  misc_feature: MA Experiment 20000234 PARAMETER Experiment Name: At_Siliques_P Parameter: Age (day) Value: 21
  misc_feature: MA Experiment 20000234 PARAMETER Experiment Name: At_Siliques_P Parameter: Organism Value: A. thaliana
  misc_feature: MA Experiment 20000234 PARAMETER Experiment Name: At_Siliques_P Parameter: Plant Line Value: WS
  misc_feature: MA Experiment 20000234 PARAMETER Experiment Name: At_Siliques_P Parameter: Tissue Value: Less Than 5mm Siliques vs. Whole Plant
  misc_feature: MA Experiment ID: 20000265 Result: Down-regulated in Transcription
  misc_feature: MA Experiment 20000265 PARAMETER Experiment Name: At_Open_Flower_P Parameter: Age (day) Value: 21
  misc_feature: MA Experiment 20000265 PARAMETER Experiment Name: At_Open_Flower_P Parameter: Plant Line Value: WS
  misc_feature: MA Experiment 20000265 PARAMETER Experiment Name: At_Open_Flower_P Parameter: Tissue Value: Closed Flower vs. Whole Plant
  misc_feature: MA Experiment ID: 20000268 Result: Down-regulated in Transcription
  misc_feature: MA Experiment 20000268 PARAMETER Experiment Name: At_100mM_NaCl__P Parameter: Age (day) Value: 14
  misc_feature: MA Experiment 20000268 PARAMETER Experiment Name: At_100mM_NaCl__P Parameter: Organism Value: A. thaliana
  misc_feature: MA Experiment 20000268 PARAMETER Experiment Name: At_100mM_NaCl__P Parameter: Plant Line Value: WS
  misc_feature: MA Experiment 20000268 PARAMETER Experiment Name: At_100mM_NaCl__P Parameter: Timepoint (hr) Value: 6
  misc_feature: MA Experiment 20000268 PARAMETER Experiment Name: At_100mM_NaCl__P Parameter: Tissue Value: Whole Plant
  misc_feature: MA Experiment 20000268 PARAMETER Experiment Name: At_100mM_NaCl__P Parameter: Treatment Value: 100mM NaCl vs. No Treatment
  misc_feature: MA Experiment ID: 20000437 Result: Down-regulated in Transcription
  misc_feature: MA Experiment 20000437 PARAMETER Experiment Name: At_Drought_P Parameter: Age (day) Value: 8
  misc_feature: MA Experiment 20000437 PARAMETER Experiment Name: At_Drought_P Parameter: Organism Value: A. thaliana
  misc_feature: MA Experiment 20000437 PARAMETER Experiment Name: At_Drought_P Parameter: Plant Line Value: WS
  misc_feature: MA Experiment 20000437 PARAMETER Experiment Name: At_Drought_P Parameter: Timepoint (hr) Value: 24
  misc_feature: MA Experiment 20000437 PARAMETER Experiment Name: At_Drought_P Parameter: Tissue Value: Whole Plant
  misc_feature: MA Experiment 20000437 PARAMETER Experiment Name: At_Drought_P Parameter: Treatment Value: Drought vs. No Drought
  misc_feature: MA Experiment ID: 20000439 Result: Down-regulated in Transcription
  misc_feature: MA Experiment 20000439 PARAMETER Experiment Name: At_Roots__P Parameter: Age (day) Value: 14 vs. 21
  misc_feature: MA Experiment 20000439 PARAMETER Experiment Name: At_Roots__P Parameter: Organism Value: A. thaliana
  misc_feature: MA Experiment 20000439 PARAMETER Experiment Name: At_Roots__P Parameter: Tissue Value: Roots vs. Whole Plant
  misc_feature: MA Experiment ID: 20000794 Result: Up-regulated in Transcription
  misc_feature: MA Experiment 20000794 PARAMETER Experiment Name: At_Petals_P Parameter: Age (day) Value: 23-25 days
  misc_feature: MA Experiment 20000794 PARAMETER Experiment Name: At_Petals_P Parameter: Plant Line Value: WS
  misc_feature: MA Experiment 20000794 PARAMETER Experiment Name: At_Petals_P Parameter: Tissue Value: Petals vs. Whole plant
  misc_feature: MA Experiment ID: 20001248 Result: Up-regulated in Transcription
  misc_feature: MA Experiment 20001248 PARAMETER Experiment Name: At_Far-red-induction_P Parameter: Age (day) Value: 7
  misc_feature: MA Experiment 20001248 PARAMETER Experiment Name: At_Far-red-induction_P Parameter: Light Value: Far-red vs. White
  misc_feature: MA Experiment 20001248 PARAMETER Experiment Name: At_Far-red-induction_P Parameter: Organism Value: A. thaliana
  misc_feature: MA Experiment 20001248 PARAMETER Experiment Name: At_Far-red-induction_P Parameter: Plant Line Value: Columbia
  misc_feature: MA Experiment 20001248 PARAMETER Experiment Name: At_Far-red-induction_P Parameter: Timepoint (hr) Value: 4
  misc_feature: MA Experiment 20001248 PARAMETER Experiment Name: At_Far-red-induction_P Parameter: Tissue Value: Whole Plant
  misc_feature: MA Experiment ID: 20001450 Result: Up-regulated in Transcription
  misc_feature: MA Experiment 20001450 PARAMETER Experiment Name: At_Far-red-induction_P Parameter: Age (day) Value: 7
  misc_feature: MA Experiment 20001450 PARAMETER Experiment Name: At_Far-red-induction_P Parameter: Light Value: Far-red vs. White
  misc_feature: MA Experiment 20001450 PARAMETER Experiment Name: At_Far-red-induction_P Parameter: Organism Value: A. thaliana
  misc_feature: MA Experiment 20001450 PARAMETER Experiment Name: At_Far-red-induction_P Parameter: Plant Line Value: Columbia
  misc_feature: MA Experiment 20001450 PARAMETER Experiment Name: At_Far-red-induction_P Parameter: Timepoint (hr) Value: 8
  misc_feature: MA Experiment 20001450 PARAMETER Experiment Name: At_Far-red-induction_P Parameter: Tissue Value: Whole Plant
  misc_feature: MA Experiment ID: 20001451 Result: Up-regulated in Transcription
  misc_feature: MA Experiment 20001451 PARAMETER Experiment Name: At_Far-red-induction_P Parameter: Age (day) Value: 7
  misc_feature: MA Experiment 20001451 PARAMETER Experiment Name: At_Far-red-induction_P Parameter: Light Value: Far-red vs. White
  misc_feature: MA Experiment 20001451 PARAMETER Experiment Name: At_Far-red-induction_P Parameter: Organism Value: A. thaliana
  misc_feature: MA Experiment 20001451 PARAMETER Experiment Name: At_Far-red-induction_P Parameter: Plant Line Value: Columbia
  misc_feature: MA Experiment 20001451 PARAMETER Experiment Name: At_Far-red-induction_P Parameter: Timepoint (hr) Value: 24
  misc_feature: MA Experiment 20001451 PARAMETER Experiment Name: At_Far-red-induction_P Parameter: Tissue Value: Whole Plant
  misc_feature: MA Experiment ID: 20001457 Result: Up-regulated in Transcription
  misc_feature: MA Experiment 20001457 PARAMETER Experiment Name: At_50mM_NH4NO3_L-to-H_P Parameter: Age (day) Value: Undefined
  misc_feature: MA Experiment 20001457 PARAMETER Experiment Name: At_50mM_NH4NO3_L-to-H_P Parameter: Organism Value: Undefined
  misc_feature: MA Experiment 20001457 PARAMETER Experiment Name: At_50mM_NH4NO3_L-to-H_P Parameter: Plant Line Value: Undefined
  misc_feature: MA Experiment 20001457 PARAMETER Experiment Name: At_50mM_NH4NO3_L-to-H_P Parameter: Timepoint (hr) Value: 0.5
  misc_feature: MA Experiment 20001457 PARAMETER Experiment Name: At_50mM_NH4NO3_L-to-H_P Parameter: Tissue Value: Siliques
  misc_feature: MA Experiment 20001457 PARAMETER Experiment Name: At_50mM_NH4NO3_L-to-H_P Parameter: Treatment Value: 50mM NH4NO3 vs. 100mM Manitol
  misc_feature: MA Experiment ID: 20001554 Result: Down-regulated in Transcription
  misc_feature: MA Experiment 20001554 PARAMETER Experiment Name: At_Drought_Soil_Dry_P Parameter: Age (day) Value: 21
  misc_feature: MA Experiment 20001554 PARAMETER Experiment Name: At_Drought_Soil_Dry_P Parameter: Organism Value: A. thaliana
  misc_feature: MA Experiment 20001554 PARAMETER Experiment Name: At_Drought_Soil_Dry_P Parameter: Plant Line Value: WS
  misc_feature: MA Experiment 20001554 PARAMETER Experiment Name: At_Drought_Soil_Dry_P Parameter: Post Timepoint (hr) Value: None
  misc_feature: MA Experiment 20001554 PARAMETER Experiment Name: At_Drought_Soil_Dry_P Parameter: Post-Treatment Value: None
  misc_feature: MA Experiment 20001554 PARAMETER Experiment Name: At_Drought_Soil_Dry_P Parameter: Timepoint (day) Value: 7
  misc_feature: MA Experiment 20001554 PARAMETER Experiment Name: At_Drought_Soil_Dry_P Parameter: Treatment Value: Drought vs. No Drought
  misc_feature: MA Experiment ID: 20001556 Result: Down-regulated in Transcription
  misc_feature: MA Experiment 20001556 PARAMETER Experiment Name: At_Drought_Soil_Dry_P Parameter: Age (day) Value: 26
  misc_feature: MA Experiment 20001556 PARAMETER Experiment Name: At_Drought_Soil_Dry_P Parameter: Organism Value: A. thaliana
  misc_feature: MA Experiment 20001556 PARAMETER Experiment Name: At_Drought_Soil_Dry_P Parameter: Plant Line Value: WS
  misc_feature: MA Experiment 20001556 PARAMETER Experiment Name: At_Drought_Soil_Dry_P Parameter: Post Timepoint (hr) Value: None
  misc_feature: MA Experiment 20001556 PARAMETER Experiment Name: At_Drought_Soil_Dry_P Parameter: Post-Treatment Value: None
  misc_feature: MA Experiment 20001556 PARAMETER Experiment Name: At_Drought_Soil_Dry_P Parameter: Timepoint (day) Value: 12
  misc_feature: MA Experiment 20001556 PARAMETER Experiment Name: At_Drought_Soil_Dry_P Parameter: Treatment Value: Drought vs. No Drought
  misc_feature: MA Experiment ID: 20001558 Result: Up-regulated in Transcription
  misc_feature: MA Experiment 20001558 PARAMETER Experiment Name: At_Drought_Soil_Dry_P Parameter: Age (day) Value: 27
  misc_feature: MA Experiment 20001558 PARAMETER Experiment Name: At_Drought_Soil_Dry_P Parameter: Organism Value: A. thaliana
  misc_feature: MA Experiment 20001558 PARAMETER Experiment Name: At_Drought_Soil_Dry_P Parameter: Plant Line Value: WS
  misc_feature: MA Experiment 20001558 PARAMETER Experiment Name: At_Drought_Soil_Dry_P Parameter: Post Timepoint (hr) Value: 6
  misc_feature: MA Experiment 20001558 PARAMETER Experiment Name: At_Drought_Soil_Dry_P Parameter: Post-Treatment Value: Re-Water vs. No Drought
  misc_feature: MA Experiment 20001558 PARAMETER Experiment Name: At_Drought_Soil_Dry_P Parameter: Timepoint (day) Value: 13
  misc_feature: MA Experiment 20001558 PARAMETER Experiment Name: At_Drought_Soil_Dry_P Parameter: Treatment Value: Drought vs. No Drought
  misc_feature: MA Experiment ID: 20001560 Result: Up-regulated in Transcription
  misc_feature: MA Experiment 20001560 PARAMETER Experiment Name: At_Drought_Soil_Dry_P Parameter: Age (day) Value: 28
  misc_feature: MA Experiment 20001560 PARAMETER Experiment Name: At_Drought_Soil_Dry_P Parameter: Organism Value: A. thaliana
  misc_feature: MA Experiment 20001560 PARAMETER Experiment Name: At_Drought_Soil_Dry_P Parameter: Plant Line Value: WS
  misc_feature: MA Experiment 20001560 PARAMETER Experiment Name: At_Drought_Soil_Dry_P Parameter: Post Timepoint (hr) Value: None
  misc_feature: MA Experiment 20001560 PARAMETER Experiment Name: At_Drought_Soil_Dry_P Parameter: Post-Treatment Value: None
  misc_feature: MA Experiment 20001560 PARAMETER Experiment Name: At_Drought_Soil_Dry_P Parameter: Timepoint (day) Value: 14
  misc_feature: MA Experiment 20001560 PARAMETER Experiment Name: At_Drought_Soil_Dry_P Parameter: Treatment Value: Drought vs. No Drought
  misc_feature: MA Experiment ID: 20001761 Result: Up-regulated in Transcription
  misc_feature: MA Experiment 20001761 PARAMETER Experiment Name: At_50mM_NH4NO3_L-to-H_P Parameter: Timepoint (hr) Value: 4
  misc_feature: MA Experiment 20001761 PARAMETER Experiment Name: At_50mM_NH4NO3_L-to-H_P Parameter: Tissue Value: Siliques
  misc_feature: MA Experiment 20001761 PARAMETER Experiment Name: At_50mM_NH4NO3_L-to-H_P Parameter: Treatment Value: 50mM NH4NO3 vs 100mM Mannitol
  misc_feature: MA Experiment ID: 20001904 Result: Down-regulated in Transcription
  misc_feature: MA Experiment 20001904 PARAMETER Experiment Name: At_Drought_Reproduction_P Parameter: Age (day) Value: 37
  misc_feature: MA Experiment 20001904 PARAMETER Experiment Name: At_Drought_Reproduction_P Parameter: Organism Value: A. thaliana
  misc_feature: MA Experiment 20001904 PARAMETER Experiment Name: At_Drought_Reproduction_P Parameter: Plant Line Value: WS
  misc_feature: MA Experiment 20001904 PARAMETER Experiment Name: At_Drought_Reproduction_P Parameter: Timepoint (day) Value: 7
  misc_feature: MA Experiment 20001904 PARAMETER Experiment Name: At_Drought_Reproduction_P Parameter: Tissue Value: Rosettes
  misc_feature: MA Experiment 20001904 PARAMETER Experiment Name: At_Drought_Reproduction_P Parameter: Treatment Value: Drought vs. No Drought
  misc_feature: MA Experiment ID: 20001905 Result: Down-regulated in Transcription
  misc_feature: MA Experiment 20001905 PARAMETER Experiment Name: At_Drought_Reproduction_P Parameter: Age (day) Value: 40
  misc_feature: MA Experiment 20001905 PARAMETER Experiment Name: At_Drought_Reproduction_P Parameter: Organism Value: A. thaliana
  misc_feature: MA Experiment 20001905 PARAMETER Experiment Name: At_Drought_Reproduction_P Parameter: Plant Line Value: WS
  misc_feature: MA Experiment 20001905 PARAMETER Experiment Name: At_Drought_Reproduction_P Parameter: Timepoint (day) Value: 10
  misc_feature: MA Experiment 20001905 PARAMETER Experiment Name: At_Drought_Reproduction_P Parameter: Tissue Value: Rosettes
  misc_feature: MA Experiment 20001905 PARAMETER Experiment Name: At_Drought_Reproduction_P Parameter: Treatment Value: Drought vs. No Drought
  misc_feature: MA Experiment ID: 20001906 Result: Down-regulated in Transcription
  misc_feature: MA Experiment 20001906 PARAMETER Experiment Name: At_Drought_Reproduction_P Parameter: Age (day) Value: 35
  misc_feature: MA Experiment 20001906 PARAMETER Experiment Name: At_Drought_Reproduction_P Parameter: Organism Value: A. thaliana
  misc_feature: MA Experiment 20001906 PARAMETER Experiment Name: At_Drought_Reproduction_P Parameter: Plant Line Value: WS
  misc_feature: MA Experiment 20001906 PARAMETER Experiment Name: At_Drought_Reproduction_P Parameter: Timepoint (day) Value: 5
  misc_feature: MA Experiment 20001906 PARAMETER Experiment Name: At_Drought_Reproduction_P Parameter: Tissue Value: Siliques
  misc_feature: MA Experiment 20001906 PARAMETER Experiment Name: At_Drought_Reproduction_P Parameter: Treatment Value: Drought vs. No Drought
  misc_feature: MA Experiment ID: 20001907 Result: Down-regulated in Transcription
  misc_feature: MA Experiment 20001907 PARAMETER Experiment Name: At_Drought_Reproduction_P Parameter: Age (day) Value: 37
  misc_feature: MA Experiment 20001907 PARAMETER Experiment Name: At_Drought_Reproduction_P Parameter: Organism Value: A. thaliana
  misc_feature: MA Experiment 20001907 PARAMETER Experiment Name: At_Drought_Reproduction_P Parameter: Plant Line Value: WS
  misc_feature: MA Experiment 20001907 PARAMETER Experiment Name: At_Drought_Reproduction_P Parameter: Timepoint (day) Value: 7
  misc_feature: MA Experiment 20001907 PARAMETER Experiment Name: At_Drought_Reproduction_P Parameter: Tissue Value: Siliques
  misc_feature: MA Experiment 20001907 PARAMETER Experiment Name: At_Drought_Reproduction_P Parameter: Treatment Value: Drought vs. No Drought
  misc_feature: MA Experiment ID: 20001908 Result: Down-regulated in Transcription
  misc_feature: MA Experiment 20001908 PARAMETER Experiment Name: At_Drought_Reproduction_P Parameter: Age (day) Value: 40
  misc_feature: MA Experiment 20001908 PARAMETER Experiment Name: At_Drought_Reproduction_P Parameter: Organism Value: A. thaliana
  misc_feature: MA Experiment 20001908 PARAMETER Experiment Name: At_Drought_Reproduction_P Parameter: Plant Line Value: WS
  misc_feature: MA Experiment 20001908 PARAMETER Experiment Name: At_Drought_Reproduction_P Parameter: Timepoint (day) Value: 10
  misc_feature: MA Experiment 20001908 PARAMETER Experiment Name: At_Drought_Reproduction_P Parameter: Tissue Value: Siliques
  misc_feature: MA Experiment 20001908 PARAMETER Experiment Name: At_Drought_Reproduction_P Parameter: Treatment Value: Drought vs. No Drought
  misc_feature: MA Experiment ID: 20001911 Result: Down-regulated in Transcription
  misc_feature: MA Experiment 20001911 PARAMETER Experiment Name: At_Drought_Reproduction_P Parameter: Age (day) Value: 40
  misc_feature: MA Experiment 20001911 PARAMETER Experiment Name: At_Drought_Reproduction_P Parameter: Organism Value: A. thaliana
  misc_feature: MA Experiment 20001911 PARAMETER Experiment Name: At_Drought_Reproduction_P Parameter: Plant Line Value: WS
  misc_feature: MA Experiment 20001911 PARAMETER Experiment Name: At_Drought_Reproduction_P Parameter: Timepoint (day) Value: 10
  misc_feature: MA Experiment 20001911 PARAMETER Experiment Name: At_Drought_Reproduction_P Parameter: Tissue Value: Flowers
  misc_feature: MA Experiment 20001911 PARAMETER Experiment Name: At_Drought_Reproduction_P Parameter: Treatment Value: Drought vs. No Drought
tgaccatcatcatcatcatcatcatcatcatttctctctatctctttctaaaacacaaccatgactgtttcttcatctccatgggctctcatggctctctttctaatggtttcttcaacaatggtaatggctattcctccacgcaaggccattgatgtaccatttggtcgtaactacgtcccaacttgggcttttgaccaccagaaacagttcaatggcggttccgaacttcagcttatcctcgacaaatacactggcacaggatttcaatcaaaggggtcatatttgtttggacattttagtatgcacataaagcttccagctggtgacacagccggagttgtcacagctttctatctatcatctaccaacaatgagcatgacgagatagactttgagttccttggaaacagaacaggacaaccagctatattacagacaaatgtattcacaggaggaaagggaaacagagaacaacgaatctatctctggtttgatccttctaaggcttatcacacttactcaatcctttggaacatgtaccagatcgtattctttgttgacaacataccaatccgaacgttcaagaatgctaaggatctaggagtacgtttcccattcaaccaaccaatgaagctttactcaagcctttggaacgcggatgattgggccacgagaggcggtttagagaagaccaattgggccaatgcacctttcgttgcatcttacaaaggattccacatagatggttgccaagcttctgtggaagccaagtactgtgccacacaaggccgcatgtggtgggatcagaaagagttccgtgaccttgacgctgaacaatggcgtcgtctcaaatgggttcgtatgaagtggaccatctacaactactgtaccgaccggactaggttcccggttatgccagctgaatgtaaaagggacagagacgcataagttactactcttgagggttttaatgaatttatgctatcattattatttgaattatgcttgttcaagagattgatatatgtattgtttgttggcccatgatgtttatgctatatttgggcctaaaattacatgttataattcatatatgtattgattagctatgtattttcatatgttatgatctacttacaagttttatt

SEQ ID NO: 29752 - protein, 296 aa, Arabidopsis thaliana
  peptide (1)..(296): Ceres Seq. ID no. 13490671
  misc_feature (35)..(216): Pfam Name: Glycosyl hydrolases family 16 Pfam Description: Glycosyl hydrolases family 16
  misc_feature (1)..(290): Homolog of NCBI NO: 18391291 NR Description: xyloglucan endotransglycosylase, putative
  misc_feature (6)..(295): Homolog of NCBI NO: 541939 NR Description: xyloglucan endo-1,4-beta-D-glucanase (EC 3.2.1.-)
  misc_feature (5)..(295): Homolog of NCBI NO: 38605591 NR Description: Probable xyloglucan
  misc_feature (1)..(295): Homolog of NCBI NO: 3043422 NR Description: endoxyloglucan transferase [Cicer arietinum]
  misc_feature (7)..(295): Homolog of NCBI NO: 27228078 NR Description: xyloglucan endotransglycosylase precursor
  misc_feature (3)..(295): Homolog of NCBI NO: 7447416 NR Description: xyloglucan endo-1,4-beta-D-glucanase (EC 3.2.1.-)
  misc_feature (3)..(295): Homolog of NCBI NO: 950299 NR Description: xyloglucan endotransglycosylase precursor
  misc_feature (11)..(295): Homolog of NCBI NO: 15240733 NR Description: xyloglucan endotransglycosylase (EXGT-A4)
  misc_feature (4)..(295): Homolog of NCBI NO: 22947847 NR Description: xyloglucan endotransglycosylase [Malus x
  misc_feature (1)..(296): Homolog of NCBI NO: 15225605 NR Description: xyloglucan endotransglycosylase (ext/EXGT-A1)
MTVSSSPWALMALFLMVSSTMVMAIPPRKAIDVPFGRNYVPTWAFDHQKQFNGGSELQLILDKYTGTGFQSKGSYLFGHFSMHIKLPAGDTAGVVTAFYLSSTNNEHDEIDFEFLGNRTGQPAILQTNVFTGGKGNREQRIYLWFDPSKAYHTYSILWNMYQIVFFVDNIPIRTFKNAKDLGVRFPFNQPMKLYSSLWNADDWATRGGLEKTNWANAPFVASYKGFHIDGCQASVEAKYCATQGRMWWDQKEFRDLDAEQWRRLKWVRMKWTIYNYCTDRTRFPVMPAECKRDRDA

SEQ ID NO: 29753 - protein, 286 aa, Arabidopsis thaliana
  peptide (1)..(286): Ceres Seq. ID no. 13490672
  misc_feature (25)..(206): Pfam Name: Glycosyl hydrolases family 16 Pfam Description: Glycosyl hydrolases family 16
  misc_feature (1)..(280): Homolog of NCBI NO: 18391291 NR Description: xyloglucan endotransglycosylase, putative
  misc_feature (1)..(285): Homolog of NCBI NO: 541939 NR Description: xyloglucan endo-1,4-beta-D-glucanase (EC 3.2.1.-)
  misc_feature (1)..(285): Homolog of NCBI NO: 38605591 NR Description: Probable xyloglucan
  misc_feature (1)..(285): Homolog of NCBI NO: 3043422 NR Description: endoxyloglucan transferase [Cicer arietinum]
  misc_feature (1)..(285): Homolog of NCBI NO: 27228078 NR Description: xyloglucan endotransglycosylase precursor
  misc_feature (1)..(285): Homolog of NCBI NO: 7447416 NR Description: xyloglucan endo-1,4-beta-D-glucanase (EC 3.2.1.-)
  misc_feature (1)..(285): Homolog of NCBI NO: 950299 NR Description: xyloglucan endotransglycosylase precursor
  misc_feature (1)..(285): Homolog of NCBI NO: 15240733 NR Description: xyloglucan endotransglycosylase (EXGT-A4)
  misc_feature (1)..(285): Homolog of NCBI NO: 22947847 NR Description: xyloglucan endotransglycosylase [Malus x
  misc_feature (1)..(286): Homolog of NCBI NO: 15225605 NR Description: xyloglucan endotransglycosylase (ext/EXGT-A1)
MALFLMVSSTMVMAIPPRKAIDVPFGRNYVPTWAFDHQKQFNGGSELQLILDKYTGTGFQSKGSYLFGHFSMHIKLPAGDTAGVVTAFYLSSTNNEHDEIDFEFLGNRTGQPAILQTNVFTGGKGNREQRIYLWFDPSKAYHTYSILWNMYQIVFFVDNIPIRTFKNAKDLGVRFPFNQPMKLYSSLWNADDWATRGGLEKTNWANAPFVASYKGFHIDGCQASVEAKYCATQGRMWWDQKEFRDLDAEQWRRLKWVRMKWTIYNYCTDRTRFPVMPAECKRDRDA

SEQ ID NO: 29754 - protein, 281 aa, Arabidopsis thaliana
  peptide (1)..(281): Ceres Seq. ID no. 13490673
  misc_feature (20)..(201): Pfam Name: Glycosyl hydrolases family 16 Pfam Description: Glycosyl hydrolases family 16
  misc_feature (1)..(275): Homolog of NCBI NO: 18391291 NR Description: xyloglucan endotransglycosylase, putative
  misc_feature (1)..(280): Homolog of NCBI NO: 541939 NR Description: xyloglucan endo-1,4-beta-D-glucanase (EC 3.2.1.-)
  misc_feature (1)..(280): Homolog of NCBI NO: 38605591 NR Description: Probable xyloglucan
  misc_feature (1)..(280): Homolog of NCBI NO: 3043422 NR Description: endoxyloglucan transferase [Cicer arietinum]
  misc_feature (1)..(280): Homolog of NCBI NO: 27228078 NR Description: xyloglucan endotransglycosylase precursor
  misc_feature (1)..(280): Homolog of NCBI NO: 7447416 NR Description: xyloglucan endo-1,4-beta-D-glucanase (EC 3.2.1.-)
  misc_feature (1)..(280): Homolog of NCBI NO: 950299 NR Description: xyloglucan endotransglycosylase precursor
  misc_feature (1)..(280): Homolog of NCBI NO: 15240733 NR Description: xyloglucan endotransglycosylase (EXGT-A4)
  misc_feature (1)..(280): Homolog of NCBI NO: 22947847 NR Description: xyloglucan endotransglycosylase [Malus x
  misc_feature (1)..(281): Homolog of NCBI NO: 15225605 NR Description: xyloglucan endotransglycosylase (ext/EXGT-A1)
MVSSTMVMAIPPRKAIDVPFGRNYVPTWAFDHQKQFNGGSELQLILDKYTGTGFQSKGSYLFGHFSMHIKLPAGDTAGVVTAFYLSSTNNEHDEIDFEFLGNRTGQPAILQTNVFTGGKGNREQRIYLWFDPSKAYHTYSILWNMYQIVFFVDNIPIRTFKNAKDLGVRFPFNQPMKLYSSLWNADDWATRGGLEKTNWANAPFVASYKGFHIDGCQASVEAKYCATQGRMWWDQKEFRDLDAEQWRRLKWVRMKWTIYNYCTDRTRFPVMPAECKRDRDA

SEQ ID NO: 29755 - DNA, 1176 bp, Arabidopsis thaliana
  misc_feature (1)..(1176): Ceres Seq. ID no. 13487542
  misc_feature: MA Experiment ID: 108488 Result: Down-regulated in Transcription
  misc_feature: MA Experiment ID: 108573 Result: Up-regulated in Transcription
  misc_feature: MA Experiment 108573 PARAMETER Experiment Name: At_Drought_cDNA_P Parameter: Timepoint (hr) Value: 6
  misc_feature: MA Experiment 108573 PARAMETER Experiment Name: At_Drought_cDNA_P Parameter: Tissue Value: Aerial
  misc_feature: MA Experiment 108573 PARAMETER Experiment Name: At_Drought_cDNA_P Parameter: Treatment Value: Drought vs. No Drought
  misc_feature: MA Experiment ID: 108577 Result: Down-regulated in Transcription
  misc_feature: MA Experiment 108577 PARAMETER Experiment Name: At_42deg_Heat_cDNA_P Parameter: Temperature (deg C) Value: 42 vs. 22
  misc_feature: MA Experiment 108577 PARAMETER Experiment Name: At_42deg_Heat_cDNA_P Parameter: Timepoint (hr) Value: 6
  misc_feature: MA Experiment 108577 PARAMETER Experiment Name: At_42deg_Heat_cDNA_P Parameter: Tissue Value: Aerial
  misc_feature: MA Experiment ID: 20000069 Result: Up-regulated in Transcription
  misc_feature: MA Experiment 20000069 PARAMETER Experiment Name: At_100uM_ABA_Mutants_cDNA_P Parameter: Plant Line Value: CS23
  misc_feature: MA Experiment 20000069 PARAMETER Experiment Name: At_100uM_ABA_Mutants_cDNA_P Parameter: Timepoint (hr) Value: 6
  misc_feature: MA Experiment 20000069 PARAMETER Experiment Name: At_100uM_ABA_Mutants_cDNA_P Parameter: Tissue Value: Aerial
  misc_feature: MA Experiment 20000069 PARAMETER Experiment Name: At_100uM_ABA_Mutants_cDNA_P Parameter: Treatment Value: 100uM ABA vs. No Treatment
  misc_feature: MA Experiment ID: 20000087 Result: Up-regulated in Transcription
  misc_feature: MA Experiment 20000087 PARAMETER Experiment Name: At_100uM_ABA_Mutants_cDNA_P Parameter: Plant Line Value: WS
  misc_feature: MA Experiment 20000087 PARAMETER Experiment Name: At_100uM_ABA_Mutants_cDNA_P Parameter: Timepoint (hr) Value: 6
  misc_feature: MA Experiment 20000087 PARAMETER Experiment Name: At_100uM_ABA_Mutants_cDNA_P Parameter: Tissue Value: Aerial
  misc_feature: MA Experiment 20000087 PARAMETER Experiment Name: At_100uM_ABA_Mutants_cDNA_P Parameter: Treatment Value: 100uM ABA vs. No Treatment
  misc_feature: MA Experiment ID: 20000117 Result: Up-regulated in Transcription
  misc_feature: MA Experiment 20000117 PARAMETER Experiment Name: At_100uM_ABA_Mutants_cDNA_P Parameter: Plant Line Value: Columbia
  misc_feature: MA Experiment 20000117 PARAMETER Experiment Name: At_100uM_ABA_Mutants_cDNA_P Parameter: Timepoint (hr) Value: 6
  misc_feature: MA Experiment 20000117 PARAMETER Experiment Name: At_100uM_ABA_Mutants_cDNA_P Parameter: Tissue Value: Aerial
  misc_feature: MA Experiment 20000117 PARAMETER Experiment Name: At_100uM_ABA_Mutants_cDNA_P Parameter: Treatment Value: 100uM ABA vs. No Treatment
  misc_feature: MA Experiment ID: 20000173 Result: Down-regulated in Transcription
  misc_feature: MA Experiment 20000173 PARAMETER Experiment Name: At_42deg_Heat_P Parameter: Age (day) Value: 14
  misc_feature: MA Experiment 20000173 PARAMETER Experiment Name: At_42deg_Heat_P Parameter: Organism Value: A. thaliana
  misc_feature: MA Experiment 20000173 PARAMETER Experiment Name: At_42deg_Heat_P Parameter: Plant Line Value: WS
  misc_feature: MA Experiment 20000173 PARAMETER Experiment Name: At_42deg_Heat_P Parameter: Temperature (deg C) Value: 42 vs. 22
  misc_feature: MA Experiment 20000173 PARAMETER Experiment Name: At_42deg_Heat_P Parameter: Timepoint (hr) Value: 6
  misc_feature: MA Experiment 20000173 PARAMETER Experiment Name: At_42deg_Heat_P Parameter: Tissue Value: Aerial
  misc_feature: MA Experiment ID: 20001451 Result: Down-regulated in Transcription
  misc_feature: MA Experiment 20001451 PARAMETER Experiment Name: At_Far-red-induction_P Parameter: Age (day) Value: 7
  misc_feature: MA Experiment 20001451 PARAMETER Experiment Name: At_Far-red-induction_P Parameter: Light Value: Far-red vs. White
  misc_feature: MA Experiment 20001451 PARAMETER Experiment Name: At_Far-red-induction_P Parameter: Organism Value: A. thaliana
  misc_feature: MA Experiment 20001451 PARAMETER Experiment Name: At_Far-red-induction_P Parameter: Plant Line Value: Columbia
  misc_feature: MA Experiment 20001451 PARAMETER Experiment Name: At_Far-red-induction_P Parameter: Timepoint (hr) Value: 24
  misc_feature: MA Experiment 20001451 PARAMETER Experiment Name: At_Far-red-induction_P Parameter: Tissue Value: Whole Plant
acctgagagtaaagaagtgagaaggagaagaaagaagcaatggagaagatagagcacacgacgatatctaccaatggtattaacatgcatgtggcttcgattggttcaggtccagtgatcctattcgtccatggctttcccgatctctggtactcatggcgtcaccagcttgtctctttcgctgccttaggttaccgcgcaatcgctccagatcttcgaggatacggcgattccgatgcgccgccgtctcgtgaatcttacaccatccttcatatcgtcggagacctcgtcggattactggattcgctcggtgttgatcgggttttcctcgtcggtcacgattggggagcaattgttgcgtggtggctttgtatgatcaggcctgatcgagtcaacgcgttggtcaacactagcgttgtgtttaatccgaggaatccttctgtgaaacctgttgatgcgtttagggctttgttcggcgatgattactacatttgcaggtttcaggagcctggagagatcgaagaggactttgctcaagttgatacaaaaaagttaataaccagatttttcacttcgcgtaacccacgtccaccttgcattccaaagtcagttggtttcagaggtttacctgatccaccttctttgcccgcttggctcaccgaacaagatgtcaggttctacggagacaagtttagccaaaaaggcttcaccggtgggctaaactactatcgcgccctgaacctaagctgggaactaacagctccatggaccggtctacaaatcaaagtccctgtgaaattcatagtgggtgatctagacataacatacaatatccccggaacaaaggaatacatacatgaaggtggtttgaagaagcacgtaccttttctacaagaagtggtggtaatggaaggtgtaggtcacttcctccatcaagagaagcctgacgaggtcactgaccatatctatggcttcttcaagaaattcagaacccgcgaaaccgcatccttgtagtagttctccgtctgcacaatgtcaaattcaaggttgattaagcttgatcagggttacttactgtcttagagccctactatgtaatgttttcaaggatgctatctgtgtattgtgcttgtttaataatttagcaaaatataataatagaacaaataatttccc

SEQ ID NO: 29756 - protein, 324 aa, Arabidopsis thaliana
  peptide (1)..(324): Ceres Seq. ID no. 13487543
  misc_feature (52)..(311): Pfam Name: alpha/beta hydrolase fold Pfam Description: alpha/beta hydrolase fold
  misc_feature (1)..(316): Homolog of NCBI NO: 25044843 NR Description: epoxide hydrolase [Ananas comosus]
  misc_feature (1)..(316): Homolog of NCBI NO: 27960680 NR Description: soluble epoxide hydrolase [Euphorbia lagascae]
  misc_feature (1)..(324): Homolog of NCBI NO: 18411917 NR Description: epoxide hydrolase, putative [Arabidopsis
MEKIEHTTISTNGINMHVASIGSGPVILFVHGFPDLWYSWRHQLVSFAALGYRAIAPDLRGYGDSDAPPSRESYTILHIVGDLVGLLDSLGVDRVFLVGHDWGAIVAWWLCMIRPDRVNALVNTSVVFNPRNPSVKPVDAFRALFGDDYYICRFQEPGEIEEDFAQVDTKKLITRFFTSRNPRPPCIPKSVGFRGLPDPPSLPAWLTEQDVRFYGDKFSQKGFTGGLNYYRALNLSWELTAPWTGLQIKVPVKFIVGDLDITYNIPGTKEYIHEGGLKKHVPFLQEVVVMEGVGHFLHQEKPDEVTDHIYGFFKKFRTRETASL

SEQ ID NO: 29757 - protein, 309 aa, Arabidopsis thaliana
  peptide (1)..(309): Ceres Seq. ID no. 13487544
  misc_feature (37)..(296): Pfam Name: alpha/beta hydrolase fold Pfam Description: alpha/beta hydrolase fold
  misc_feature (1)..(301): Homolog of NCBI NO: 25044843 NR Description: epoxide hydrolase [Ananas comosus]
  misc_feature (1)..(301): Homolog of NCBI NO: 27960680 NR Description: soluble epoxide hydrolase [Euphorbia lagascae]
  misc_feature (1)..(309): Homolog of NCBI NO: 18411917 NR Description: epoxide hydrolase, putative [Arabidopsis
MHVASIGSGPVILFVHGFPDLWYSWRHQLVSFAALGYRAIAPDLRGYGDSDAPPSRESYTILHIVGDLVGLLDSLGVDRVFLVGHDWGAIVAWWLCMIRPDRVNALVNTSVVFNPRNPSVKPVDAFRALFGDDYYICRFQEPGEIEEDFAQVDTKKLITRFFTSRNPRPPCIPKSVGFRGLPDPPSLPAWLTEQDVRFYGDKFSQKGFTGGLNYYRALNLSWELTAPWTGLQIKVPVKFIVGDLDITYNIPGTKEYIHEGGLKKHVPFLQEVVVMEGVGHFLHQEKPDEVTDHIYGFFKKFRTRETASL

SEQ ID NO: 29758 - protein, 213 aa, Arabidopsis thaliana
  peptide (1)..(213): Ceres Seq. ID no. 13487545
  misc_feature (1)..(200): Pfam Name: alpha/beta hydrolase fold Pfam Description: alpha/beta hydrolase fold
  misc_feature (1)..(205): Homolog of NCBI NO: 25044843 NR Description: epoxide hydrolase [Ananas comosus]
  misc_feature (1)..(205): Homolog of NCBI NO: 27960680 NR Description: soluble epoxide hydrolase [Euphorbia lagascae]
  misc_feature (1)..(213): Homolog of NCBI NO: 18411917 NR Description: epoxide hydrolase, putative [Arabidopsis
MIRPDRVNALVNTSVVFNPRNPSVKPVDAFRALFGDDYYICRFQEPGEIEEDFAQVDTKKLITRFFTSRNPRPPCIPKSVGFRGLPDPPSLPAWLTEQDVRFYGDKFSQKGFTGGLNYYRALNLSWELTAPWTGLQIKVPVKFIVGDLDITYNIPGTKEYIHEGGLKKHVPFLQEVVVMEGVGHFLHQEKPDEVTDHIYGFFKKFRTRETASL

SEQ ID NO: 29759 - DNA, 1215 bp, Arabidopsis thaliana
  misc_feature (1)..(1215): Ceres Seq. ID no. 12339760
  misc_feature: MA Experiment ID: 108434 Result: Up-regulated in Transcription
  misc_feature: MA Experiment 108434 PARAMETER Experiment Name: At_Root_Tips_cDNA_P Parameter: Tissue Value: Root Tips
  misc_feature: MA Experiment ID: 108461 Result: Down-regulated in Transcription
  misc_feature: MA Experiment 108461 PARAMETER Experiment Name: At_Germinating_Seeds_cDNA_P Parameter: Age (day) Value: 1 vs. 0
  misc_feature: MA Experiment 108461 PARAMETER Experiment Name: At_Germinating_Seeds_cDNA_P Parameter: Tissue Value: Germinating Seeds
  misc_feature: MA Experiment ID: 108462 Result: Down-regulated in Transcription
  misc_feature: MA Experiment 108462 PARAMETER Experiment Name: At_Germinating_Seeds_cDNA_P Parameter: Age (day) Value: 2 vs. 0
  misc_feature: MA Experiment 108462 PARAMETER Experiment Name: At_Germinating_Seeds_cDNA_P Parameter: Tissue Value: Germinating Seeds
  misc_feature: MA Experiment ID: 108463 Result: Down-regulated in Transcription
  misc_feature: MA Experiment 108463 PARAMETER Experiment Name: At_Germinating_Seeds_cDNA_P Parameter: Age (day) Value: 3 vs. 0
  misc_feature: MA Experiment 108463 PARAMETER Experiment Name: At_Germinating_Seeds_cDNA_P Parameter: Tissue Value: Germinating Seeds
  misc_feature: MA Experiment ID: 108464 Result: Down-regulated in Transcription
  misc_feature: MA Experiment 108464 PARAMETER Experiment Name: At_Germinating_Seeds_cDNA_P Parameter: Age (day) Value: 4 vs. 0
  misc_feature: MA Experiment 108464 PARAMETER Experiment Name: At_Germinating_Seeds_cDNA_P Parameter: Tissue Value: Germinating Seeds
  misc_feature: MA Experiment ID: 108577 Result: Down-regulated in Transcription
  misc_feature: MA Experiment 108577 PARAMETER Experiment Name: At_42deg_Heat_cDNA_P Parameter: Temperature (deg C) Value: 42 vs. 22
  misc_feature: MA Experiment 108577 PARAMETER Experiment Name: At_42deg_Heat_cDNA_P Parameter: Timepoint (hr) Value: 6
  misc_feature: MA Experiment 108577 PARAMETER Experiment Name: At_42deg_Heat_cDNA_P Parameter: Tissue Value: Aerial
  misc_feature: MA Experiment ID: 108595 Result: Down-regulated in Transcription
  misc_feature: MA Experiment 108595 PARAMETER Experiment Name: At_Ler-pi_Ovule_cDNA_P Parameter: Plant Line Value: null
  misc_feature: MA Experiment ID: 20000113 Result: Down-regulated in Transcription
  misc_feature: MA Experiment 20000113 PARAMETER Experiment Name: At_42deg_Heat_cDNA_P Parameter: Temperature (deg C) Value: 42 vs. 22
  misc_feature: MA Experiment 20000113 PARAMETER Experiment Name: At_42deg_Heat_cDNA_P Parameter: Timepoint (hr) Value: 8
  misc_feature: MA Experiment 20000113 PARAMETER Experiment Name: At_42deg_Heat_cDNA_P Parameter: Tissue Value: Aerial
aagacaaaaatggtgaaaacaaagaaagaagatctaaatcaatttctgattcctcgtctcaacaccatctacgaaaccctccagttgttcgatggaacagcttctcctacagtggaaagagttaattggaacgatgttcttcagatgtctgatcacctctctaaacaagccaccatagtgggaatgctatggactggagaatctccaaaagctgattcacttaaagagactatggagtcttacttcaatgcccttcaagggtttttactctgttgccatggaagcactcttggtgctggacctacgctttcttcaatcatacatgtttctgttaagcaaattgttgattctagcttcagattgttgcagggttctgtttctctatacgagggatcgtatgagaaggataagaagccgtctattccgcagctctcgggagtggtttgggaagcatgttccagtttcaagaaggttcctgcaacaaacattactgcgattggtagagctattacacaggttgcggtttccatgaaggatgttcttagggagatgaaagaagtgaagccagcgtgtcctttatctgaatgtgaggcatctggtgataatatgtctagtgatgatgatgatgatgacgatttaggcgatgatttgtctcctgaagaaatggaagttgctacaatggttactgagattgtctctgaaactatcatggtgataaaagaactcattcgagttatcactggtatgattaagatggagaatccaaaggataatagtgggtttgtggagtcgcttgagaagctactgaagctgtgtcaaggaactggtgtacaaatcgatgagcttggtgcttgtgtctatccaccgcaggagatgaacaagatgaagcaaacagtgaaggttatacagggaaatctagacgaatttgaaactgaagttgagcgtttgaagagttcttcagacggcttttcgggagcttgcgggaagctgcgaaactccttgaaacatatggaaactgaattggataaaagatgtgaagctgagctagtagttgaaatgcagaatgttactcttgacagttagtttggattttgcaattgagttttttttcggtttgtttcagtggcttgtgtcttgtagtaacattcatctaatgttcaatgtgttgtacacgtttcttaactttatagatatggtacttagattttgttttcg

SEQ ID NO: 29760 - protein, 360 aa, Arabidopsis thaliana
  peptide (1)..(360): Ceres Seq. ID no. 12339761
  misc_feature (59)..(355): Homolog of NCBI NO: 25372690 NR Description: F19G10.7 protein - Arabidopsis thaliana
  misc_feature (4)..(355): Homolog of NCBI NO: 18395185 NR Description: unknown protein; protein id: At1g22980.1
  misc_feature (4)..(358): Homolog of NCBI NO: 15223962 NR Description: unknown protein; protein id: At1g71150.1
  misc_feature (4)..(360): Homolog of NCBI NO: 15219987 NR Description: unknown protein
KTKMVKTKKEDLNQFLIPRLNTIYETLQLFDGTASPTVERVNWNDVLQMSDHLSKQATIVGMLWTGESPKADSLKETMESYFNALQGFLLCCHGSTLGAGPTLSSIIHVSVKQIVDSSFRLLQGSVSLYEGSYEKDKKPSIPQLSGVVWEACSSFKKVPATNITAIGRAITQVAVSMKDVLREMKEVKPACPLSECEASGDNMSSDDDDDDDLGDDLSPEEMEVATMVTEIVSETIMVIKELIRVITGMIKMENPKDNSGFVESLEKLLKLCQGTGVQIDELGACVYPPQEMNKMKQTVKVIQGNLDEFETEVERLKSSSDGFSGACGKLRNSLKHMETELDKRCEAELVVEMQNVTLDS

SEQ ID NO: 29761 - protein, 357 aa, Arabidopsis thaliana
  peptide (1)..(357): Ceres Seq. ID no. 12339762
  misc_feature (56)..(352): Homolog of NCBI NO: 25372690 NR Description: F19G10.7 protein - Arabidopsis thaliana
  misc_feature (1)..(352): Homolog of NCBI NO: 18395185 NR Description: unknown protein; protein id: At1g22980.1
  misc_feature (1)..(355): Homolog of NCBI NO: 15223962 NR Description: unknown protein; protein id: At1g71150.1
  misc_feature (1)..(357): Homolog of NCBI NO: 15219987 NR Description: unknown protein
MVKTKKEDLNQFLIPRLNTIYETLQLFDGTASPTVERVNWNDVLQMSDHLSKQATIVGMLWTGESPKADSLKETMESYFNALQGFLLCCHGSTLGAGPTLSSIIHVSVKQIVDSSFRLLQGSVSLYEGSYEKDKKPSIPQLSGVVWEACSSFKKVPATNITAIGRAITQVAVSMKDVLREMKEVKPACPLSECEASGDNMSSDDDDDDDLGDDLSPEEMEVATMVTEIVSETIMVIKELIRVITGMIKMENPKDNSGFVESLEKLLKLCQGTGVQIDELGACVYPPQEMNKMKQTVKVIQGNLDEFETEVERLKSSSDGFSGACGKLRNSLKHMETELDKRCEAELVVEMQNVTLDS

SEQ ID NO: 29762 - protein, 312 aa, Arabidopsis thaliana
  peptide (1)..(312): Ceres Seq. ID no. 12339763
  misc_feature (11)..(307): Homolog of NCBI NO: 25372690 NR Description: F19G10.7 protein - Arabidopsis thaliana
  misc_feature (1)..(307): Homolog of NCBI NO: 18395185 NR Description: unknown protein; protein id: At1g22980.1
  misc_feature (1)..(310): Homolog of NCBI NO: 15223962 NR Description: unknown protein; protein id: At1g71150.1
  misc_feature (1)..(312): Homolog of NCBI NO: 15219987 NR Description: unknown protein
MSDHLSKQATIVGMLWTGESPKADSLKETMESYFNALQGFLLCCHGSTLGAGPTLSSIIHVSVKQIVDSSFRLLQGSVSLYEGSYEKDKKPSIPQLSGVVWEACSSFKKVPATNITAIGRAITQVAVSMKDVLREMKEVKPACPLSECEASGDNMSSDDDDDDDLGDDLSPEEMEVATMVTEIVSETIMVIKELIRVITGMIKMENPKDNSGFVESLEKLLKLCQGTGVQIDELGACVYPPQEMNKMKQTVKVIQGNLDEFETEVERLKSSSDGFSGACGKLRNSLKHMETELDKRCEAELVVEMQNVTLDS

SEQ ID NO: 29763 - DNA, 1168 bp, Arabidopsis thaliana
  misc_feature (1)..(1168): Ceres Seq. ID no. 12396040
  misc_feature: MA Experiment ID: 20000111 Result: Up-regulated in Transcription
  misc_feature: MA Experiment 20000111 PARAMETER Experiment Name: At_42deg_Heat_cDNA_P Parameter: Temperature (deg C) Value: 42 vs. 22
  misc_feature: MA Experiment 20000111 PARAMETER Experiment Name: At_42deg_Heat_cDNA_P Parameter: Timepoint (hr) Value: 6
  misc_feature: MA Experiment 20000111 PARAMETER Experiment Name: At_42deg_Heat_cDNA_P Parameter: Tissue Value: Aerial
  misc_feature: MA Experiment ID: 20000185 Result: Up-regulated in Transcription
  misc_feature: MA Experiment 20000185 PARAMETER Experiment Name: At_Roots__P Parameter: Age (day) Value: 7 vs. 21
  misc_feature: MA Experiment 20000185 PARAMETER Experiment Name: At_Roots__P Parameter: Organism Value: A. thaliana
  misc_feature: MA Experiment 20000185 PARAMETER Experiment Name: At_Roots__P Parameter: Tissue Value: Roots vs. Whole Plant
  misc_feature: MA Experiment ID: 20000439 Result: Up-regulated in Transcription
  misc_feature: MA Experiment 20000439 PARAMETER Experiment Name: At_Roots__P Parameter: Age (day) Value: 14 vs. 21
  misc_feature: MA Experiment 20000439 PARAMETER Experiment Name: At_Roots__P Parameter: Organism Value: A. thaliana
  misc_feature: MA Experiment 20000439 PARAMETER Experiment Name: At_Roots__P Parameter: Tissue Value: Roots vs. Whole Plant
  misc_feature: MA Experiment ID: 20001451 Result: Up-regulated in Transcription
  misc_feature: MA Experiment 20001451 PARAMETER Experiment Name: At_Far-red-induction_P Parameter: Age (day) Value: 7
  misc_feature: MA Experiment 20001451 PARAMETER Experiment Name: At_Far-red-induction_P Parameter: Light Value: Far-red vs. White
  misc_feature: MA Experiment 20001451 PARAMETER Experiment Name: At_Far-red-induction_P Parameter: Organism Value: A. thaliana
  misc_feature: MA Experiment 20001451 PARAMETER Experiment Name: At_Far-red-induction_P Parameter: Plant Line Value: Columbia
  misc_feature: MA Experiment 20001451 PARAMETER Experiment Name: At_Far-red-induction_P Parameter: Timepoint (hr) Value: 24
  misc_feature: MA Experiment 20001451 PARAMETER Experiment Name: At_Far-red-induction_P Parameter: Tissue Value: Whole Plant
attcaataaattctcttttcttgcattttcaactcaatctttatctcatgctttcgtcttcgtcttcgtcaacggtagagcaaccatcacgtggcggaagtccgggaatcaacgccgtgtcctccgatgttttacggtctaacatcctaacccgcctcgacggttcctctctcgccgccctaagctgcacgtgctccaacctaaactctttttgctccgacgagtccctctggaggcaacaatgttccgctacatggccttctaccttggacagacgtgtacagagcatcatctcaacgttcccagacggtcaccggacgtttttctccgattcctttccgtttcttgaacatgatgttgtgatcaatctcccaccgtcctttgatacctcggagttaatctcagccgttgatatattctacaaagatgatgtgattttctcaagggttcatgtgacagagacagtctctggttggttcctttgctcacctatgcgtgtcgatcttgtcgaaccgaaagaactaattccgaccagagttttggttacggaccaatgtaaggatgacacgtggaaaagtgacttggaagagaatctctccttgagctggatactcattgacccgacatgtaaacgtgcggcaaatgtatcaacccgtaaacctgtctcggtgcaccgtcattggttaaccggagaagtccacgtaaaattctcctctatttttgtcgtgggcaacaagaaaaggtcggagcaagtggagttcactgtaacggtggtgctggcggcgtttaaccggagggaagaggagacagcagtgatgcagataagagaggtgagcctagtagcagaggacaaggatgggaggaatctaggagggaaggttagtttggaaattttggtggcggccatggggatgaaacgtaggtttagggcgggaggggaagaagaagggaaagagaagtacatagaatatatagagaggaagaccgcgaaggcggagatgaagtggcggcgagggaaagaaacggctatggagacggcggcgtgctggatcgccgtcctcttacttggtttccttttgtgtttttatctgtttatgcataaaaatttagtagctattatgaaaaaactaataaaatagttaaataatatgttttgattcaaaacttc

SEQ ID NO: 29764 - protein, 378 aa, Arabidopsis thaliana
  peptide (1)..(378): Ceres Seq. ID no. 12396041
  misc_feature (36)..(337): Homolog of NCBI NO: 32479726 NR Description: OJ991214_12.2 [Oryza sativa (japonica
  misc_feature (21)..(362): Homolog of NCBI NO: 15227574 NR Description: hypothetical protein; protein id: At2g36090.1
  misc_feature (36)..(359): Homolog of NCBI NO: 15225867 NR Description: unknown protein
SINSLFLHFQLNLYLMLSSSSSSTVEQPSRGGSPGINAVSSDVLRSNILTRLDGSSLAALSCTCSNLNSFCSDESLWRQQCSATWPSTLDRRVQSIISTFPDGHRTFFSDSFPFLEHDVVINLPPSFDTSELISAVDIFYKDDVIFSRVHVTETVSGWFLCSPMRVDLVEPKELIPTRVLVTDQCKDDTWKSDLEENLSLSWILIDPTCKRAANVSTRKPVSVHRHWLTGEVHVKFSSIFVVGNKKRSEQVEFTVTVVLAAFNRREEETAVMQIREVSLVAEDKDGRNLGGKVSLEILVAAMGMKRRFRAGGEEEGKEKYIEYIERKTAKAEMKWRRGKETAMETAACWIAVLLLGFLLCFYLFMHKNLVAIMKKLIK

SEQ ID NO: 29765 - protein, 363 aa, Arabidopsis thaliana
  peptide (1)..(363): Ceres Seq. ID no. 12396042
  misc_feature (21)..(322): Homolog of NCBI NO: 32479726 NR Description: OJ991214_12.2 [Oryza sativa (japonica
  misc_feature (6)..(347): Homolog of NCBI NO: 15227574 NR Description: hypothetical protein; protein id: At2g36090.1
  misc_feature (21)..(344): Homolog of NCBI NO: 15225867 NR Description: unknown protein
MLSSSSSSTVEQPSRGGSPGINAVSSDVLRSNILTRLDGSSLAALSCTCSNLNSFCSDESLWRQQCSATWPSTLDRRVQSIISTFPDGHRTFFSDSFPFLEHDVVINLPPSFDTSELISAVDIFYKDDVIFSRVHVTETVSGWFLCSPMRVDLVEPKELIPTRVLVTDQCKDDTWKSDLEENLSLSWILIDPTCKRAANVSTRKPVSVHRHWLTGEVHVKFSSIFVVGNKKRSEQVEFTVTVVLAAFNRREEETAVMQIREVSLVAEDKDGRNLGGKVSLEILVAAMGMKRRFRAGGEEEGKEKYIEYIERKTAKAEMKWRRGKETAMETAACWIAVLLLGFLLCFYLFMHKNLVAIMKKLIK

SEQ ID NO: 29766 - protein, 215 aa, Arabidopsis thaliana
  peptide (1)..(215): Ceres Seq. ID no. 12396043
  misc_feature (1)..(174): Homolog of NCBI NO: 32479726 NR Description: OJ991214_12.2 [Oryza sativa (japonica
  misc_feature (1)..(199): Homolog of NCBI NO: 15227574 NR Description: hypothetical protein; protein id: At2g36090.1
  misc_feature (1)..(196): Homolog of NCBI NO: 15225867 NR Description: unknown protein
MRVDLVEPKELIPTRVLVTDQCKDDTWKSDLEENLSLSWILIDPTCKRAANVSTRKPVSVHRHWLTGEVHVKFSSIFVVGNKKRSEQVEFTVTVVLAAFNRREEETAVMQIREVSLVAEDKDGRNLGGKVSLEILVAAMGMKRRFRAGGEEEGKEKYIEYIERKTAKAEMKWRRGKETAMETAACWIAVLLLGFLLCFYLFMHKNLVAIMKKLIK

SEQ ID NO: 29767 - DNA, 1401 bp, Arabidopsis thaliana
  misc_feature (1)..(1401): Ceres Seq. ID no. 12422582
  misc_feature: MA Experiment ID: 108577 Result: Down-regulated in Transcription
  misc_feature: MA Experiment 108577 PARAMETER Experiment Name: At_42deg_Heat_cDNA_P Parameter: Temperature (deg C) Value: 42 vs. 22
  misc_feature: MA Experiment 108577 PARAMETER Experiment Name: At_42deg_Heat_cDNA_P Parameter: Timepoint (hr) Value: 6
  misc_feature: MA Experiment 108577 PARAMETER Experiment Name: At_42deg_Heat_cDNA_P Parameter: Tissue Value: Aerial
  misc_feature: MA Experiment ID: 108585 Result: Up-regulated in Transcription
  misc_feature: MA Experiment 108585 PARAMETER Experiment Name: At_5mM_NaNP_cDNA_P Parameter: Timepoint (hr) Value: 6
  misc_feature: MA Experiment 108585 PARAMETER Experiment Name: At_5mM_NaNP_cDNA_P Parameter: Tissue Value: Aerial
  misc_feature: MA Experiment 108585 PARAMETER Experiment Name: At_5mM_NaNP_cDNA_P Parameter: Treatment Value: null
  misc_feature: MA Experiment ID: 20000185 Result: Down-regulated in Transcription
  misc_feature: MA Experiment 20000185 PARAMETER Experiment Name: At_Roots__P Parameter: Age (day) Value: 7 vs. 21
  misc_feature: MA Experiment 20000185 PARAMETER Experiment Name: At_Roots__P Parameter: Organism Value: A. thaliana
  misc_feature: MA Experiment 20000185 PARAMETER Experiment Name: At_Roots__P Parameter: Tissue Value: Roots vs. Whole Plant
  misc_feature: MA Experiment ID: 20000437 Result: Down-regulated in Transcription
  misc_feature: MA Experiment 20000437 PARAMETER Experiment Name: At_Drought_P Parameter: Age (day) Value: 8
  misc_feature: MA Experiment 20000437 PARAMETER Experiment Name: At_Drought_P Parameter: Organism Value: A. thaliana
  misc_feature: MA Experiment 20000437 PARAMETER Experiment Name: At_Drought_P Parameter: Plant Line Value: WS
  misc_feature: MA Experiment 20000437 PARAMETER Experiment Name: At_Drought_P Parameter: Timepoint (hr) Value: 24
  misc_feature: MA Experiment 20000437 PARAMETER Experiment Name: At_Drought_P Parameter: Tissue Value: Whole Plant
  misc_feature: MA Experiment 20000437 PARAMETER Experiment Name: At_Drought_P Parameter: Treatment Value: Drought vs. No Drought
  misc_feature: MA Experiment ID: 20000439 Result: Down-regulated in Transcription
  misc_feature: MA Experiment 20000439 PARAMETER Experiment Name: At_Roots__P Parameter: Age (day) Value: 14 vs. 21
  misc_feature: MA Experiment 20000439 PARAMETER Experiment Name: At_Roots__P Parameter: Organism Value: A. thaliana
  misc_feature: MA Experiment 20000439 PARAMETER Experiment Name: At_Roots__P Parameter: Tissue Value: Roots vs. Whole Plant
  misc_feature: MA Experiment ID: 20000495 Result: Up-regulated in Transcription
  misc_feature: MA Experiment 20000495 PARAMETER Experiment Name: At_Guard_Cells_P Parameter: Harvest Date Value: 8/2/2002
  misc_feature: MA Experiment 20000495 PARAMETER Experiment Name: At_Guard_Cells_P Parameter: Organism Value: A. thaliana
  misc_feature: MA Experiment 20000495 PARAMETER Experiment Name: At_Guard_Cells_P Parameter: Tissue Value: Guard Cells vs. Leaves
  misc_feature: MA Experiment ID: 20000496 Result: Up-regulated in Transcription
  misc_feature: MA Experiment 20000496 PARAMETER Experiment Name: At_Guard_Cells_P Parameter: Harvest Date Value: 7/19/2002
  misc_feature: MA Experiment 20000496 PARAMETER Experiment Name: At_Guard_Cells_P Parameter: Organism Value: Canola
  misc_feature: MA Experiment 20000496 PARAMETER Experiment Name: At_Guard_Cells_P Parameter: Tissue Value: Guard Cells vs. Leaves
  misc_feature: MA Experiment ID: 20000574 Result: Down-regulated in Transcription
  misc_feature: MA Experiment 20000574 PARAMETER Experiment Name: At_100uM_ABA_Mutants__P Parameter: Organism Value: A. thaliana
  misc_feature: MA Experiment 20000574 PARAMETER Experiment Name: At_100uM_ABA_Mutants__P Parameter: Plant Line Value: CS23 vs. Ler wt
  misc_feature: MA Experiment 20000574 PARAMETER Experiment Name: At_100uM_ABA_Mutants__P Parameter: Timepoint (hr) Value: N/A
  misc_feature: MA Experiment 20000574 PARAMETER Experiment Name: At_100uM_ABA_Mutants__P Parameter: Tissue Value: Whole Plant
  misc_feature: MA Experiment 20000574 PARAMETER Experiment Name: At_100uM_ABA_Mutants__P Parameter: Treatment Value: None
  misc_feature: MA Experiment ID: 20001557 Result: Up-regulated in Transcription
  misc_feature: MA Experiment 20001557 PARAMETER Experiment Name: At_Drought_Soil_Dry_P Parameter: Age (day) Value: 27
  misc_feature: MA Experiment 20001557 PARAMETER Experiment Name: At_Drought_Soil_Dry_P Parameter: Organism Value: A. thaliana
  misc_feature: MA Experiment 20001557 PARAMETER Experiment Name: At_Drought_Soil_Dry_P Parameter: Plant Line Value: WS
  misc_feature: MA Experiment 20001557 PARAMETER Experiment Name: At_Drought_Soil_Dry_P Parameter: Post Timepoint (hr) Value: 3
  misc_feature: MA Experiment 20001557 PARAMETER Experiment Name: At_Drought_Soil_Dry_P Parameter: Post-Treatment Value: Re-Water vs. No Drought
  misc_feature: MA Experiment 20001557 PARAMETER Experiment Name: At_Drought_Soil_Dry_P Parameter: Timepoint (day) Value: 13
  misc_feature: MA Experiment 20001557 PARAMETER Experiment Name: At_Drought_Soil_Dry_P Parameter: Treatment Value: Drought vs. No Drought
  misc_feature: MA Experiment ID: 20001904 Result: Down-regulated in Transcription
  misc_feature: MA Experiment 20001904 PARAMETER Experiment Name: At_Drought_Reproduction_P Parameter: Age (day) Value: 37
  misc_feature: MA Experiment 20001904 PARAMETER Experiment Name: At_Drought_Reproduction_P Parameter: Organism Value: A. thaliana
  misc_feature: MA Experiment 20001904 PARAMETER Experiment Name: At_Drought_Reproduction_P Parameter: Plant Line Value: WS
  misc_feature: MA Experiment 20001904 PARAMETER Experiment Name: At_Drought_Reproduction_P Parameter: Timepoint (day) Value: 7
  misc_feature: MA Experiment 20001904 PARAMETER Experiment Name: At_Drought_Reproduction_P Parameter: Tissue Value: Rosettes
  misc_feature: MA Experiment 20001904 PARAMETER Experiment Name: At_Drought_Reproduction_P Parameter: Treatment Value: Drought vs. No Drought
  misc_feature: MA Experiment ID: 20001905 Result: Down-regulated in Transcription
  misc_feature: MA Experiment 20001905 PARAMETER Experiment Name: At_Drought_Reproduction_P Parameter: Age (day) Value: 40
  misc_feature: MA Experiment 20001905 PARAMETER Experiment Name: At_Drought_Reproduction_P Parameter: Organism Value: A. thaliana
  misc_feature: MA Experiment 20001905 PARAMETER Experiment Name: At_Drought_Reproduction_P Parameter: Plant Line Value: WS
  misc_feature: MA Experiment 20001905 PARAMETER Experiment Name: At_Drought_Reproduction_P Parameter: Timepoint (day) Value: 10
  misc_feature: MA Experiment 20001905 PARAMETER Experiment Name: At_Drought_Reproduction_P Parameter: Tissue Value: Rosettes
  misc_feature: MA Experiment 20001905 PARAMETER Experiment Name: At_Drought_Reproduction_P Parameter: Treatment Value: Drought vs. No Drought
  misc_feature: MA Experiment ID: 20001911 Result: Down-regulated in Transcription
  misc_feature: MA Experiment 20001911 PARAMETER Experiment Name: At_Drought_Reproduction_P Parameter: Age (day) Value: 40
  misc_feature: MA Experiment 20001911 PARAMETER Experiment Name: At_Drought_Reproduction_P Parameter: Organism Value: A. thaliana
  misc_feature: MA Experiment 20001911 PARAMETER Experiment Name: At_Drought_Reproduction_P Parameter: Plant Line Value: WS
  misc_feature: MA Experiment 20001911 PARAMETER Experiment Name: At_Drought_Reproduction_P Parameter: Timepoint (day) Value: 10
  misc_feature: MA Experiment 20001911 PARAMETER Experiment Name: At_Drought_Reproduction_P Parameter: Tissue Value: Flowers
  misc_feature: MA Experiment 20001911 PARAMETER Experiment Name: At_Drought_Reproduction_P Parameter: Treatment Value: Drought vs. No Drought
aattccttcctttgccccatttttattttcttcttcatccataataacttcactctctcccccccccccaacatgttcctgtgacgacgatacactctttcactgacttacccctacctcaaaatcaccttcttcttcatcgtctcagctcaggaattgctaactacctgtttttgaatttgagatctgtttttgtttctagaagaaaacagcttgttttcaccgtctctgatcctctgatttgatcggaatctaatgggtaaaaccaccgggaacagagattggactcagatctacgctatttacggaatcgaacaatggcagacactcgtcttccttctcttccatgctttcttcttctctcttctctctcttctcttcctcatctacttcgatcagatttgcttcttcctcgattccttcttcctctccggcgccgccagattagccgcgggtttcaccggtgctgtaaccgctctctccgcggtttgtctactcttcgccgcagctaatttcgtttactcagatgttccgcttcagtacgagatggctcaacgcatggttagctccgtcggtgactggtcttgtgtcaaaactgctctcgatctcggttgtggccgtggtatcctcctcaatgccgtcgctacacagcttaagaaaaccggtagctccggtcgggtcgtcgggttagaccgctctaaacgcaccactctctccactctccgcaccgctaaactcgaaggtgtgcaagagtatgtgacatgccgtgaaggagatgtgaagacgttgccgtttggcgataattacttcgacgtggtggtctcgtcggtgttcgttcacacggtggggaaagagcatggtcagaagtcggtggaagctgcggcggagagaatgagagtgctcggagagattgtgagagttgtgaagccaggaggtttgtgtgtggtttgggatctcttacacgtgccggagtacgtgcgtcgtcttcaagagctaaagatggaagatatacgagtctcggagcgagtcacggcgtttatggccggaagtcacatcgtttcgttccggaaacccagtgaactcgtcgccgggccccgtgaagtccgcctcgattggagatgatgacgtggtgttcaaaacgacagtgatgtgtgtcggttcgttatataaaaaacggcacgtagttgaagaagtctggaggttcgacactataattgtaatatattaattacgaatctactactactacactagaaaatcaaaatgtatgtggcgtctggggaggcgaagcggaaccagatgctttgatgaagaggcataacgctgcgtttgcgtttttgtcttgtatttgtataacctatagtttttattaacatattaagctgaatcttaatatgtgat

SEQ ID NO: 29768 - protein, 288 aa, Arabidopsis thaliana
  peptide (1)..(288): Ceres Seq. ID no. 12422583
  misc_feature (64)..(273): Homolog of NCBI NO: 22971588 NR Description: hypothetical protein [Chloroflexus aurantiacus]
  misc_feature (1)..(288): Homolog of NCBI NO: 15239632 NR Description: putative protein; protein id: At5g54400.1
  misc_feature (1)..(288): Homolog of NCBI NO: 18400797 NR Description: expressed protein
MGKTTGNRDWTQIYAIYGIEQWQTLVFLLFHAFFFSLLSLLFLIYFDQICFFLDSFFLSGAARLAAGFTGAVTALSAVCLLFAAANFVYSDVPLQYEMAQRMVSSVGDWSCVKTALDLGCGRGILLNAVATQLKKTGSSGRVVGLDRSKRTTLSTLRTAKLEGVQEYVTCREGDVKTLPFGDNYFDVVVSSVFVHTVGKEHGQKSVEAAAERMRVLGEIVRVVKPGGLCVVWDLLHVPEYVRRLQELKMEDIRVSERVTAFMAGSHIVSFRKPSELVAGPREVRLDWR

SEQ ID NO: 29769 - protein, 191 aa, Arabidopsis thaliana
  peptide (1)..(191): Ceres Seq. ID no. 12422584
  misc_feature (1)..(176): Homolog of NCBI NO: 22971588 NR Description: hypothetical protein [Chloroflexus aurantiacus]
  misc_feature (1)..(191): Homolog of NCBI NO: 15239632 NR Description: putative protein; protein id: At5g54400.1
  misc_feature (1)..(191): Homolog of NCBI NO: 18400797 NR Description: expressed protein
MAQRMVSSVGDWSCVKTALDLGCGRGILLNAVATQLKKTGSSGRVVGLDRSKRTTLSTLRTAKLEGVQEYVTCREGDVKTLPFGDNYFDVVVSSVFVHTVGKEHGQKSVEAAAERMRVLGEIVRVVKPGGLCVVWDLLHVPEYVRRLQELKMEDIRVSERVTAFMAGSHIVSFRKPSELVAGPREVRLDWR

SEQ ID NO: 29770 - protein, 187 aa, Arabidopsis thaliana
  peptide (1)..(187): Ceres Seq. ID no. 12422585
  misc_feature (1)..(172): Homolog of NCBI NO: 22971588 NR Description: hypothetical protein [Chloroflexus aurantiacus]
  misc_feature (1)..(187): Homolog of NCBI NO: 15239632 NR Description: putative protein; protein id: At5g54400.1
  misc_feature (1)..(187): Homolog of NCBI NO: 18400797 NR Description: expressed protein
MVSSVGDWSCVKTALDLGCGRGILLNAVATQLKKTGSSGRVVGLDRSKRTTLSTLRTAKLEGVQEYVTCREGDVKTLPFGDNYFDVVVSSVFVHTVGKEHGQKSVEAAAERMRVLGEIVRVVKPGGLCVVWDLLHVPEYVRRLQELKMEDIRVSERVTAFMAGSHIVSFRKPSELVAGPREVRLDWR

SEQ ID NO: 29771 - DNA, 1107 bp, Arabidopsis thaliana
  misc_feature (1)..(1107): Ceres Seq. ID no. 12396806
  misc_feature: MA Experiment ID: 108462 Result: Down-regulated in Transcription
  misc_feature: MA Experiment 108462 PARAMETER Experiment Name: At_Germinating_Seeds_cDNA_P Parameter: Age (day) Value: 2 vs. 0
  misc_feature: MA Experiment 108462 PARAMETER Experiment Name: At_Germinating_Seeds_cDNA_P Parameter: Tissue Value: Germinating Seeds
  misc_feature: MA Experiment ID: 108488 Result: Down-regulated in Transcription
  misc_feature: MA Experiment ID: 108561 Result: Up-regulated in Transcription
  misc_feature: MA Experiment 108561 PARAMETER Experiment Name: At_100uM_ABA_cDNA_P Parameter: Timepoint (hr) Value: 6
  misc_feature: MA Experiment 108561 PARAMETER Experiment Name: At_100uM_ABA_cDNA_P Parameter: Tissue Value: Aerial
  misc_feature: MA Experiment 108561 PARAMETER Experiment Name: At_100uM_ABA_cDNA_P Parameter: Treatment Value: 100uM ABA vs. No Treatment
  misc_feature: MA Experiment ID: 108572 Result: Up-regulated in Transcription
  misc_feature: MA Experiment 108572 PARAMETER Experiment Name: At_Drought_cDNA_P Parameter: Timepoint (hr) Value: 1
  misc_feature: MA Experiment 108572 PARAMETER Experiment Name: At_Drought_cDNA_P Parameter: Tissue Value: Aerial
  misc_feature: MA Experiment 108572 PARAMETER Experiment Name: At_Drought_cDNA_P Parameter: Treatment Value: Drought vs. No Drought
  misc_feature: MA Experiment ID: 108573 Result: Up-regulated in Transcription
  misc_feature: MA Experiment 108573 PARAMETER Experiment Name: At_Drought_cDNA_P Parameter: Timepoint (hr) Value: 6
  misc_feature: MA Experiment 108573 PARAMETER Experiment Name: At_Drought_cDNA_P Parameter: Tissue Value: Aerial
  misc_feature: MA Experiment 108573 PARAMETER Experiment Name: At_Drought_cDNA_P Parameter: Treatment Value: Drought vs. No Drought
  misc_feature: MA Experiment ID: 108607 Result: Up-regulated in Transcription
  misc_feature: MA Experiment 108607 PARAMETER Experiment Name: At_100uM_ABA_cDNA_P Parameter: Timepoint (hr) Value: 4
  misc_feature: MA Experiment 108607 PARAMETER Experiment Name: At_100uM_ABA_cDNA_P Parameter: Tissue Value: Aerial
  misc_feature: MA Experiment 108607 PARAMETER Experiment Name: At_100uM_ABA_cDNA_P Parameter: Treatment Value: 100uM ABA vs. No Treatment
  misc_feature: MA Experiment ID: 108668 Result: Up-regulated in Transcription
  misc_feature: MA Experiment 108668 PARAMETER Experiment Name: At_2mM_SA_cDNA_P Parameter: Plant Line Value: WS
  misc_feature: MA Experiment 108668 PARAMETER Experiment Name: At_2mM_SA_cDNA_P Parameter: Timepoint (hr) Value: 6
  misc_feature: MA Experiment 108668 PARAMETER Experiment Name: At_2mM_SA_cDNA_P Parameter: Treatment Value: 2mM SA vs. No Treatment
  misc_feature: MA Experiment ID: 20000069 Result: Up-regulated in Transcription
  misc_feature: MA Experiment 20000069 PARAMETER Experiment Name: At_100uM_ABA_Mutants_cDNA_P Parameter: Plant Line Value: CS23
  misc_feature: MA Experiment 20000069 PARAMETER Experiment Name: At_100uM_ABA_Mutants_cDNA_P Parameter: Timepoint (hr) Value: 6
  misc_feature: MA Experiment 20000069 PARAMETER Experiment Name: At_100uM_ABA_Mutants_cDNA_P Parameter: Tissue Value: Aerial
  misc_feature: MA Experiment 20000069 PARAMETER Experiment Name: At_100uM_ABA_Mutants_cDNA_P Parameter: Treatment Value: 100uM ABA vs. No Treatment
  misc_feature: MA Experiment ID: 20000070 Result: Up-regulated in Transcription
  misc_feature: MA Experiment 20000070 PARAMETER Experiment Name: At_100uM_ABA_Mutants_cDNA_P Parameter: Plant Line Value: CS24
  misc_feature: MA Experiment 20000070 PARAMETER Experiment Name: At_100uM_ABA_Mutants_cDNA_P Parameter: Timepoint (hr) Value: 6
  misc_feature: MA Experiment 20000070 PARAMETER Experiment Name: At_100uM_ABA_Mutants_cDNA_P Parameter: Tissue Value: Aerial
  misc_feature: MA Experiment 20000070 PARAMETER Experiment Name: At_100uM_ABA_Mutants_cDNA_P Parameter: Treatment Value: 100uM ABA vs. No Treatment
  misc_feature: MA Experiment ID: 20000071 Result: Up-regulated in Transcription
  misc_feature: MA Experiment 20000071 PARAMETER Experiment Name: At_100uM_ABA_Mutants_cDNA_P Parameter: Plant Line Value: CS8104
  misc_feature: MA Experiment 20000071 PARAMETER Experiment Name: At_100uM_ABA_Mutants_cDNA_P Parameter: Timepoint (hr) Value: 6
  misc_feature: MA Experiment 20000071 PARAMETER Experiment Name: At_100uM_ABA_Mutants_cDNA_P Parameter: Tissue Value: Aerial
  misc_feature: MA Experiment 20000071 PARAMETER Experiment Name: At_100uM_ABA_Mutants_cDNA_P Parameter: Treatment Value: 100uM ABA vs. No Treatment
  misc_feature: MA Experiment ID: 20000072 Result: Up-regulated in Transcription
  misc_feature: MA Experiment 20000072 PARAMETER Experiment Name: At_100uM_ABA_Mutants_cDNA_P Parameter: Plant Line Value: CS8105
  misc_feature: MA Experiment 20000072 PARAMETER Experiment Name: At_100uM_ABA_Mutants_cDNA_P Parameter: Timepoint (hr) Value: 6
  misc_feature: MA Experiment 20000072 PARAMETER Experiment Name: At_100uM_ABA_Mutants_cDNA_P Parameter: Tissue Value: Aerial
  misc_feature: MA Experiment 20000072 PARAMETER Experiment Name: At_100uM_ABA_Mutants_cDNA_P Parameter: Treatment Value: 100uM ABA vs. No Treatment
  misc_feature: MA Experiment ID: 20000086 Result: Up-regulated in Transcription
  misc_feature: MA Experiment 20000086 PARAMETER Experiment Name: At_100uM_ABA_Mutants_cDNA_P Parameter: Plant Line Value: CS22
  misc_feature: MA Experiment 20000086 PARAMETER Experiment Name: At_100uM_ABA_Mutants_cDNA_P Parameter: Timepoint (hr) Value: 6
  misc_feature: MA Experiment 20000086 PARAMETER Experiment Name: At_100uM_ABA_Mutants_cDNA_P Parameter: Tissue Value: Aerial
  misc_feature: MA Experiment 20000086 PARAMETER Experiment Name: At_100uM_ABA_Mutants_cDNA_P Parameter: Treatment Value: 100uM ABA vs. No Treatment
  misc_feature: MA Experiment ID: 20000087 Result: Up-regulated in Transcription
  misc_feature: MA Experiment 20000087 PARAMETER Experiment Name: At_100uM_ABA_Mutants_cDNA_P Parameter: Plant Line Value: WS
  misc_feature: MA Experiment 20000087 PARAMETER Experiment Name: At_100uM_ABA_Mutants_cDNA_P Parameter: Timepoint (hr) Value: 6
  misc_feature: MA Experiment 20000087 PARAMETER Experiment Name: At_100uM_ABA_Mutants_cDNA_P Parameter: Tissue Value: Aerial
  misc_feature: MA Experiment 20000087 PARAMETER Experiment Name: At_100uM_ABA_Mutants_cDNA_P Parameter: Treatment Value: 100uM ABA vs. No Treatment
  misc_feature: MA Experiment ID: 20000088 Result: Up-regulated in Transcription
  misc_feature: MA Experiment 20000088 PARAMETER Experiment Name: At_100uM_ABA_Mutants_cDNA_P Parameter: Plant Line Value: Landsberg
  misc_feature: MA Experiment 20000088 PARAMETER Experiment Name: At_100uM_ABA_Mutants_cDNA_P Parameter: Timepoint (hr) Value: 6
  misc_feature: MA Experiment 20000088 PARAMETER Experiment Name: At_100uM_ABA_Mutants_cDNA_P Parameter: Tissue Value: Aerial
  misc_feature: MA Experiment 20000088 PARAMETER Experiment Name: At_100uM_ABA_Mutants_cDNA_P Parameter: Treatment Value: 100uM ABA vs. No Treatment
  misc_feature: MA Experiment ID: 20000117 Result: Up-regulated in Transcription
  misc_feature: MA Experiment 20000117 PARAMETER Experiment Name: At_100uM_ABA_Mutants_cDNA_P Parameter: Plant Line Value: Columbia
  misc_feature: MA Experiment 20000117 PARAMETER Experiment Name: At_100uM_ABA_Mutants_cDNA_P Parameter: Timepoint (hr) Value: 6
  misc_feature: MA Experiment 20000117 PARAMETER Experiment Name: At_100uM_ABA_Mutants_cDNA_P Parameter: Tissue Value: Aerial
  misc_feature: MA Experiment 20000117 PARAMETER Experiment Name: At_100uM_ABA_Mutants_cDNA_P Parameter: Treatment Value: 100uM ABA vs. No Treatment
  misc_feature: MA Experiment ID: 20000169 Result: Up-regulated in Transcription
  misc_feature: MA Experiment 20000169 PARAMETER Experiment Name: At_100uM_ABA_P Parameter: Age (day) Value: 14
  misc_feature: MA Experiment 20000169 PARAMETER Experiment Name: At_100uM_ABA_P Parameter: Organism Value: A. thaliana
  misc_feature: MA Experiment 20000169 PARAMETER Experiment Name: At_100uM_ABA_P Parameter: Plant Line Value: WS
  misc_feature: MA Experiment 20000169 PARAMETER Experiment Name: At_100uM_ABA_P Parameter: Timepoint (hr) Value: 6
  misc_feature: MA Experiment 20000169 PARAMETER Experiment Name: At_100uM_ABA_P Parameter: Tissue Value: Aerial
  misc_feature: MA Experiment 20000169 PARAMETER Experiment Name: At_100uM_ABA_P Parameter: Treatment Value: 100uM ABA vs. No Treatment
  misc_feature: MA Experiment ID: 20000173 Result: Down-regulated in Transcription
  misc_feature: MA Experiment 20000173 PARAMETER Experiment Name: At_42deg_Heat_P Parameter: Age (day) Value: 14
  misc_feature: MA Experiment 20000173 PARAMETER Experiment Name: At_42deg_Heat_P Parameter: Organism Value: A. thaliana
  misc_feature: MA Experiment 20000173 PARAMETER Experiment Name: At_42deg_Heat_P Parameter: Plant Line Value: WS
  misc_feature: MA Experiment 20000173 PARAMETER Experiment Name: At_42deg_Heat_P Parameter: Temperature (deg C) Value: 42 vs. 22
  misc_feature: MA Experiment 20000173 PARAMETER Experiment Name: At_42deg_Heat_P Parameter: Timepoint (hr) Value: 6
  misc_feature: MA Experiment 20000173 PARAMETER Experiment Name: At_42deg_Heat_P Parameter: Tissue Value: Aerial
  misc_feature: MA Experiment ID: 20000185 Result: Down-regulated in Transcription
  misc_feature: MA Experiment 20000185 PARAMETER Experiment Name: At_Roots__P Parameter: Age (day) Value: 7 vs. 21
  misc_feature: MA Experiment 20000185 PARAMETER Experiment Name: At_Roots__P Parameter: Organism Value: A. thaliana
  misc_feature: MA Experiment 20000185 PARAMETER Experiment Name: At_Roots__P Parameter: Tissue Value: Roots vs. Whole Plant
  misc_feature: MA Experiment ID: 20000234 Result: Down-regulated in Transcription
  misc_feature: MA Experiment 20000234 PARAMETER Experiment Name: At_Siliques_P Parameter: Age (day) Value: 21
  misc_feature: MA Experiment 20000234 PARAMETER Experiment Name: At_Siliques_P Parameter: Organism Value: A. thaliana
  misc_feature: MA Experiment 20000234 PARAMETER Experiment Name: At_Siliques_P Parameter: Plant Line Value: WS
  misc_feature: MA Experiment 20000234 PARAMETER Experiment Name: At_Siliques_P Parameter: Tissue Value: Less Than 5mm Siliques vs. Whole Plant
  misc_feature: MA Experiment ID: 20000235 Result: Down-regulated in Transcription
  misc_feature: MA Experiment 20000235 PARAMETER Experiment Name: At_Siliques_P Parameter: Age (day) Value: 21
  misc_feature: MA Experiment 20000235 PARAMETER Experiment Name: At_Siliques_P Parameter: Organism Value: A. thaliana
  misc_feature: MA Experiment 20000235 PARAMETER Experiment Name: At_Siliques_P Parameter: Plant Line Value: WS
  misc_feature: MA Experiment 20000235 PARAMETER Experiment Name: At_Siliques_P Parameter: Tissue Value: 5-10mm Siliques vs. Whole Plant
  misc_feature: MA Experiment ID: 20000265 Result: Down-regulated in Transcription
  misc_feature: MA Experiment 20000265 PARAMETER Experiment Name: At_Open_Flower_P Parameter: Age (day) Value: 21
  misc_feature: MA Experiment 20000265 PARAMETER Experiment Name: At_Open_Flower_P Parameter: Plant Line Value: WS
  misc_feature: MA Experiment 20000265 PARAMETER Experiment Name: At_Open_Flower_P Parameter: Tissue Value: Closed Flower vs. Whole Plant
  misc_feature: MA Experiment ID: 20000267 Result: Up-regulated in Transcription
  misc_feature: MA Experiment 20000267 PARAMETER Experiment Name: At_Drought_P Parameter: Age (day) Value: 7
  misc_feature: MA Experiment 20000267 PARAMETER Experiment Name: At_Drought_P Parameter: Organism Value: A. thaliana
  misc_feature: MA Experiment 20000267 PARAMETER Experiment Name: At_Drought_P Parameter: Plant Line Value: WS
  misc_feature: MA Experiment 20000267 PARAMETER Experiment Name: At_Drought_P Parameter: Timepoint (hr) Value: 6
  misc_feature: MA Experiment 20000267 PARAMETER Experiment Name: At_Drought_P Parameter: Tissue Value: Whole Plant
  misc_feature: MA Experiment 20000267 PARAMETER Experiment Name: At_Drought_P Parameter: Treatment Value: Drought vs. No Drought
  misc_feature: MA Experiment ID: 20000286 Result: Down-regulated in Transcription
  misc_feature: MA Experiment 20000286 PARAMETER Experiment Name: At_Open_Flower_P Parameter: Age (day) Value: 21
  misc_feature: MA Experiment 20000286 PARAMETER Experiment Name: At_Open_Flower_P Parameter: Plant Line Value: WS
  misc_feature: MA Experiment 20000286 PARAMETER Experiment Name: At_Open_Flower_P Parameter: Tissue Value: Half Open vs. Whole Plant
  misc_feature: MA Experiment ID: 20000436 Result: Up-regulated in Transcription
  misc_feature: MA Experiment 20000436 PARAMETER Experiment Name: At_Drought_P Parameter: Age (day) Value: 7
  misc_feature: MA Experiment 20000436 PARAMETER Experiment Name: At_Drought_P Parameter: Organism Value: A. thaliana
  misc_feature: MA Experiment 20000436 PARAMETER Experiment Name: At_Drought_P Parameter: Plant Line Value: WS
  misc_feature: MA Experiment 20000436 PARAMETER Experiment Name: At_Drought_P Parameter: Timepoint (hr) Value: 12
  misc_feature: MA Experiment 20000436 PARAMETER Experiment Name: At_Drought_P Parameter: Tissue Value: Whole Plant
  misc_feature: MA Experiment 20000436 PARAMETER Experiment Name: At_Drought_P Parameter: Treatment Value: Drought vs. No Drought
  misc_feature: MA Experiment ID: 20000437 Result: Up-regulated in Transcription
  misc_feature: MA Experiment 20000437 PARAMETER Experiment Name: At_Drought_P Parameter: Age (day) Value: 8
  misc_feature: MA Experiment 20000437 PARAMETER Experiment Name: At_Drought_P Parameter: Organism Value: A. thaliana
  misc_feature: MA Experiment 20000437 PARAMETER Experiment Name: At_Drought_P Parameter: Plant Line Value: WS
  misc_feature: MA Experiment 20000437 PARAMETER Experiment Name: At_Drought_P Parameter: Timepoint (hr) Value: 24
  misc_feature: MA Experiment 20000437 PARAMETER Experiment Name: At_Drought_P Parameter: Tissue Value: Whole Plant
  misc_feature: MA Experiment 20000437 PARAMETER Experiment Name: At_Drought_P Parameter: Treatment Value: Drought vs. No Drought
  misc_feature: MA Experiment ID: 20000438 Result: Down-regulated in Transcription
  misc_feature: MA Experiment 20000438 PARAMETER Experiment Name: At_Shoots__P Parameter: Age (day) Value: 14
  misc_feature: MA Experiment 20000438 PARAMETER Experiment Name: At_Shoots__P Parameter: Tissue Value: Shoots vs. Whole Plant
  misc_feature: MA Experiment ID: 20000439 Result: Down-regulated in Transcription
  misc_feature: MA Experiment 20000439 PARAMETER Experiment Name: At_Roots__P Parameter: Age (day) Value: 14 vs. 21
  misc_feature: MA Experiment 20000439 PARAMETER Experiment Name: At_Roots__P Parameter: Organism Value: A. thaliana
  misc_feature: MA Experiment 20000439 PARAMETER Experiment Name: At_Roots__P Parameter: Tissue Value: Roots vs. Whole Plant
  misc_feature: MA Experiment ID: 20000453 Result: Up-regulated in Transcription
  misc_feature: MA Experiment 20000453 PARAMETER Experiment Name: At_100uM_ABA_P Parameter: Age (day) Value: 15
  misc_feature: MA Experiment 20000453 PARAMETER Experiment Name: At_100uM_ABA_P Parameter: Organism Value: A. thaliana
  misc_feature: MA Experiment 20000453 PARAMETER Experiment Name: At_100uM_ABA_P Parameter: Plant Line Value: WS
  misc_feature: MA Experiment 20000453 PARAMETER Experiment Name: At_100uM_ABA_P Parameter: Timepoint (hr) Value: 24
  misc_feature: MA Experiment 20000453 PARAMETER Experiment Name: At_100uM_ABA_P Parameter: Tissue Value: Aerial
  misc_feature: MA Experiment 20000453 PARAMETER Experiment Name: At_100uM_ABA_P Parameter: Treatment Value: 100uM ABA vs. No Treatment
  misc_feature: MA Experiment ID: 20000527 Result: Down-regulated in Transcription
  misc_feature: MA Experiment 20000527 PARAMETER Experiment Name: At_10percent_PEG_P Parameter: Age (day) Value: 20
  misc_feature: MA Experiment 20000527 PARAMETER Experiment Name: At_10percent_PEG_P Parameter: Organism Value: A. thaliana
  misc_feature: MA Experiment 20000527 PARAMETER Experiment Name: At_10percent_PEG_P Parameter: Plant Line Value: WS
  misc_feature: MA Experiment 20000527 PARAMETER Experiment Name: At_10percent_PEG_P Parameter: Timepoint (day) Value: 20
  misc_feature: MA Experiment 20000527 PARAMETER Experiment Name: At_10percent_PEG_P Parameter: Tissue Value: Whole Plant
  misc_feature: MA Experiment 20000527 PARAMETER Experiment Name: At_10percent_PEG_P Parameter: Treatment Value: 10percent PEG vs. No Treatment
  misc_feature: MA Experiment ID: 20000573 Result: Up-regulated in Transcription
  misc_feature: MA Experiment 20000573 PARAMETER Experiment Name: At_100uM_ABA_Mutants__P Parameter: Organism Value: A. thaliana
  misc_feature: MA Experiment 20000573 PARAMETER Experiment Name: At_100uM_ABA_Mutants__P Parameter: Plant Line Value: CS22 vs. Ler wt
  misc_feature: MA Experiment 20000573 PARAMETER Experiment Name: At_100uM_ABA_Mutants__P Parameter: Timepoint (hr) Value: N/A
  misc_feature: MA Experiment 20000573 PARAMETER Experiment Name: At_100uM_ABA_Mutants__P Parameter: Tissue Value: Whole Plant
  misc_feature: MA Experiment 20000573 PARAMETER Experiment Name: At_100uM_ABA_Mutants__P Parameter: Treatment Value: None
  misc_feature: MA Experiment ID: 20000709 Result: Down-regulated in Transcription
  misc_feature: MA Experiment 20000709 PARAMETER Experiment Name: At_15mM_NH4NO3_L-to-H_P Parameter: Age (hr) Value: 14
  misc_feature: MA Experiment 20000709 PARAMETER Experiment Name: At_15mM_NH4NO3_L-to-H_P Parameter: Organism Value: A. thaliana
  misc_feature: MA Experiment 20000709 PARAMETER Experiment Name: At_15mM_NH4NO3_L-to-H_P Parameter: Plant Line Value: WS
  misc_feature: MA Experiment 20000709 PARAMETER Experiment Name: At_15mM_NH4NO3_L-to-H_P Parameter: Timepoint (hr) Value: 4
  misc_feature: MA Experiment 20000709 PARAMETER Experiment Name: At_15mM_NH4NO3_L-to-H_P Parameter: Tissue Value: Aerial
  misc_feature: MA Experiment 20000709 PARAMETER Experiment Name: At_15mM_NH4NO3_L-to-H_P Parameter: Treatment Value: 15mM NH4NO3 vs. 30mM Mannitol
  misc_feature: MA Experiment ID: 20000794 Result: Up-regulated in Transcription
  misc_feature: MA Experiment 20000794 PARAMETER Experiment Name: At_Petals_P Parameter: Age (day) Value: 23-25 days
  misc_feature: MA Experiment 20000794 PARAMETER Experiment Name: At_Petals_P Parameter: Plant Line Value: WS
  misc_feature: MA Experiment 20000794 PARAMETER Experiment Name: At_Petals_P Parameter: Tissue Value: Petals vs. Whole plant
  misc_feature: MA Experiment ID: 20001450 Result: Up-regulated in Transcription
  misc_feature: MA Experiment 20001450 PARAMETER Experiment Name: At_Far-red-induction_P Parameter: Age (day) Value: 7
  misc_feature: MA Experiment 20001450 PARAMETER Experiment Name: At_Far-red-induction_P Parameter: Light Value: Far-red vs. White
  misc_feature: MA Experiment 20001450 PARAMETER Experiment Name: At_Far-red-induction_P Parameter: Organism Value: A. thaliana
  misc_feature: MA Experiment 20001450 PARAMETER Experiment Name: At_Far-red-induction_P Parameter: Plant Line Value: Columbia
  misc_feature: MA Experiment 20001450 PARAMETER Experiment Name: At_Far-red-induction_P Parameter: Timepoint (hr) Value: 8
  misc_feature: MA Experiment 20001450 PARAMETER Experiment Name: At_Far-red-induction_P Parameter: Tissue Value: Whole Plant
  misc_feature: MA Experiment ID: 20001451 Result: Up-regulated in Transcription
  misc_feature: MA Experiment 20001451 PARAMETER Experiment Name: At_Far-red-induction_P Parameter: Age (day) Value: 7
  misc_feature: MA Experiment 20001451 PARAMETER Experiment Name: At_Far-red-induction_P Parameter: Light Value: Far-red vs. White
  misc_feature: MA Experiment 20001451 PARAMETER Experiment Name: At_Far-red-induction_P Parameter: Organism Value: A. thaliana
  misc_feature: MA Experiment 20001451 PARAMETER Experiment Name: At_Far-red-induction_P Parameter: Plant Line Value: Columbia
  misc_feature: MA Experiment 20001451 PARAMETER Experiment Name: At_Far-red-induction_P Parameter: Timepoint (hr) Value: 24
  misc_feature: MA Experiment 20001451 PARAMETER Experiment Name: At_Far-red-induction_P Parameter: Tissue Value: Whole Plant
  misc_feature: MA Experiment ID: 20001554 Result: Up-regulated in Transcription
  misc_feature: MA Experiment 20001554 PARAMETER Experiment Name: At_Drought_Soil_Dry_P Parameter: Age (day) Value: 21
  misc_feature: MA Experiment 20001554 PARAMETER Experiment Name: At_Drought_Soil_Dry_P Parameter: Organism Value: A. thaliana
  misc_feature: MA Experiment 20001554 PARAMETER Experiment Name: At_Drought_Soil_Dry_P Parameter: Plant Line Value: WS
  misc_feature: MA Experiment 20001554 PARAMETER Experiment Name: At_Drought_Soil_Dry_P Parameter: Post Timepoint (hr) Value: None
  misc_feature: MA Experiment 20001554 PARAMETER Experiment Name: At_Drought_Soil_Dry_P Parameter: Post-Treatment Value: None
  misc_feature: MA Experiment 20001554 PARAMETER Experiment Name: At_Drought_Soil_Dry_P Parameter: Timepoint (day) Value: 7
  misc_feature: MA Experiment 20001554 PARAMETER Experiment Name: At_Drought_Soil_Dry_P Parameter: Treatment Value: Drought vs. No Drought
  misc_feature: MA Experiment ID: 20001555 Result: Up-regulated in Transcription
  misc_feature: MA Experiment 20001555 PARAMETER Experiment Name: At_Drought_Soil_Dry_P Parameter: Age (day) Value: 24
  misc_feature: MA Experiment 20001555 PARAMETER Experiment Name: At_Drought_Soil_Dry_P Parameter: Organism Value: A. thaliana
  misc_feature: MA Experiment 20001555 PARAMETER Experiment Name: At_Drought_Soil_Dry_P Parameter: Plant Line Value: WS
  misc_feature: MA Experiment 20001555 PARAMETER Experiment Name: At_Drought_Soil_Dry_P Parameter: Post Timepoint (hr) Value: None
  misc_feature: MA Experiment 20001555 PARAMETER Experiment Name: At_Drought_Soil_Dry_P Parameter: Post-Treatment Value: None
  misc_feature: MA Experiment 20001555 PARAMETER Experiment Name: At_Drought_Soil_Dry_P Parameter: Timepoint (day) Value: 10
  misc_feature: MA Experiment 20001555 PARAMETER Experiment Name: At_Drought_Soil_Dry_P Parameter: Treatment Value: Drought vs. No Drought
  misc_feature: MA Experiment ID: 20001558 Result: Down-regulated in Transcription
  misc_feature: MA Experiment 20001558 PARAMETER Experiment Name: At_Drought_Soil_Dry_P Parameter: Age (day) Value: 27
  misc_feature: MA Experiment 20001558 PARAMETER Experiment Name: At_Drought_Soil_Dry_P Parameter: Organism Value: A. thaliana
  misc_feature: MA Experiment 20001558 PARAMETER Experiment Name: At_Drought_Soil_Dry_P Parameter: Plant Line Value: WS
  misc_feature: MA Experiment 20001558 PARAMETER Experiment Name: At_Drought_Soil_Dry_P Parameter: Post Timepoint (hr) Value: 6
  misc_feature: MA Experiment 20001558 PARAMETER Experiment Name: At_Drought_Soil_Dry_P Parameter: Post-Treatment Value: Re-Water vs. No Drought
  misc_feature: MA Experiment 20001558 PARAMETER Experiment Name: At_Drought_Soil_Dry_P Parameter: Timepoint (day) Value: 13
  misc_feature: MA Experiment 20001558 PARAMETER Experiment Name: At_Drought_Soil_Dry_P Parameter: Treatment Value: Drought vs. No Drought
  misc_feature: MA Experiment ID: 20001904 Result: Up-regulated in Transcription
  misc_feature: MA Experiment 20001904 PARAMETER Experiment Name: At_Drought_Reproduction_P Parameter: Age (day) Value: 37
  misc_feature: MA Experiment 20001904 PARAMETER Experiment Name: At_Drought_Reproduction_P Parameter: Organism Value: A. thaliana
  misc_feature: MA Experiment 20001904 PARAMETER Experiment Name: At_Drought_Reproduction_P Parameter: Plant Line Value: WS
  misc_feature: MA Experiment 20001904 PARAMETER Experiment Name: At_Drought_Reproduction_P Parameter: Timepoint (day) Value: 7
  misc_feature: MA Experiment 20001904 PARAMETER Experiment Name: At_Drought_Reproduction_P Parameter: Tissue Value: Rosettes
  misc_feature: MA Experiment 20001904 PARAMETER Experiment Name: At_Drought_Reproduction_P Parameter: Treatment Value: Drought vs. No Drought
  misc_feature: MA Experiment ID: 20001906 Result: Up-regulated in Transcription
  misc_feature: MA Experiment 20001906 PARAMETER Experiment Name: At_Drought_Reproduction_P Parameter: Age (day) Value: 35
  misc_feature: MA Experiment 20001906 PARAMETER Experiment Name: At_Drought_Reproduction_P Parameter: Organism Value: A. thaliana
  misc_feature: MA Experiment 20001906 PARAMETER Experiment Name: At_Drought_Reproduction_P Parameter: Plant Line Value: WS
  misc_feature: MA Experiment 20001906 PARAMETER Experiment Name: At_Drought_Reproduction_P Parameter: Timepoint (day) Value: 5
  misc_feature: MA Experiment 20001906 PARAMETER Experiment Name: At_Drought_Reproduction_P Parameter: Tissue Value: Siliques
  misc_feature: MA Experiment 20001906 PARAMETER Experiment Name: At_Drought_Reproduction_P Parameter: Treatment Value: Drought vs. No Drought
  misc_feature: MA Experiment ID: 20001907 Result: Up-regulated in Transcription
  misc_feature: MA Experiment 20001907 PARAMETER Experiment Name: At_Drought_Reproduction_P Parameter: Age (day) Value: 37
  misc_feature: MA Experiment 20001907 PARAMETER Experiment Name: At_Drought_Reproduction_P Parameter: Organism Value: A. thaliana
  misc_feature: MA Experiment 20001907 PARAMETER Experiment Name: At_Drought_Reproduction_P Parameter: Plant Line Value: WS
  misc_feature: MA Experiment 20001907 PARAMETER Experiment Name: At_Drought_Reproduction_P Parameter: Timepoint (day) Value: 7
  misc_feature: MA Experiment 20001907 PARAMETER Experiment Name: At_Drought_Reproduction_P Parameter: Tissue Value: Siliques
  misc_feature: MA Experiment 20001907 PARAMETER Experiment Name: At_Drought_Reproduction_P Parameter: Treatment Value: Drought vs. No Drought
  misc_feature: MA Experiment ID: 20001908 Result: Up-regulated in Transcription
  misc_feature: MA Experiment 20001908 PARAMETER Experiment Name: At_Drought_Reproduction_P Parameter: Age (day) Value: 40
  misc_feature: MA Experiment 20001908 PARAMETER Experiment Name: At_Drought_Reproduction_P Parameter: Organism Value: A. thaliana
  misc_feature: MA Experiment 20001908 PARAMETER Experiment Name: At_Drought_Reproduction_P Parameter: Plant Line Value: WS
  misc_feature: MA Experiment 20001908 PARAMETER Experiment Name: At_Drought_Reproduction_P Parameter: Timepoint (day) Value: 10
  misc_feature: MA Experiment 20001908 PARAMETER Experiment Name: At_Drought_Reproduction_P Parameter: Tissue Value: Siliques
  misc_feature: MA Experiment 20001908 PARAMETER Experiment Name: At_Drought_Reproduction_P Parameter: Treatment Value: Drought vs. No Drought
gagatcttgattagagagagttcttgcaaaaagtgtctctgtattttgttattaaattcttcaatcttgtttctgtaaatttcggatatttttgaaaacaagcaaagatgtgtagtttggctacaaatctgttactaccatcgaagatgaaaccagtttttccagagaaactgagcactagctcactctgtgccacccctagaagatccaagatgaagaaccgatctattgttcctgttgcaagattgtttggaccggcgatttttgaagcctccaaattgaaagtattattcttaggagttgatgagaagaagcatccagcaaaacttccaagaacttacactcttactcacagtgacataaccgctaaattaactttagctatatctcaatccattaataactctcagttgcaaggatgggcaaataaattgttccgggacgaagtagtgggcgagtggaagaaagtgaaaggtaaaatgtcgcttcatgttcattgccacattagcggaggccacttcctcttgaatctcattgcgaagcttcggtactacatcttttgcaaagaattacctgtggtactggaagcttttgcccatggagatgagtatttgttaaataatcaccccgagctacaagaatctcctgtttgggtttatttccattccaacatcccggagtacaacaaggtcgaatgttggggaccgctttgggaggccatgtcgcagcaccagcacgacggaaggacccacaagaagagtgaaactctaccggagctaccttgtcctgatgattgcaagtgttgctttccgacggttagcacgattccgtggtctcatcgtcattatcaacataccgcagcggatgagaatgttgcggatggcctgttgggaatttctatacctaaccctgggaaatcaaagggatagatctaatgtaaatgtgttttttctttttctttggtggttaggaatgttagaaggagcatgaaaatctatttggtcggtgttaatagggagtgacaattgtataacataagtttcagtattttacaaattccttatatattaacccatccacgtgttatacatgtctttttattgtatg

SEQ ID NO: 29772 - protein, 273 aa, Arabidopsis thaliana
  peptide (1)..(273): Ceres Seq. ID no. 12396807
  misc_feature (52)..(201): Homolog of NCBI NO: 18311568 NR Description: hypothetical protein [Clostridium perfringens]
  misc_feature (52)..(199): Homolog of NCBI NO: 15896657 NR Description: Uncharacterized protein, homolog of YYBI fused to uncharacterized domain similar to A.thaliana (gi:3292817
  misc_feature (45)..(179): Homolog of NCBI NO: 38567838 NR Description: OSJNBb0020J19.16 [Oryza sativa (japonica
  misc_feature (38)..(212): Homolog of NCBI NO: 18401163 NR Description: expressed protein
  misc_feature (38)..(212): Homolog of NCBI NO: 8778672 NR Description: F9C16.20 [Arabidopsis thaliana]
  misc_feature (44)..(257): Homolog of NCBI NO: 15234348 NR Description: putative protein; protein id: At4g11910.1
  misc_feature (1)..(270): Homolog of NCBI NO: 21592527 NR Description: unknown [Arabidopsis thaliana]
  misc_feature (1)..(270): Homolog of NCBI NO: 18416035 NR Description: expressed protein
  misc_feature (1)..(240): Homolog of NCBI NO: 15234348 NR Description: putative protein; protein id: At4g11910.1
MCSLATNLLLPSKMKPVFPEKLSTSSLCATPRRSKMKNRSIVPVARLFGPAIFEASKLKVLFLGVDEKKHPAKLPRTYTLTHSDITAKLTLAISQSINNSQLQGWANKLFRDEVVGEWKKVKGKMSLHVHCHISGGHFLLNLIAKLRYYIFCKELPVVLEAFAHGDEYLLNNHPELQESPVWVYFHSNIPEYNKVECWGPLWEAMSQHQHDGRTHKKSETLPELPCPDDCKCCFPTVSTIPWSHRHYQHTAADENVADGLLGISIPNPGKSKG

SEQ ID NO: 29773 - protein, 260 aa, Arabidopsis thaliana
  peptide (1)..(260): Ceres Seq. ID no. 12396808
  misc_feature (39)..(188): Homolog of NCBI NO: 18311568 NR Description: hypothetical protein [Clostridium perfringens]
  misc_feature (39)..(186): Homolog of NCBI NO: 15896657 NR Description: Uncharacterized protein, homolog of YYBI fused to uncharacterized domain similar to A.thaliana (gi:3292817
  misc_feature (32)..(166): Homolog of NCBI NO: 38567838 NR Description: OSJNBb0020J19.16 [Oryza sativa (japonica
  misc_feature (25)..(199): Homolog of NCBI NO: 18401163 NR Description: expressed protein
  misc_feature (25)..(199): Homolog of NCBI NO: 8778672 NR Description: F9C16.20 [Arabidopsis thaliana]
  misc_feature (31)..(244): Homolog of NCBI NO: 15234348 NR Description: putative protein; protein id: At4g11910.1
  misc_feature (1)..(257): Homolog of NCBI NO: 21592527 NR Description: unknown [Arabidopsis thaliana]
  misc_feature (1)..(257): Homolog of NCBI NO: 18416035 NR Description: expressed protein
  misc_feature (1)..(227): Homolog of NCBI NO: 15234348 NR Description: putative protein; protein id: At4g11910.1
MKPVFPEKLSTSSLCATPRRSKMKNRSIVPVARLFGPAIFEASKLKVLFLGVDEKKHPAKLPRTYTLTHSDITAKLTLAISQSINNSQLQGWANKLFRDEVVGEWKKVKGKMSLHVHCHISGGHFLLNLIAKLRYYIFCKELPVVLEAFAHGDEYLLNNHPELQESPVWVYFHSNIPEYNKVECWGPLWEAMSQHQHDGRTHKKSETLPELPCPDDCKCCFPTVSTIPWSHRHYQHTAADENVADGLLGISIPNPGKSKG

SEQ ID NO: 29774 - protein, 238 aa, Arabidopsis thaliana
  peptide (1)..(238): Ceres Seq. ID no. 12396809
  misc_feature (17)..(166): Homolog of NCBI NO: 18311568 NR Description: hypothetical protein [Clostridium perfringens]
  misc_feature (17)..(164): Homolog of NCBI NO: 15896657 NR Description: Uncharacterized protein, homolog of YYBI fused to uncharacterized domain similar to A.thaliana (gi:3292817
  misc_feature (10)..(144): Homolog of NCBI NO: 38567838 NR Description: OSJNBb0020J19.16 [Oryza sativa (japonica
  misc_feature (3)..(177): Homolog of NCBI NO: 18401163 NR Description: expressed protein
  misc_feature (3)..(177): Homolog of NCBI NO: 8778672 NR Description: F9C16.20 [Arabidopsis thaliana]
  misc_feature (9)..(222): Homolog of NCBI NO: 15234348 NR Description: putative protein; protein id: At4g11910.1
  misc_feature (1)..(235): Homolog of NCBI NO: 21592527 NR Description: unknown [Arabidopsis thaliana]
  misc_feature (1)..(235): Homolog of NCBI NO: 18416035 NR Description: expressed protein
  misc_feature (1)..(205): Homolog of NCBI NO: 15234348 NR Description: putative protein; protein id: At4g11910.1
MKNRSIVPVARLFGPAIFEASKLKVLFLGVDEKKHPAKLPRTYTLTHSDITAKLTLAISQSINNSQLQGWANKLFRDEVVGEWKKVKGKMSLHVHCHISGGHFLLNLIAKLRYYIFCKELPVVLEAFAHGDEYLLNNHPELQESPVWVYFHSNIPEYNKVECWGPLWEAMSQHQHDGRTHKKSETLPELPCPDDCKCCFPTVSTIPWSHRHYQHTAADENVADGLLGISIPNPGKSKG

SEQ ID NO: 29775 - DNA, 1016 bp, Arabidopsis thaliana
  misc_feature (1)..(1016): Ceres Seq. ID no. 12321335
  misc_feature: MA Experiment ID: 108434 Result: Down-regulated in Transcription
  misc_feature: MA Experiment 108434 PARAMETER Experiment Name: At_Root_Tips_cDNA_P Parameter: Tissue Value: Root Tips
  misc_feature: MA Experiment ID: 108573 Result: Up-regulated in Transcription
  misc_feature: MA Experiment 108573 PARAMETER Experiment Name: At_Drought_cDNA_P Parameter: Timepoint (hr) Value: 6
  misc_feature: MA Experiment 108573 PARAMETER Experiment Name: At_Drought_cDNA_P Parameter: Tissue Value: Aerial
  misc_feature: MA Experiment 108573 PARAMETER Experiment Name: At_Drought_cDNA_P Parameter: Treatment Value: Drought vs. No Drought
  misc_feature: MA Experiment ID: 108585 Result: Up-regulated in Transcription
  misc_feature: MA Experiment 108585 PARAMETER Experiment Name: At_5mM_NaNP_cDNA_P Parameter: Timepoint (hr) Value: 6
  misc_feature: MA Experiment 108585 PARAMETER Experiment Name: At_5mM_NaNP_cDNA_P Parameter: Tissue Value: Aerial
  misc_feature: MA Experiment 108585 PARAMETER Experiment Name: At_5mM_NaNP_cDNA_P Parameter: Treatment Value: null
  misc_feature: MA Experiment ID: 108668 Result: Up-regulated in Transcription
  misc_feature: MA Experiment 108668 PARAMETER Experiment Name: At_2mM_SA_cDNA_P Parameter: Plant Line Value: WS
  misc_feature: MA Experiment 108668 PARAMETER Experiment Name: At_2mM_SA_cDNA_P Parameter: Timepoint (hr) Value: 6
  misc_feature: MA Experiment 108668 PARAMETER Experiment Name: At_2mM_SA_cDNA_P Parameter: Treatment Value: 2mM SA vs. No Treatment
  misc_feature: MA Experiment ID: 20000224 Result: Down-regulated in Transcription
aattttttcccagaatcaaccagatctgctttcgaagacgaatctagctattagccatggacaaaccgtacggatacgcgagcgtgagcatgagcggcatagatcgttccgccggaaaggatattgatcttgagatgggagtcggagaagcgacgctttatcctgggctaagttacggcgagaatcagctccgatggggatttattcgtaaggtctatgggattctctcagctcagcttcttcttacgacgcttatctccgccgtcgttgttcttaatcctcctgttaacgatctcttgaccggatctcctgggattcttctcttcctctgcatcgttcccttcatcttaatctggcctctgcacatttaccaccagaagcatcctgttaacctgatcctccttgccctcttcactgtttcattgagtttcactgttggtgtcagttgtgctatgacagaaggacgaattgtgctacaagccttgatattgactctgtctgtggtcggatctctaaccgcatacactttctgggctgcaaagaagggaaaagacttcagcttccttggacccattctcttcaccagcctcatcattcttgtagtgaccagcttcatccagatgttcttccctcttggcccgacttctgttgccgtatacggaggattcagtgccttggtattctgcggatacatagtctatgataccgacaacctcatcaagcgtttcacatatgacgaatacatcctagcatcagtagctctctacttggacatcctcaatctcttcttgaccatattgcgtatactgaggcaaggcgacaactgaaaggcataaaacgatgcttcagtgatgtgatccagtttataactataagagaatccaaaagcctttatgtgtgtatatctgatttctgtttggagaattaagtatatgatgctatgtggttaaacgattgatataaacaaaatcaagcaatgtcgattttcaacttcaaataaatttgttaattttggc

SEQ ID NO: 29776 - protein, 256 aa, Arabidopsis thaliana
  peptide (1)..(256): Ceres Seq. ID no. 12321336
  misc_feature (42)..(255): Pfam Name: Uncharacterised protein family UPF0005 Pfam Description: Uncharacterised protein family UPF0005
  misc_feature (21)..(252): Homolog of NCBI NO: 15235466 NR Description: putative glutamate-/aspartate-binding peptide
  misc_feature (24)..(256): Homolog of NCBI NO: 15229411 NR Description: putative protein; protein id: At3g63310.1
  misc_feature (21)..(255): Homolog of NCBI NO: 15218701 NR Description: putative glutamate/aspartate-binding peptide
  misc_feature (34)..(256): Homolog of NCBI NO: 14626300 NR Description: putative receptor-associated protein
  misc_feature (96)..(209): Homolog of NCBI NO: 7485070 NR Description: hypothetical protein - Arabidopsis thaliana
  misc_feature (20)..(255): Homolog of NCBI NO: 34393841 NR Description: putative z-protein [Oryza sativa (japonica
  misc_feature (118)..(207): Homolog of NCBI NO: 7485070 NR Description: hypothetical protein - Arabidopsis thaliana
  misc_feature (1)..(99): Homolog of NCBI NO: 7485070 NR Description: hypothetical protein - Arabidopsis thaliana
  misc_feature (1)..(216): Homolog of NCBI NO: 15810201 NR Description: AT4g15470/dl3775w [Arabidopsis thaliana]
  misc_feature (1)..(256): Homolog of NCBI NO: 18414455 NR Description: Expressed protein
MDKPYGYASVSMSGIDRSAGKDIDLEMGVGEATLYPGLSYGENQLRWGFIRKVYGILSAQLLLTTLISAVVVLNPPVNDLLTGSPGILLFLCIVPFILIWPLHIYHQKHPVNLILLALFTVSLSFTVGVSCAMTEGRIVLQALILTLSVVGSLTAYTFWAAKKGKDFSFLGPILFTSLIILVVTSFIQMFFPLGPTSVAVYGGFSALVFCGYIVYDTDNLIKRFTYDEYILASVALYLDILNLFLTILRILRQGDN

SEQ ID NO: 29777 - protein, 245 aa, Arabidopsis thaliana
  peptide (1)..(245): Ceres Seq. ID no. 12321337
  misc_feature (31)..(244): Pfam Name: Uncharacterised protein family UPF0005 Pfam Description: Uncharacterised protein family UPF0005
  misc_feature (10)..(241): Homolog of NCBI NO: 15235466 NR Description: putative glutamate-/aspartate-binding peptide
  misc_feature (13)..(245): Homolog of NCBI NO: 15229411 NR Description: putative protein; protein id: At3g63310.1
  misc_feature (10)..(244): Homolog of NCBI NO: 15218701 NR Description: putative glutamate/aspartate-binding peptide
  misc_feature (23)..(245): Homolog of NCBI NO: 14626300 NR Description: putative receptor-associated protein
  misc_feature (85)..(198): Homolog of NCBI NO: 7485070 NR Description: hypothetical protein - Arabidopsis thaliana
  misc_feature (9)..(244): Homolog of NCBI NO: 34393841 NR Description: putative z-protein [Oryza sativa (japonica
  misc_feature (107)..(196): Homolog of NCBI NO: 7485070 NR Description: hypothetical protein - Arabidopsis thaliana
  misc_feature (1)..(88): Homolog of NCBI NO: 7485070 NR Description: hypothetical protein - Arabidopsis thaliana
  misc_feature (1)..(205): Homolog of NCBI NO: 15810201 NR Description: AT4g15470/dl3775w [Arabidopsis thaliana]
  misc_feature (1)..(245): Homolog of NCBI NO: 18414455 NR Description: Expressed protein
MSGIDRSAGKDIDLEMGVGEATLYPGLSYGENQLRWGFIRKVYGILSAQLLLTTLISAVVVLNPPVNDLLTGSPGILLFLCIVPFILIWPLHIYHQKHPVNLILLALFTVSLSFTVGVSCAMTEGRIVLQALILTLSVVGSLTAYTFWAAKKGKDFSFLGPILFTSLIILVVTSFIQMFFPLGPTSVAVYGGFSALVFCGYIVYDTDNLIKRFTYDEYILASVALYLDILNLFLTILRILRQGDN

SEQ ID NO: 29778 - protein, 230 aa, Arabidopsis thaliana
  peptide (1)..(230): Ceres Seq. ID no. 12321338
  misc_feature (16)..(229): Pfam Name: Uncharacterised protein family UPF0005 Pfam Description: Uncharacterised protein family UPF0005
  misc_feature (1)..(226): Homolog of NCBI NO: 15235466 NR Description: putative glutamate-/aspartate-binding peptide
  misc_feature (1)..(230): Homolog of NCBI NO: 15229411 NR Description: putative protein; protein id: At3g63310.1
  misc_feature (1)..(229): Homolog of NCBI NO: 15218701 NR Description: putative glutamate/aspartate-binding peptide
  misc_feature (8)..(230): Homolog of NCBI NO: 14626300 NR Description: putative receptor-associated protein
  misc_feature (70)..(183): Homolog of NCBI NO: 7485070 NR Description: hypothetical protein - Arabidopsis thaliana
  misc_feature (1)..(229): Homolog of NCBI NO: 34393841 NR Description: putative z-protein [Oryza sativa (japonica
  misc_feature (92)..(181): Homolog of NCBI NO: 7485070 NR Description: hypothetical protein - Arabidopsis thaliana
  misc_feature (1)..(73): Homolog of NCBI NO: 7485070 NR Description: hypothetical protein - Arabidopsis thaliana
  misc_feature (1)..(190): Homolog of NCBI NO: 15810201 NR Description: AT4g15470/dl3775w [Arabidopsis thaliana]
  misc_feature (1)..(230): Homolog of NCBI NO: 18414455 NR Description: Expressed protein
MGVGEATLYPGLSYGENQLRWGFIRKVYGILSAQLLLTTLISAVVVLNPPVNDLLTGSPGILLFLCIVPFILIWPLHIYHQKHPVNLILLALFTVSLSFTVGVSCAMTEGRIVLQALILTLSVVGSLTAYTFWAAKKGKDFSFLGPILFTSLIILVVTSFIQMFFPLGPTSVAVYGGFSALVFCGYIVYDTDNLIKRFTYDEYILASVALYLDILNLFLTILRILRQGDN

SEQ ID NO: 29779 - DNA, 1957 bp, Arabidopsis thaliana
  misc_feature (1)..(1957): Ceres Seq. ID no. 12396656
  misc_feature: MA Experiment ID: 108433 Result: Down-regulated in Transcription
  misc_feature: MA Experiment 108433 PARAMETER Experiment Name: At_rhl_Mutant2_cDNA_P Parameter: Age (day) Value: 7
  misc_feature: MA Experiment 108433 PARAMETER Experiment Name: At_rhl_Mutant2_cDNA_P Parameter: Organism Value: A. thaliana
  misc_feature: MA Experiment 108433 PARAMETER Experiment Name: At_rhl_Mutant2_cDNA_P Parameter: Plant Line Value: rhl Mutant vs. wt landsburg
  misc_feature: MA Experiment 108433 PARAMETER Experiment Name: At_rhl_Mutant2_cDNA_P Parameter: Tissue Value: Roots
  misc_feature: MA Experiment ID: 108434 Result: Up-regulated in Transcription
  misc_feature: MA Experiment 108434 PARAMETER Experiment Name: At_Root_Tips_cDNA_P Parameter: Tissue Value: Root Tips
  misc_feature: MA Experiment ID: 108435 Result: Up-regulated in Transcription
  misc_feature: MA Experiment 108435 PARAMETER Experiment Name: At_stm_Mutants_cDNA_P Parameter: Plant Line Value: wt Landsburg vs stm
  misc_feature: MA Experiment 108435 PARAMETER Experiment Name: At_stm_Mutants_cDNA_P Parameter: Tissue Value: Shoot Apical Meristem Region
  misc_feature: MA Experiment ID: 108461 Result: Down-regulated in Transcription
  misc_feature: MA Experiment 108461 PARAMETER Experiment Name: At_Germinating_Seeds_cDNA_P Parameter: Age (day) Value: 1 vs. 0
  misc_feature: MA Experiment 108461 PARAMETER Experiment Name: At_Germinating_Seeds_cDNA_P Parameter: Tissue Value: Germinating Seeds
  misc_feature: MA Experiment ID: 108462 Result: Down-regulated in Transcription
  misc_feature: MA Experiment 108462 PARAMETER Experiment Name: At_Germinating_Seeds_cDNA_P Parameter: Age (day) Value: 2 vs. 0
  misc_feature: MA Experiment 108462 PARAMETER Experiment Name: At_Germinating_Seeds_cDNA_P Parameter: Tissue Value: Germinating Seeds
  misc_feature: MA Experiment ID: 108463 Result: Down-regulated in Transcription
  misc_feature: MA Experiment 108463 PARAMETER Experiment Name: At_Germinating_Seeds_cDNA_P Parameter: Age (day) Value: 3 vs. 0
  misc_feature: MA Experiment 108463 PARAMETER Experiment Name: At_Germinating_Seeds_cDNA_P Parameter: Tissue Value: Germinating Seeds
  misc_feature: MA Experiment ID: 108464 Result: Down-regulated in Transcription
  misc_feature: MA Experiment 108464 PARAMETER Experiment Name: At_Germinating_Seeds_cDNA_P Parameter: Age (day) Value: 4 vs. 0
  misc_feature: MA Experiment 108464 PARAMETER Experiment Name: At_Germinating_Seeds_cDNA_P Parameter: Tissue Value: Germinating Seeds
  misc_feature: MA Experiment ID: 108573 Result: Down-regulated in Transcription
  misc_feature: MA Experiment 108573 PARAMETER Experiment Name: At_Drought_cDNA_P Parameter: Timepoint (hr) Value: 6
  misc_feature: MA Experiment 108573 PARAMETER Experiment Name: At_Drought_cDNA_P Parameter: Tissue Value: Aerial
  misc_feature: MA Experiment 108573 PARAMETER Experiment Name: At_Drought_cDNA_P Parameter: Treatment Value: Drought vs. No Drought
  misc_feature: MA Experiment ID: 20000169 Result: Down-regulated in Transcription
  misc_feature: MA Experiment 20000169 PARAMETER Experiment Name: At_100uM_ABA_P Parameter: Age (day) Value: 14
  misc_feature: MA Experiment 20000169 PARAMETER Experiment Name: At_100uM_ABA_P Parameter: Organism Value: A. thaliana
  misc_feature: MA Experiment 20000169 PARAMETER Experiment Name: At_100uM_ABA_P Parameter: Plant Line Value: WS
  misc_feature: MA Experiment 20000169 PARAMETER Experiment Name: At_100uM_ABA_P Parameter: Timepoint (hr) Value: 6
  misc_feature: MA Experiment 20000169 PARAMETER Experiment Name: At_100uM_ABA_P Parameter: Tissue Value: Aerial
  misc_feature: MA Experiment 20000169 PARAMETER Experiment Name: At_100uM_ABA_P Parameter: Treatment Value: 100uM ABA vs. No Treatment
  misc_feature: MA Experiment ID: 20000180 Result: Down-regulated in Transcription
  misc_feature: MA Experiment 20000180 PARAMETER Experiment Name: At_Germinating_Seeds_P Parameter: Age (hr) Value: 24 vs. 0
  misc_feature: MA Experiment 20000180 PARAMETER Experiment Name: At_Germinating_Seeds_P Parameter: Tissue Value: Germinating Seeds
  misc_feature: MA Experiment ID: 20000227 Result: Up-regulated in Transcription
  misc_feature: MA Experiment 20000227 PARAMETER Experiment Name: At_Root-Tips-vs-Tops_P Parameter: Tissue Value: Root Tips vs. Root Tops
  misc_feature: MA Experiment ID: 20000234 Result: Up-regulated in Transcription
  misc_feature: MA Experiment 20000234 PARAMETER Experiment Name: At_Siliques_P Parameter: Age (day) Value: 21
  misc_feature: MA Experiment 20000234 PARAMETER Experiment Name: At_Siliques_P Parameter: Organism Value: A. thaliana
  misc_feature: MA Experiment 20000234 PARAMETER Experiment Name: At_Siliques_P Parameter: Plant Line Value: WS
  misc_feature: MA Experiment 20000234 PARAMETER Experiment Name: At_Siliques_P Parameter: Tissue Value: Less Than 5mm Siliques vs. Whole Plant
  misc_feature: MA Experiment ID: 20000264 Result: Up-regulated in Transcription
  misc_feature: MA Experiment 20000264 PARAMETER Experiment Name: At_Open_Flower_P Parameter: Age (day) Value: 21
  misc_feature: MA Experiment 20000264 PARAMETER Experiment Name: At_Open_Flower_P Parameter: Plant Line Value: WS
  misc_feature: MA Experiment 20000264 PARAMETER Experiment Name: At_Open_Flower_P Parameter: Tissue Value: Open Flower vs. Whole Plant
  misc_feature: MA Experiment ID: 20000286 Result: Up-regulated in Transcription
  misc_feature: MA Experiment 20000286 PARAMETER Experiment Name: At_Open_Flower_P Parameter: Age (day) Value: 21
  misc_feature: MA Experiment 20000286 PARAMETER Experiment Name: At_Open_Flower_P Parameter: Plant Line Value: WS
  misc_feature: MA Experiment 20000286 PARAMETER Experiment Name: At_Open_Flower_P Parameter: Tissue Value: Half Open vs. Whole Plant
  misc_feature: MA Experiment ID: 20001458 Result: Up-regulated in Transcription
  misc_feature: MA Experiment 20001458 PARAMETER Experiment Name: At_50mM_NH4NO3_L-to-H_P Parameter: Age (day) Value: Undefined
  misc_feature: MA Experiment 20001458 PARAMETER Experiment Name: At_50mM_NH4NO3_L-to-H_P Parameter: Organism Value: Undefined
  misc_feature: MA Experiment 20001458 PARAMETER Experiment Name: At_50mM_NH4NO3_L-to-H_P Parameter: Plant Line Value: Undefined
  misc_feature: MA Experiment 20001458 PARAMETER Experiment Name: At_50mM_NH4NO3_L-to-H_P Parameter: Timepoint (hr) Value: 2
  misc_feature: MA Experiment 20001458 PARAMETER Experiment Name: At_50mM_NH4NO3_L-to-H_P Parameter: Tissue Value: Siliques
  misc_feature: MA Experiment 20001458 PARAMETER Experiment Name: At_50mM_NH4NO3_L-to-H_P Parameter: Treatment Value: 50mM NH4NO3 vs. 100mM Manitol
  misc_feature: MA Experiment ID: 20001556 Result: Up-regulated in Transcription
  misc_feature: MA Experiment 20001556 PARAMETER Experiment Name: At_Drought_Soil_Dry_P Parameter: Age (day) Value: 26
  misc_feature: MA Experiment 20001556 PARAMETER Experiment Name: At_Drought_Soil_Dry_P Parameter: Organism Value: A. thaliana
  misc_feature: MA Experiment 20001556 PARAMETER Experiment Name: At_Drought_Soil_Dry_P Parameter: Plant Line Value: WS
  misc_feature: MA Experiment 20001556 PARAMETER Experiment Name: At_Drought_Soil_Dry_P Parameter: Post Timepoint (hr) Value: None
  misc_feature: MA Experiment 20001556 PARAMETER Experiment Name: At_Drought_Soil_Dry_P Parameter: Post-Treatment Value: None
  misc_feature: MA Experiment 20001556 PARAMETER Experiment Name: At_Drought_Soil_Dry_P Parameter: Timepoint (day) Value: 12
  misc_feature: MA Experiment 20001556 PARAMETER Experiment Name: At_Drought_Soil_Dry_P Parameter: Treatment Value: Drought vs. No Drought
  misc_feature: MA Experiment ID: 20001557 Result: Up-regulated in Transcription
  misc_feature: MA Experiment 20001557 PARAMETER Experiment Name: At_Drought_Soil_Dry_P Parameter: Age (day) Value: 27
  misc_feature: MA Experiment 20001557 PARAMETER Experiment Name: At_Drought_Soil_Dry_P Parameter: Organism Value: A. thaliana
  misc_feature: MA Experiment 20001557 PARAMETER Experiment Name: At_Drought_Soil_Dry_P Parameter: Plant Line Value: WS
  misc_feature: MA Experiment 20001557 PARAMETER Experiment Name: At_Drought_Soil_Dry_P Parameter: Post Timepoint (hr) Value: 3
  misc_feature: MA Experiment 20001557 PARAMETER Experiment Name: At_Drought_Soil_Dry_P Parameter: Post-Treatment Value: Re-Water vs. No Drought
  misc_feature: MA Experiment 20001557 PARAMETER Experiment Name: At_Drought_Soil_Dry_P Parameter: Timepoint (day) Value: 13
  misc_feature: MA Experiment 20001557 PARAMETER Experiment Name: At_Drought_Soil_Dry_P Parameter: Treatment Value: Drought vs. No Drought
  misc_feature: MA Experiment ID: 20001558 Result: Up-regulated in Transcription
  misc_feature: MA Experiment 20001558 PARAMETER Experiment Name: At_Drought_Soil_Dry_P Parameter: Age (day) Value: 27
  misc_feature: MA Experiment 20001558 PARAMETER Experiment Name: At_Drought_Soil_Dry_P Parameter: Organism Value: A. thaliana
  misc_feature: MA Experiment 20001558 PARAMETER Experiment Name: At_Drought_Soil_Dry_P Parameter: Plant Line Value: WS
  misc_feature: MA Experiment 20001558 PARAMETER Experiment Name: At_Drought_Soil_Dry_P Parameter: Post Timepoint (hr) Value: 6
  misc_feature: MA Experiment 20001558 PARAMETER Experiment Name: At_Drought_Soil_Dry_P Parameter: Post-Treatment Value: Re-Water vs. No Drought
  misc_feature: MA Experiment 20001558 PARAMETER Experiment Name: At_Drought_Soil_Dry_P Parameter: Timepoint (day) Value: 13
  misc_feature: MA Experiment 20001558 PARAMETER Experiment Name: At_Drought_Soil_Dry_P Parameter: Treatment Value: Drought vs. No Drought
  misc_feature: MA Experiment ID: 20001560 Result: Up-regulated in Transcription
  misc_feature: MA Experiment 20001560 PARAMETER Experiment Name: At_Drought_Soil_Dry_P Parameter: Age (day) Value: 28
  misc_feature: MA Experiment 20001560 PARAMETER Experiment Name: At_Drought_Soil_Dry_P Parameter: Organism Value: A. thaliana
  misc_feature: MA Experiment 20001560 PARAMETER Experiment Name: At_Drought_Soil_Dry_P Parameter: Plant Line Value: WS
  misc_feature: MA Experiment 20001560 PARAMETER Experiment Name: At_Drought_Soil_Dry_P Parameter: Post Timepoint (hr) Value: None
  misc_feature: MA Experiment 20001560 PARAMETER Experiment Name: At_Drought_Soil_Dry_P Parameter: Post-Treatment Value: None
  misc_feature: MA Experiment 20001560 PARAMETER Experiment Name: At_Drought_Soil_Dry_P Parameter: Timepoint (day) Value: 14
  misc_feature: MA Experiment 20001560 PARAMETER Experiment Name: At_Drought_Soil_Dry_P Parameter: Treatment Value: Drought vs. No Drought
  misc_feature: MA Experiment ID: 20001757 Result: Up-regulated in Transcription
  misc_feature: MA Experiment 20001757 PARAMETER Experiment Name: At_50mM_NH4NO3_L-to-H_P Parameter: Timepoint (hr) Value: 6
  misc_feature: MA Experiment 20001757 PARAMETER Experiment Name: At_50mM_NH4NO3_L-to-H_P Parameter: Tissue Value: Leaf
  misc_feature: MA Experiment 20001757 PARAMETER Experiment Name: At_50mM_NH4NO3_L-to-H_P Parameter: Treatment Value: 50mM NH4NO3 vs 100mM Mannitol
attgaggtttctcttgtccctgttcctcttctaaaacctaaccgccgtttaaaccaccttcggcaccgccattgatatactctactgttttcgtcaaatcgaaggaaccctaatttcgagggcactgaggaagctcaatcaatggcgacggtaaaggattcggggtttgaagcccttgagaagcttaaggcaacagagccaccagtttttctagcgccaagttcaatatctgaggatgctcgctctgcatctcagtatctattcatgaagttgaagccgcataaccctaaatgtccatttgatcagctctcttctgatgggtttgatgcggagcagatttggcagcaaattgatatgcaatctcaacctttgttgactagcttgcggcaggaagtcaagagatttgctaaaaaccctgaagagattcgtaaacttgggaagttggcccttaaggtttctcatgaagatgatgttgatgagatggatatggatggttgtgactcggatgatgttgatgatgaggataaagagatagaatctaatgacagcgaaggagaagatgaagaggaagaggaagaggacgaggaagaagaagaggaggaagaggaggaggaggaggaggaggaggaggagaaggatggagacaatgaaggaatagaggataagttcttcaagataaaagaattggaggaatttttagaggaaggtgaagcagaagagtatgggatagaccacaaaaacaaaaaaggagtggcacagagaaagaagcaaaatttgagcgatgatgaagacaaagaagatgatgatgatgaagaagaagatgttgagtttgatgcttttgctggtggtgacgacgaagagacagataaattaggaaaagcaaggtatgatgatttctttggtggcaaaaaggagacaaaaatgaagttgaaagatttgagtgaagatgaggaagctgaaatagaaaacaaaggcaatgaaaaactctctacccatgagagagcacgactaaagcttcaatccaagattgaacagatggagaaagcaaacttggacccaaaacattggacaatgcagggagagataactgcggcaaagaggccaatgaacagtgctctagaagttgatttagattttgagcacaatgccaggcctgctcctgtaatcacagaagaagtcacagcctcacttgaagatttgatcaagagcagaatcattgaggctcgtttcgatgatgttcaacgagcacctcgtctacccactaaaggaaaaagagaagccaaggaattggacgaaagcaaaagcaagaaaggtcttgccgaagtttacgaggcagaatactttcagaaggctaatccagcttttgccccaacaactcactctgatgaactaaagaaagaggcaagcatgttgttcaagaaactatgcctgaagttggatgctctctcccacttccacttcacacctaaaccagtgattgaagaaatgtctataccaaacgtttcagccatagcaatggaagaggttgcgcccgtggcagtctcagattcagcaatgcttgccccagaggaaatcttttccgggaaaggtgacattaaggatgagtctgagctcacacaggaagatagaaagaggaggagagcgaataagaagagaaagtttaaggctgaatctgcaaatgaaccgcctagaaaggcgctggatacaagtaccaagaacccttaaactgttacatgttgaagaaaggagagagttacagaggcaaattcaagatgataagatctcggtcaagagcattgctacacagacagcttgaagattagataaaacaacagttttgaatgagagaaatatttaaactttgtctttcacaaatttgaattttattgtatttttttctctttgtatgagtagttccattttccttgtatcgatagaaaaattccaaagaaatctt

SEQ ID NO: 29780 - protein, 527 aa, Arabidopsis thaliana
  peptide (1)..(527): Ceres Seq. ID no. 12396657
  misc_feature (11)..(526): Pfam Name: Mpp10 protein Pfam Description: Mpp10 protein
  misc_feature (109)..(526): Homolog of NCBI NO: 19114546 NR Description: putative component of the U3 small nucleolar
  misc_feature (55)..(280): Homolog of NCBI NO: 40740848 NR Description: hypothetical protein AN4298.2 [Aspergillus
  misc_feature (264)..(495): Homolog of NCBI NO: 40740848 NR Description: hypothetical protein AN4298.2 [Aspergillus
  misc_feature (124)..(514): Homolog of NCBI NO: 19920954 NR Description: CG13097-PA [Drosophila melanogaster]
  misc_feature (83)..(527): Homolog of NCBI NO: 6322461 NR Description: part of small (ribosomal) subunit (SSU)
  misc_feature (129)..(525): Homolog of NCBI NO: 28175284 NR Description: Unknown (protein for IMAGE:5543289) [Xenopus
  misc_feature (124)..(527): Homolog of NCBI NO: 34856326 NR Description: similar to U3 small nucleolar ribonucleoprotein
  misc_feature (127)..(524): Homolog of NCBI NO: 2230873 NR Description: M phase phosphoprotein 10 [Homo sapiens]
  misc_feature (124)..(527): Homolog of NCBI NO: 29351667 NR Description: similar to U3 small nucleolar ribonucleoprotein
  misc_feature (1)..(527): Homolog of NCBI NO: 18425086 NR Description: expressed protein
MATVKDSGFEALEKLKATEPPVFLAPSSISEDARSASQYLFMKLKPHNPKCPFDQLSSDGFDAEQIWQQIDMQSQPLLTSLRQEVKRFAKNPEEIRKLGKLALKVSHEDDVDEMDMDGCDSDDVDDEDKEIESNDSEGEDEEEEEEDEEEEEEEEEEEEEEEEEKDGDNEGIEDKFFKIKELEEFLEEGEAEEYGIDHKNKKGVAQRKKQNLSDDEDKEDDDDEEEDVEFDAFAGGDDEETDKLGKARYDDFFGGKKETKMKLKDLSEDEEAEIENKGNEKLSTHERARLKLQSKIEQMEKANLDPKHWTMQGEITAAKRPMNSALEVDLDFEHNARPAPVITEEVTASLEDLIKSRIIEARFDDVQRAPRLPTKGKREAKELDESKSKKGLAEVYEAEYFQKANPAFAPTTHSDELKKEASMLFKKLCLKLDALSHFHFTPKPVIEEMSIPNVSAIAMEEVAPVAVSDSAMLAPEEIFSGKGDIKDESELTQEDRKRRRANKKRKFKAESANEPPRKALDTSTKNP

SEQ ID NO: 29781 - protein, 486 aa, Arabidopsis thaliana
  peptide (1)..(486): Ceres Seq. ID no. 12396658
  misc_feature (1)..(485): Pfam Name: Mpp10 protein Pfam Description: Mpp10 protein
  misc_feature (68)..(485): Homolog of NCBI NO: 19114546 NR Description: putative component of the U3 small nucleolar
  misc_feature (14)..(239): Homolog of NCBI NO: 40740848 NR Description: hypothetical protein AN4298.2 [Aspergillus
  misc_feature (223)..(454): Homolog of NCBI NO: 40740848 NR Description: hypothetical protein AN4298.2 [Aspergillus
  misc_feature (83)..(473): Homolog of NCBI NO: 19920954 NR Description: CG13097-PA [Drosophila melanogaster]
  misc_feature (42)..(486): Homolog of NCBI NO: 6322461 NR Description: part of small (ribosomal) subunit (SSU)
  misc_feature (88)..(484): Homolog of NCBI NO: 28175284 NR Description: Unknown (protein for IMAGE:5543289) [Xenopus
  misc_feature (83)..(486): Homolog of NCBI NO: 34856326 NR Description: similar to U3 small nucleolar ribonucleoprotein
  misc_feature (86)..(483): Homolog of NCBI NO: 2230873 NR Description: M phase phosphoprotein 10 [Homo sapiens]
  misc_feature (83)..(486): Homolog of NCBI NO: 29351667 NR Description: similar to U3 small nucleolar ribonucleoprotein
  misc_feature (1)..(486): Homolog of NCBI NO: 18425086 NR Description: expressed protein
MKLKPHNPKCPFDQLSSDGFDAEQIWQQIDMQSQPLLTSLRQEVKRFAKNPEEIRKLGKLALKVSHEDDVDEMDMDGCDSDDVDDEDKEIESNDSEGEDEEEEEEDEEEEEEEEEEEEEEEEEKDGDNEGIEDKFFKIKELEEFLEEGEAEEYGIDHKNKKGVAQRKKQNLSDDEDKEDDDDEEEDVEFDAFAGGDDEETDKLGKARYDDFFGGKKETKMKLKDLSEDEEAEIENKGNEKLSTHERARLKLQSKIEQMEKANLDPKHWTMQGEITAAKRPMNSALEVDLDFEHNARPAPVITEEVTASLEDLIKSRIIEARFDDVQRAPRLPTKGKREAKELDESKSKKGLAEVYEAEYFQKANPAFAPTTHSDELKKEASMLFKKLCLKLDALSHFHFTPKPVIEEMSIPNVSAIAMEEVAPVAVSDSAMLAPEEIFSGKGDIKDESELTQEDRKRRRANKKRKFKAESANEPPRKALDTSTKNP

SEQ ID NO: 29782 - protein, 456 aa, Arabidopsis thaliana
  peptide (1)..(456): Ceres Seq. ID no. 12396659
  misc_feature (1)..(455): Pfam Name: Mpp10 protein Pfam Description: Mpp10 protein
  misc_feature (38)..(455): Homolog of NCBI NO: 19114546 NR Description: putative component of the U3 small nucleolar
  misc_feature (1)..(209): Homolog of NCBI NO: 40740848 NR Description: hypothetical protein AN4298.2 [Aspergillus
  misc_feature (193)..(424): Homolog of NCBI NO: 40740848 NR Description: hypothetical protein AN4298.2 [Aspergillus
  misc_feature (53)..(443): Homolog of NCBI NO: 19920954 NR Description: CG13097-PA [Drosophila melanogaster]
  misc_feature (12)..(456): Homolog of NCBI NO: 6322461 NR Description: part of small (ribosomal) subunit (SSU)
  misc_feature (58)..(454): Homolog of NCBI NO: 28175284 NR Description: Unknown (protein for IMAGE:5543289) [Xenopus
  misc_feature (53)..(456): Homolog of NCBI NO: 34856326 NR Description: similar to U3 small nucleolar ribonucleoprotein
  misc_feature (56)..(453): Homolog of NCBI NO: 2230873 NR Description: M phase phosphoprotein 10 [Homo sapiens]
  misc_feature (53)..(456): Homolog of NCBI NO: 29351667 NR Description: similar to U3 small nucleolar ribonucleoprotein
  misc_feature (1)..(456): Homolog of NCBI NO: 18425086 NR Description: expressed protein
MQSQPLLTSLRQEVKRFAKNPEEIRKLGKLALKVSHEDDVDEMDMDGCDSDDVDDEDKEIESNDSEGEDEEEEEEDEEEEEEEEEEEEEEEEEKDGDNEGIEDKFFKIKELEEFLEEGEAEEYGIDHKNKKGVAQRKKQNLSDDEDKEDDDDEEEDVEFDAFAGGDDEETDKLGKARYDDFFGGKKETKMKLKDLSEDEEAEIENKGNEKLSTHERARLKLQSKIEQMEKANLDPKHWTMQGEITAAKRPMNSALEVDLDFEHNARPAPVITEEVTASLEDLIKSRIIEARFDDVQRAPRLPTKGKREAKELDESKSKKGLAEVYEAEYFQKANPAFAPTTHSDELKKEASMLFKKLCLKLDALSHFHFTPKPVIEEMSIPNVSAIAMEEVAPVAVSDSAMLAPEEIFSGKGDIKDESELTQEDRKRRRANKKRKFKAESANEPPRKALDTSTKNP

SEQ ID NO: 29783 - DNA, 897 bp, Arabidopsis thaliana
  misc_feature (1)..(897): Ceres Seq. ID no. 12321699
  misc_feature: MA Experiment ID: 108434 Result: Down-regulated in Transcription
  misc_feature: MA Experiment 108434 PARAMETER Experiment Name: At_Root_Tips_cDNA_P Parameter: Tissue Value: Root Tips
  misc_feature: MA Experiment ID: 108464 Result: Up-regulated in Transcription
  misc_feature: MA Experiment 108464 PARAMETER Experiment Name: At_Germinating_Seeds_cDNA_P Parameter: Age (day) Value: 4 vs. 0
  misc_feature: MA Experiment 108464 PARAMETER Experiment Name: At_Germinating_Seeds_cDNA_P Parameter: Tissue Value: Germinating Seeds
  misc_feature: MA Experiment ID: 108488 Result: Down-regulated in Transcription
  misc_feature: MA Experiment ID: 108573 Result: Up-regulated in Transcription
  misc_feature: MA Experiment 108573 PARAMETER Experiment Name: At_Drought_cDNA_P Parameter: Timepoint (hr) Value: 6
  misc_feature: MA Experiment 108573 PARAMETER Experiment Name: At_Drought_cDNA_P Parameter: Tissue Value: Aerial
  misc_feature: MA Experiment 108573 PARAMETER Experiment Name: At_Drought_cDNA_P Parameter: Treatment Value: Drought vs. No Drought
  misc_feature: MA Experiment ID: 20000794 Result: Up-regulated in Transcription
  misc_feature: MA Experiment 20000794 PARAMETER Experiment Name: At_Petals_P Parameter: Age (day) Value: 23-25 days
  misc_feature: MA Experiment 20000794 PARAMETER Experiment Name: At_Petals_P Parameter: Plant Line Value: WS
  misc_feature: MA Experiment 20000794 PARAMETER Experiment Name: At_Petals_P Parameter: Tissue Value: Petals vs. Whole plant
  misc_feature: MA Experiment ID: 20001905 Result: Up-regulated in Transcription
  misc_feature: MA Experiment 20001905 PARAMETER Experiment Name: At_Drought_Reproduction_P Parameter: Age (day) Value: 40
  misc_feature: MA Experiment 20001905 PARAMETER Experiment Name: At_Drought_Reproduction_P Parameter: Organism Value: A. thaliana
  misc_feature: MA Experiment 20001905 PARAMETER Experiment Name: At_Drought_Reproduction_P Parameter: Plant Line Value: WS
  misc_feature: MA Experiment 20001905 PARAMETER Experiment Name: At_Drought_Reproduction_P Parameter: Timepoint (day) Value: 10
  misc_feature: MA Experiment 20001905 PARAMETER Experiment Name: At_Drought_Reproduction_P Parameter: Tissue Value: Rosettes
  misc_feature: MA Experiment 20001905 PARAMETER Experiment Name: At_Drought_Reproduction_P Parameter: Treatment Value: Drought vs. No Drought
  misc_feature: MA Experiment ID: 20001911 Result: Up-regulated in Transcription
  misc_feature: MA Experiment 20001911 PARAMETER Experiment Name: At_Drought_Reproduction_P Parameter: Age (day) Value: 40
  misc_feature: MA Experiment 20001911 PARAMETER Experiment Name: At_Drought_Reproduction_P Parameter: Organism Value: A. thaliana
  misc_feature: MA Experiment 20001911 PARAMETER Experiment Name: At_Drought_Reproduction_P Parameter: Plant Line Value: WS
  misc_feature: MA Experiment 20001911 PARAMETER Experiment Name: At_Drought_Reproduction_P Parameter: Timepoint (day) Value: 10
  misc_feature: MA Experiment 20001911 PARAMETER Experiment Name: At_Drought_Reproduction_P Parameter: Tissue Value: Flowers
  misc_feature: MA Experiment 20001911 PARAMETER Experiment Name: At_Drought_Reproduction_P Parameter: Treatment Value: Drought vs. No Drought
aacaaggacgatcagaagaaatcttagagaaatcagaaaattcttactcgggttttgcatcggtgaatatgaattgcgaagtttgtcagctaaaggaactggaagtggaatccttcgagatacgcgaagttttgcgctgcattctacatacgattgtctttcatcgtgcgcttggtcttatccgccctaaagatattgatttggagctttttgagatcacttatgttcaatgcggtgaaattgaagtggagaagaaaatcgatgaaaagattgagcagttcattaactggattgagaaacacccaaacaaaaagagtcagatttgtctatcgttctatgaagtcaaaagcaaacagccttcttggttcaccaaaatcgaacgcttgtactgggaacaatggtacatcaatctgaatgtgcttcagcccactaagccccctgtcggaaagtctcaccattctaaactagttatggaccctggagaggcatcggaggagagaagttctcgtaggacactgcttgagcaatcccttcaagaagtcttgttccaaatcataaaattcgtgaatgagaagaaggatcatgttcctcccattaacgatggtgtaatctactacccttttgaaatcactatcccaagctcatcggactctgcctttgggatggatatgttcaagaggatactacacagtggccatccatcaatgctcggctaaattccattttccacttaacttagtacatatacactttgatgtttcttggtgcagcctaactccaatcaacactttcctagttacattttctgtgtaaatatataatatgttaccctctcctcgtcgatggataatgttaccttatctatgctttgttgtatataactgatgtgttgtatat

SEQ ID NO: 29784 - protein, 237 aa, Arabidopsis thaliana
  peptide (1)..(237): Ceres Seq. ID no. 12321700
  misc_feature (32)..(221): Homolog of NCBI NO: 40745235 NR Description: hypothetical protein AN2280.2 [Aspergillus
  misc_feature (23)..(165): Homolog of NCBI NO: 15810345 NR Description: unknown protein [Arabidopsis thaliana]
  misc_feature (23)..(165): Homolog of NCBI NO: 30698266 NR Description: expressed protein [Arabidopsis thaliana]
  misc_feature (1)..(212): Homolog of NCBI NO: 9758143 NR Description: gene_id:MUD21.19~pir||T38383~similar to unknown
  misc_feature (23)..(237): Homolog of NCBI NO: 30698268 NR Description: expressed protein [Arabidopsis thaliana]
QGRSEEILEKSENSYSGFASVNMNCEVCQLKELEVESFEIREVLRCILHTIVFHRALGLIRPKDIDLELFEITYVQCGEIEVEKKIDEKIEQFINWIEKHPNKKSQICLSFYEVKSKQPSWFTKIERLYWEQWYINLNVLQPTKPPVGKSHHSKLVMDPGEASEERSSRRTLLEQSLQEVLFQIIKFVNEKKDHVPPINDGVIYYPFEITIPSSSDSAFGMDMFKRILHSGHPSMLG

SEQ ID NO: 29785 - protein, 215 aa, Arabidopsis thaliana
  peptide (1)..(215): Ceres Seq. ID no. 12321701
  misc_feature (10)..(199): Homolog of NCBI NO: 40745235 NR Description: hypothetical protein AN2280.2 [Aspergillus
  misc_feature (1)..(143): Homolog of NCBI NO: 15810345 NR Description: unknown protein [Arabidopsis thaliana]
  misc_feature (1)..(143): Homolog of NCBI NO: 30698266 NR Description: expressed protein [Arabidopsis thaliana]
  misc_feature (1)..(190): Homolog of NCBI NO: 9758143 NR Description: gene_id:MUD21.19~pir||T38383~similar to unknown
  misc_feature (1)..(215): Homolog of NCBI NO: 30698268 NR Description: expressed protein [Arabidopsis thaliana]
MNCEVCQLKELEVESFEIREVLRCILHTIVFHRALGLIRPKDIDLELFEITYVQCGEIEVEKKIDEKIEQFINWIEKHPNKKSQICLSFYEVKSKQPSWFTKIERLYWEQWYINLNVLQPTKPPVGKSHHSKLVMDPGEASEERSSRRTLLEQSLQEVLFQIIKFVNEKKDHVPPINDGVIYYPFEITIPSSSDSAFGMDMFKRILHSGHPSMLG

SEQ ID NO: 29786 - DNA, 1590 bp, Arabidopsis thaliana
  misc_feature (1)..(1590): Ceres Seq. ID no. 12422847
  misc_feature: MA Experiment ID: 108585 Result: Up-regulated in Transcription
  misc_feature: MA Experiment 108585 PARAMETER Experiment Name: At_5mM_NaNP_cDNA_P Parameter: Timepoint (hr) Value: 6
  misc_feature: MA Experiment 108585 PARAMETER Experiment Name: At_5mM_NaNP_cDNA_P Parameter: Tissue Value: Aerial
  misc_feature: MA Experiment 108585 PARAMETER Experiment Name: At_5mM_NaNP_cDNA_P Parameter: Treatment Value: null
  misc_feature: MA Experiment ID: 108594 Result: Down-regulated in Transcription
  misc_feature: MA Experiment 108594 PARAMETER Experiment Name: At_Ler-rhl_Root_cDNA_P Parameter: Plant Line Value: null
  misc_feature: MA Experiment ID: 20000439 Result: Up-regulated in Transcription
  misc_feature: MA Experiment 20000439 PARAMETER Experiment Name: At_Roots__P Parameter: Age (day) Value: 14 vs. 21
  misc_feature: MA Experiment 20000439 PARAMETER Experiment Name: At_Roots__P Parameter: Organism Value: A. thaliana
  misc_feature: MA Experiment 20000439 PARAMETER Experiment Name: At_Roots__P Parameter: Tissue Value: Roots vs. Whole Plant
aagactctctctgctttcgaccaaaaccttctcctctcctctgggagatctccatcttcttcgcttcttcgcttccccgcctgaaacaattactcgatctcgccggcggaacaagctctccgtttctctttccggcagatcgattcttccaattccttattcctttctaggtcttccttaagaaacccttactttcttcaaaatctgcatttatggcgattagggttaccttcacctactccagctatgttgctaggagcattgcttcatccgccgggactcgtgtcggtaccggcgacgttagatcatgcttcgaaacatgggttcgtcccaggttctgcggccacaatcagataccagatattgttgataaatctcccggatccaacacatggggtccaagctcaggccctcgtgctcgaccagcttcatcaatgtatagcaccattgcgagggaaatcctcgaagaaggctgcaagagtccacttgtcttgggtatgatctctctcatgaatttgactggagctccacagttttcgggtgtgaccggtctcgggatctctccctttaagacttcttctgtcatcccgttccttaggggttccaagtggatgccttgtagtattccggcgacgttatcaacggatattgctgaggttgatagaggaggaaaggtctgtgatcctaaagtgaagttggagttgagtgataaagtctcgaatggtggaaacggatgggttaataagctgttgaatatctgctcggaggatgctaaggctgctttcacggcggttactttttctctccttttccgatcggctttggccgagccaaagtctataccttcaacatctatgcttcctactctcgatgtgggtgatcgtgttatagccgagaaggtctcatactttttcaggaagccagaggtttcagacatagttatcttcaaggctcctcctattttggtggaacatggttacagttgtgctgatgttttcataaaaaggatagttgctagcgaaggtgactgggttgaagtttgtgatggaaagctcttagtaaatgacactgttcaagcagaggattttgtcttagagccaattgactatgaaatggaaccaatgtttgtccctgaaggttatgtcttcgtcctaggagacaaccgcaacaaaagctttgattctcataactggggtccacttccaataaagaacatcatagggagatctgtgtttcgctattggccaccaagcaaagtgtcagacataatacaccatgaacaagttagccaaaagagagctgttgatgtatcttgaccaacgcagatggtatcttaggattaagcagaaaatttgattagatgagctgtgccatgccaaccattttggcgctgaaggcaacagagcaattctttcttcctgtctaggcttgatggcggacatggaatgcactgggaaatccatataaaaagaacaagaaaattgatatttttgctttgattttttttgatgtgttgaaacctaaatgcatccagtgtaattggcagtagctgtcaaacataaaagggtaaactttcttttttgagtattt

SEQ ID NO: 29787 - protein, 367 aa, Arabidopsis thaliana
  peptide (1)..(367): Ceres Seq. ID no. 12422848
  misc_feature (176)..(337): Pfam Name: Signal peptidase I Pfam Description: Signal peptidase I
  misc_feature (193)..(352): Homolog of NCBI NO: 17230467 NR Description: signal peptidase I [Nostoc sp. PCC 7120]
  misc_feature (185)..(348): Homolog of NCBI NO: 16329254 NR Description: leader peptidase I [Synechocystis sp. PCC 6803]
  misc_feature (168)..(352): Homolog of NCBI NO: 23042815 NR Description: hypothetical protein [Trichodesmium erythraeum
  misc_feature (180)..(353): Homolog of NCBI NO: 25082936 NR Description: chloroplast thylakoidal processing peptidase,
  misc_feature (180)..(353): Homolog of NCBI NO: 30687572 NR Description: chloroplast thylakoidal processing peptidase
  misc_feature (180)..(353): Homolog of NCBI NO: 9294054 NR Description: contains similarity to signal peptidase (leader
  misc_feature (114)..(367): Homolog of NCBI NO: 25408074 NR Description: probable signal peptidase I [imported] -
  misc_feature (67)..(367): Homolog of NCBI NO: 30684587 NR Description: signal peptidase I -related [Arabidopsis
  misc_feature (1)..(367): Homolog of NCBI NO: 15222236 NR Description: chloroplast thylakoidal processing peptidase,
  misc_feature (1)..(367): Homolog of NCBI NO: 21553622 NR Description: chloroplast thylakoidal processing peptidase,
MAIRVTFTYSSYVARSIASSAGTRVGTGDVRSCFETWVRPRFCGHNQIPDIVDKSPGSNTWGPSSGPRARPASSMYSTIAREILEEGCKSPLVLGMISLMNLTGAPQFSGVTGLGISPFKTSSVIPFLRGSKWMPCSIPATLSTDIAEVDRGGKVCDPKVKLELSDKVSNGGNGWVNKLLNICSEDAKAAFTAVTFSLLFRSALAEPKSIPSTSMLPTLDVGDRVIAEKVSYFFRKPEVSDIVIFKAPPILVEHGYSCADVFIKRIVASEGDWVEVCDGKLLVNDTVQAEDFVLEPIDYEMEPMFVPEGYVFVLGDNRNKSFDSHNWGPLPIKNIIGRSVFRYWPPSKVSDIIHHEQVSQKRAVDVS

SEQ ID NO: 29788 - protein, 293 aa, Arabidopsis thaliana
  peptide (1)..(293): Ceres Seq. ID no. 12422849
  misc_feature (102)..(263): Pfam Name: Signal peptidase I Pfam Description: Signal peptidase I
  misc_feature (119)..(278): Homolog of NCBI NO: 17230467 NR Description: signal peptidase I [Nostoc sp. PCC 7120]
  misc_feature (111)..(274): Homolog of NCBI NO: 16329254 NR Description: leader peptidase I [Synechocystis sp. PCC 6803]
  misc_feature (94)..(278): Homolog of NCBI NO: 23042815 NR Description: hypothetical protein [Trichodesmium erythraeum
  misc_feature (106)..(279): Homolog of NCBI NO: 25082936 NR Description: chloroplast thylakoidal processing peptidase,
  misc_feature (106)..(279): Homolog of NCBI NO: 30687572 NR Description: chloroplast thylakoidal processing peptidase
  misc_feature (106)..(279): Homolog of NCBI NO: 9294054 NR Description: contains similarity to signal peptidase (leader
  misc_feature (40)..(293): Homolog of NCBI NO: 25408074 NR Description: probable signal peptidase I [imported] -
  misc_feature (1)..(293): Homolog of NCBI NO: 30684587 NR Description: signal peptidase I -related [Arabidopsis
  misc_feature (1)..(293): Homolog of NCBI NO: 15222236 NR Description: chloroplast thylakoidal processing peptidase,
  misc_feature (1)..(293): Homolog of NCBI NO: 21553622 NR Description: chloroplast thylakoidal processing peptidase,
MYSTIAREILEEGCKSPLVLGMISLMNLTGAPQFSGVTGLGISPFKTSSVIPFLRGSKWMPCSIPATLSTDIAEVDRGGKVCDPKVKLELSDKVSNGGNGWVNKLLNICSEDAKAAFTAVTFSLLFRSALAEPKSIPSTSMLPTLDVGDRVIAEKVSYFFRKPEVSDIVIFKAPPILVEHGYSCADVFIKRIVASEGDWVEVCDGKLLVNDTVQAEDFVLEPIDYEMEPMFVPEGYVFVLGDNRNKSFDSHNWGPLPIKNIIGRSVFRYWPPSKVSDIIHHEQVSQKRAVDVS

SEQ ID NO: 29789 - protein, 272 aa, Arabidopsis thaliana
  peptide (1)..(272): Ceres Seq. ID no. 12422850
  misc_feature (81)..(242): Pfam Name: Signal peptidase I Pfam Description: Signal peptidase I
  misc_feature (98)..(257): Homolog of NCBI NO: 17230467 NR Description: signal peptidase I [Nostoc sp. PCC 7120]
  misc_feature (90)..(253): Homolog of NCBI NO: 16329254 NR Description: leader peptidase I [Synechocystis sp. PCC 6803]
  misc_feature (73)..(257): Homolog of NCBI NO: 23042815 NR Description: hypothetical protein [Trichodesmium erythraeum
  misc_feature (85)..(258): Homolog of NCBI NO: 25082936 NR Description: chloroplast thylakoidal processing peptidase,
  misc_feature (85)..(258): Homolog of NCBI NO: 30687572 NR Description: chloroplast thylakoidal processing peptidase
  misc_feature (85)..(258): Homolog of NCBI NO: 9294054 NR Description: contains similarity to signal peptidase (leader
  misc_feature (19)..(272): Homolog of NCBI NO: 25408074 NR Description: probable signal peptidase I [imported] -
  misc_feature (1)..(272): Homolog of NCBI NO: 30684587 NR Description: signal peptidase I -related [Arabidopsis
  misc_feature (1)..(272): Homolog of NCBI NO: 15222236 NR Description: chloroplast thylakoidal processing peptidase,
  misc_feature (1)..(272): Homolog of NCBI NO: 21553622 NR Description: chloroplast thylakoidal processing peptidase,
MISLMNLTGAPQFSGVTGLGISPFKTSSVIPFLRGSKWMPCSIPATLSTDIAEVDRGGKVCDPKVKLELSDKVSNGGNGWVNKLLNICSEDAKAAFTAVTFSLLFRSALAEPKSIPSTSMLPTLDVGDRVIAEKVSYFFRKPEVSDIVIFKAPPILVEHGYSCADVFIKRIVASEGDWVEVCDGKLLVNDTVQAEDFVLEPIDYEMEPMFVPEGYVFVLGDNRNKSFDSHNWGPLPIKNIIGRSVFRYWPPSKVSDIIHHEQVSQKRAVDVS

SEQ ID NO: 29790 - DNA, 1825 bp, Arabidopsis thaliana
  misc_feature (1)..(1825): Ceres Seq. ID no. 12738746
  misc_feature: MA Experiment ID: 108434 Result: Up-regulated in Transcription
  misc_feature: MA Experiment 108434 PARAMETER Experiment Name: At_Root_Tips_cDNA_P Parameter: Tissue Value: Root Tips
  misc_feature: MA Experiment ID: 108462 Result: Down-regulated in Transcription
  misc_feature: MA Experiment 108462 PARAMETER Experiment Name: At_Germinating_Seeds_cDNA_P Parameter: Age (day) Value: 2 vs. 0
  misc_feature: MA Experiment 108462 PARAMETER Experiment Name: At_Germinating_Seeds_cDNA_P Parameter: Tissue Value: Germinating Seeds
  misc_feature: MA Experiment ID: 108463 Result: Down-regulated in Transcription
  misc_feature: MA Experiment 108463 PARAMETER Experiment Name: At_Germinating_Seeds_cDNA_P Parameter: Age (day) Value: 3 vs. 0
  misc_feature: MA Experiment 108463 PARAMETER Experiment Name: At_Germinating_Seeds_cDNA_P Parameter: Tissue Value: Germinating Seeds
  misc_feature: MA Experiment ID: 108464 Result: Down-regulated in Transcription
  misc_feature: MA Experiment 108464 PARAMETER Experiment Name: At_Germinating_Seeds_cDNA_P Parameter: Age (day) Value: 4 vs. 0
  misc_feature: MA Experiment 108464 PARAMETER Experiment Name: At_Germinating_Seeds_cDNA_P Parameter: Tissue Value: Germinating Seeds
  misc_feature: MA Experiment ID: 108573 Result: Down-regulated in Transcription
  misc_feature: MA Experiment 108573 PARAMETER Experiment Name: At_Drought_cDNA_P Parameter: Timepoint (hr) Value: 6
  misc_feature: MA Experiment 108573 PARAMETER Experiment Name: At_Drought_cDNA_P Parameter: Tissue Value: Aerial
  misc_feature: MA Experiment 108573 PARAMETER Experiment Name: At_Drought_cDNA_P Parameter: Treatment Value: Drought vs. No Drought
  misc_feature: MA Experiment ID: 20000113 Result: Up-regulated in Transcription
  misc_feature: MA Experiment 20000113 PARAMETER Experiment Name: At_42deg_Heat_cDNA_P Parameter: Temperature (deg C) Value: 42 vs. 22
  misc_feature: MA Experiment 20000113 PARAMETER Experiment Name: At_42deg_Heat_cDNA_P Parameter: Timepoint (hr) Value: 8
  misc_feature: MA Experiment 20000113 PARAMETER Experiment Name: At_42deg_Heat_cDNA_P Parameter: Tissue Value: Aerial
  misc_feature: MA Experiment ID: 20000224 Result: Down-regulated in Transcription
  misc_feature: MA Experiment ID: 20000234 Result: Up-regulated in Transcription
  misc_feature: MA Experiment 20000234 PARAMETER Experiment Name: At_Siliques_P Parameter: Age (day) Value: 21
  misc_feature: MA Experiment 20000234 PARAMETER Experiment Name: At_Siliques_P Parameter: Organism Value: A. thaliana
  misc_feature: MA Experiment 20000234 PARAMETER Experiment Name: At_Siliques_P Parameter: Plant Line Value: WS
  misc_feature: MA Experiment 20000234 PARAMETER Experiment Name: At_Siliques_P Parameter: Tissue Value: Less Than 5mm Siliques vs. Whole Plant
  misc_feature: MA Experiment ID: 20000794 Result: Down-regulated in Transcription
  misc_feature: MA Experiment 20000794 PARAMETER Experiment Name: At_Petals_P Parameter: Age (day) Value: 23-25 days
  misc_feature: MA Experiment 20000794 PARAMETER Experiment Name: At_Petals_P Parameter: Plant Line Value: WS
  misc_feature: MA Experiment 20000794 PARAMETER Experiment Name: At_Petals_P Parameter: Tissue Value: Petals vs. Whole plant
  misc_feature: MA Experiment ID: 20001556 Result: Up-regulated in Transcription
  misc_feature: MA Experiment 20001556 PARAMETER Experiment Name: At_Drought_Soil_Dry_P Parameter: Age (day) Value: 26
  misc_feature: MA Experiment 20001556 PARAMETER Experiment Name: At_Drought_Soil_Dry_P Parameter: Organism Value: A. thaliana
  misc_feature: MA Experiment 20001556 PARAMETER Experiment Name: At_Drought_Soil_Dry_P Parameter: Plant Line Value: WS
  misc_feature: MA Experiment 20001556 PARAMETER Experiment Name: At_Drought_Soil_Dry_P Parameter: Post Timepoint (hr) Value: None
  misc_feature: MA Experiment 20001556 PARAMETER Experiment Name: At_Drought_Soil_Dry_P Parameter: Post-Treatment Value: None
  misc_feature: MA Experiment 20001556 PARAMETER Experiment Name: At_Drought_Soil_Dry_P Parameter: Timepoint (day) Value: 12
  misc_feature: MA Experiment 20001556 PARAMETER Experiment Name: At_Drought_Soil_Dry_P Parameter: Treatment Value: Drought vs. No Drought
  misc_feature: MA Experiment ID: 20001558 Result: Up-regulated in Transcription
  misc_feature: MA Experiment 20001558 PARAMETER Experiment Name: At_Drought_Soil_Dry_P Parameter: Age (day) Value: 27
  misc_feature: MA Experiment 20001558 PARAMETER Experiment Name: At_Drought_Soil_Dry_P Parameter: Organism Value: A. thaliana
  misc_feature: MA Experiment 20001558 PARAMETER Experiment Name: At_Drought_Soil_Dry_P Parameter: Plant Line Value: WS
  misc_feature: MA Experiment 20001558 PARAMETER Experiment Name: At_Drought_Soil_Dry_P Parameter: Post Timepoint (hr) Value: 6
  misc_feature: MA Experiment 20001558 PARAMETER Experiment Name: At_Drought_Soil_Dry_P Parameter: Post-Treatment Value: Re-Water vs. No Drought
  misc_feature: MA Experiment 20001558 PARAMETER Experiment Name: At_Drought_Soil_Dry_P Parameter: Timepoint (day) Value: 13
  misc_feature: MA Experiment 20001558 PARAMETER Experiment Name: At_Drought_Soil_Dry_P Parameter: Treatment Value: Drought vs. No Drought
  misc_feature: MA Experiment ID: 20001560 Result: Up-regulated in Transcription
  misc_feature: MA Experiment 20001560 PARAMETER Experiment Name: At_Drought_Soil_Dry_P Parameter: Age (day) Value: 28
  misc_feature: MA Experiment 20001560 PARAMETER Experiment Name: At_Drought_Soil_Dry_P Parameter: Organism Value: A. thaliana
  misc_feature: MA Experiment 20001560 PARAMETER Experiment Name: At_Drought_Soil_Dry_P Parameter: Plant Line Value: WS
  misc_feature: MA Experiment 20001560 PARAMETER Experiment Name: At_Drought_Soil_Dry_P Parameter: Post Timepoint (hr) Value: None
  misc_feature: MA Experiment 20001560 PARAMETER Experiment Name: At_Drought_Soil_Dry_P Parameter: Post-Treatment Value: None
  misc_feature: MA Experiment 20001560 PARAMETER Experiment Name: At_Drought_Soil_Dry_P Parameter: Timepoint (day) Value: 14
  misc_feature: MA Experiment 20001560 PARAMETER Experiment Name: At_Drought_Soil_Dry_P Parameter: Treatment Value: Drought vs. No Drought
  misc_feature: MA Experiment ID: 20001757 Result: Up-regulated in Transcription
  misc_feature: MA Experiment 20001757 PARAMETER Experiment Name: At_50mM_NH4NO3_L-to-H_P Parameter: Timepoint (hr) Value: 6
  misc_feature: MA Experiment 20001757 PARAMETER Experiment Name: At_50mM_NH4NO3_L-to-H_P Parameter: Tissue Value: Leaf
  misc_feature: MA Experiment 20001757 PARAMETER Experiment Name: At_50mM_NH4NO3_L-to-H_P Parameter: Treatment Value: 50mM NH4NO3 vs 100mM Mannitol
agtagattagactaataacttgtgtgggaaaacaatgggcagatcgccatgttgtgataaggccgggttgaagaaagggccttggactccagaagaggatcagaaacttttggcttatattgaagaacatggccatggaagctggcgttctttgcctgagaaagccggtctccaaaggtgtggaaagagttgcagactcagatggactaactacctaagacctgacatcaagagaggcaaattcactgtacaagaagaacaaaccatcattcaactccacgctctcctcggaaacaggtggtcagcgattgcaactcatttaccaaagaggacagacaacgagatcaagaactactggaacacacacttgaagaaacgtctgatcaaaatggggatagatccagtgactcacaagcacaaaaacgagactctttcgtcttccacaggacaatcaaagaacgcagccacgcttagtcatatggctcaatgggagagtgcaagactcgaagctgaagcaaggctagctagagaatcaaagcttctccatttacagcattacgaaaacaataacaaccttaacaaatcagcagctcctcaacaacattgcttcactcaaaaaacatcaacaagctggactaaaccaaaccaaggaaacggagaccaacagcttgaatctccgacatcgacggtgacattctctgagaatcttctgatgcccttaggaatcccgacggatagcagcagaaatagaaacaataacaacaatgagtcctcggcgatgattgaactcgccgtatcttcgtcaacctcctccgatgtgagtctggtcaaagaacacgaacacgactggattaggcaaatcaactgtggtagtggaggaataggagaaggattcacgagtctattgatcggtgattcggtcggccggagtttacccaccgggaaaaacgaagcgacggcgggcgtggggaatgagagtgagtataactactatgaggataacaagaattactggaatagcattctcaacttggttgattcttcaccgtccgattccgcgacgatgttctgatctaagggtcttcaaccatacatttttaattctcagattgttttttaaatgtatggttgaagaccaaaaggactgctcctaagtccgatgatgtctacctaaagcttctcgtcaagctttaccggtttttggtgaggagatctaacagcaacttcaatgctgtgattctgaagaggcttttcatgagcaaagtcaacaaagctcctctttcactctctaggcttgtagagttcatgactggcaaggatgacaagattgctgtgttagttggaactatcactgatgatttgagagttcatgagattcctgccatgaaggttactgccttgaggtttactgagagggctagggctagaattgagaaagctggtggagagtgcttaacctttgaccagcttgctctcagagctccattgggacagaacacagttcttcttagaggaccaaagaactcgcgtgaagcagtgaagcatttcggacctgctcctggtgtgccacacagtaacactaagccatatgttaggcataagggaaggaagtttgagaaagctagaggaaagcgaaagagtcgtggattcaaggtctaagaagatgttttctggtttcgttttgcttggtttaagtatcgaagttttggtagggaacgctggttcctctttaccctgttccagactttgttttaagttctgtttttctattctcaagacaattggatattttgctttgtcttttaatcttattactattagctgc

SEQ ID NO: 29791 - protein, 345 aa, Arabidopsis thaliana
  peptide (1)..(345): Ceres Seq. ID no. 12738747
  misc_feature (14)..(61): Pfam Name: Myb-like DNA-binding domain Pfam Description: Myb-like DNA-binding domain
  misc_feature (1)..(175): Homolog of NCBI NO: 15233066 NR Description: myb DNA-binding protein (MYB17); protein id:
  misc_feature (1)..(181): Homolog of NCBI NO: 629737 NR Description: myb-related protein MIXTA - garden snapdragon
  misc_feature (1)..(276): Homolog of NCBI NO: 13346188 NR Description: GHMYB25 [Gossypium hirsutum]
  misc_feature (1)..(341): Homolog of NCBI NO: 282964 NR Description: myb-related protein 1 - garden petunia
  misc_feature (1)..(343): Homolog of NCBI NO: 38344966 NR Description: OSJNBa0072F16.11 [Oryza sativa (japonica
  misc_feature (1)..(336): Homolog of NCBI NO: 27125807 NR Description: MYB27 protein [Oryza sativa (japonica
  misc_feature (1)..(223): Homolog of NCBI NO: 15242272 NR Description: myb family transcription factor
  misc_feature (199)..(341): Homolog of NCBI NO: 28628947 NR Description: MYB1 [Dendrobium sp. XMW-2002-1]
  misc_feature (1)..(169): Homolog of NCBI NO: 28628947 NR Description: MYB1 [Dendrobium sp. XMW-2002-1]
  misc_feature (1)..(345): Homolog of NCBI NO: 15232045 NR Description: myb family transcription factor
MGRSPCCDKAGLKKGPWTPEEDQKLLAYIEEHGHGSWRSLPEKAGLQRCGKSCRLRWTNYLRPDIKRGKFTVQEEQTIIQLHALLGNRWSAIATHLPKRTDNEIKNYWNTHLKKRLIKMGIDPVTHKHKNETLSSSTGQSKNAATLSHMAQWESARLEAEARLARESKLLHLQHYENNNNLNKSAAPQQHCFTQKTSTSWTKPNQGNGDQQLESPTSTVTFSENLLMPLGIPTDSSRNRNNNNNESSAMIELAVSSSTSSDVSLVKEHEHDWIRQINCGSGGIGEGFTSLLIGDSVGRSLPTGKNEATAGVGNESEYNYYEDNKNYWNSILNLVDSSPSDSATMF

SEQ ID NO: 29792 - protein, 227 aa, Arabidopsis thaliana
  peptide (1)..(227): Ceres Seq. ID no. 12738748
  misc_feature (1)..(57): Homolog of NCBI NO: 15233066 NR Description: myb DNA-binding protein (MYB17); protein id:
  misc_feature (1)..(63): Homolog of NCBI NO: 629737 NR Description: myb-related protein MIXTA - garden snapdragon
  misc_feature (1)..(158): Homolog of NCBI NO: 13346188 NR Description: GHMYB25 [Gossypium hirsutum]
  misc_feature (1)..(223): Homolog of NCBI NO: 282964 NR Description: myb-related protein 1 - garden petunia
  misc_feature (1)..(225): Homolog of NCBI NO: 38344966 NR Description: OSJNBa0072F16.11 [Oryza sativa (japonica
  misc_feature (1)..(218): Homolog of NCBI NO: 27125807 NR Description: MYB27 protein [Oryza sativa (japonica
  misc_feature (1)..(105): Homolog of NCBI NO: 15242272 NR Description: myb family transcription factor
  misc_feature (81)..(223): Homolog of NCBI NO: 28628947 NR Description: MYB1 [Dendrobium sp. XMW-2002-1]
  misc_feature (1)..(51): Homolog of NCBI NO: 28628947 NR Description: MYB1 [Dendrobium sp. XMW-2002-1]
  misc_feature (1)..(227): Homolog of NCBI NO: 15232045 NR Description: myb family transcription factor
MGIDPVTHKHKNETLSSSTGQSKNAATLSHMAQWESARLEAEARLARESKLLHLQHYENNNNLNKSAAPQQHCFTQKTSTSWTKPNQGNGDQQLESPTSTVTFSENLLMPLGIPTDSSRNRNNNNNESSAMIELAVSSSTSSDVSLVKEHEHDWIRQINCGSGGIGEGFTSLLIGDSVGRSLPTGKNEATAGVGNESEYNYYEDNKNYWNSILNLVDSSPSDSATMF

SEQ ID NO: 29793 - protein, 197 aa, Arabidopsis thaliana
  peptide (1)..(197): Ceres Seq. ID no. 12738749
  misc_feature (1)..(27): Homolog of NCBI NO: 15233066 NR Description: myb DNA-binding protein (MYB17); protein id:
  misc_feature (1)..(33): Homolog of NCBI NO: 629737 NR Description: myb-related protein MIXTA - garden snapdragon
  misc_feature (1)..(128): Homolog of NCBI NO: 13346188 NR Description: GHMYB25 [Gossypium hirsutum]
  misc_feature (1)..(193): Homolog of NCBI NO: 282964 NR Description: myb-related protein 1 - garden petunia
  misc_feature (1)..(195): Homolog of NCBI NO: 38344966 NR Description: OSJNBa0072F16.11 [Oryza sativa (japonica
  misc_feature (1)..(188): Homolog of NCBI NO: 27125807 NR Description: MYB27 protein [Oryza sativa (japonica
  misc_feature (1)..(75): Homolog of NCBI NO: 15242272 NR Description: myb family transcription factor
  misc_feature (51)..(193): Homolog of NCBI NO: 28628947 NR Description: MYB1 [Dendrobium sp. XMW-2002-1]
  misc_feature (1)..(21): Homolog of NCBI NO: 28628947 NR Description: MYB1 [Dendrobium sp. XMW-2002-1]
  misc_feature (1)..(197): Homolog of NCBI NO: 15232045 NR Description: myb family transcription factor
MAQWESARLEAEARLARESKLLHLQHYENNNNLNKSAAPQQHCFTQKTSTSWTKPNQGNGDQQLESPTSTVTFSENLLMPLGIPTDSSRNRNNNNNESSAMIELAVSSSTSSDVSLVKEHEHDWIRQINCGSGGIGEGFTSLLIGDSVGRSLPTGKNEATAGVGNESEYNYYEDNKNYWNSILNLVDSSPSDSATMF

SEQ ID NO: 29794 - DNA, 852 bp, Arabidopsis thaliana
  misc_feature (1)..(852): Ceres Seq. ID no. 12332047
  misc_feature: MA Experiment ID: 108434 Result: Down-regulated in Transcription
  misc_feature: MA Experiment 108434 PARAMETER Experiment Name: At_Root_Tips_cDNA_P Parameter: Tissue Value: Root Tips
  misc_feature: MA Experiment ID: 108469 Result: Up-regulated in Transcription
  misc_feature: MA Experiment ID: 108585 Result: Up-regulated in Transcription
  misc_feature: MA Experiment 108585 PARAMETER Experiment Name: At_5mM_NaNP_cDNA_P Parameter: Timepoint (hr) Value: 6
  misc_feature: MA Experiment 108585 PARAMETER Experiment Name: At_5mM_NaNP_cDNA_P Parameter: Tissue Value: Aerial
  misc_feature: MA Experiment 108585 PARAMETER Experiment Name: At_5mM_NaNP_cDNA_P Parameter: Treatment Value: null
  misc_feature: MA Experiment ID: 108668 Result: Up-regulated in Transcription
  misc_feature: MA Experiment 108668 PARAMETER Experiment Name: At_2mM_SA_cDNA_P Parameter: Plant Line Value: WS
  misc_feature: MA Experiment 108668 PARAMETER Experiment Name: At_2mM_SA_cDNA_P Parameter: Timepoint (hr) Value: 6
  misc_feature: MA Experiment 108668 PARAMETER Experiment Name: At_2mM_SA_cDNA_P Parameter: Treatment Value: 2mM SA vs. No Treatment
  misc_feature: MA Experiment ID: 20000069 Result: Up-regulated in Transcription
  misc_feature: MA Experiment 20000069 PARAMETER Experiment Name: At_100uM_ABA_Mutants_cDNA_P Parameter: Plant Line Value: CS23
  misc_feature: MA Experiment 20000069 PARAMETER Experiment Name: At_100uM_ABA_Mutants_cDNA_P Parameter: Timepoint (hr) Value: 6
  misc_feature: MA Experiment 20000069 PARAMETER Experiment Name: At_100uM_ABA_Mutants_cDNA_P Parameter: Tissue Value: Aerial
  misc_feature: MA Experiment 20000069 PARAMETER Experiment Name: At_100uM_ABA_Mutants_cDNA_P Parameter: Treatment Value: 100uM ABA vs. No Treatment
  misc_feature: MA Experiment ID: 20000070 Result: Up-regulated in Transcription
  misc_feature: MA Experiment 20000070 PARAMETER Experiment Name: At_100uM_ABA_Mutants_cDNA_P Parameter: Plant Line Value: CS24
  misc_feature: MA Experiment 20000070 PARAMETER Experiment Name: At_100uM_ABA_Mutants_cDNA_P Parameter: Timepoint (hr) Value: 6
  misc_feature: MA Experiment 20000070 PARAMETER Experiment Name: At_100uM_ABA_Mutants_cDNA_P Parameter: Tissue Value: Aerial
  misc_feature: MA Experiment 20000070 PARAMETER Experiment Name: At_100uM_ABA_Mutants_cDNA_P Parameter: Treatment Value: 100uM ABA vs. No Treatment
  misc_feature: MA Experiment ID: 20000071 Result: Up-regulated in Transcription
  misc_feature: MA Experiment 20000071 PARAMETER Experiment Name: At_100uM_ABA_Mutants_cDNA_P Parameter: Plant Line Value: CS8104
  misc_feature: MA Experiment 20000071 PARAMETER Experiment Name: At_100uM_ABA_Mutants_cDNA_P Parameter: Timepoint (hr) Value: 6
  misc_feature: MA Experiment 20000071 PARAMETER Experiment Name: At_100uM_ABA_Mutants_cDNA_P Parameter: Tissue Value: Aerial
  misc_feature: MA Experiment 20000071 PARAMETER Experiment Name: At_100uM_ABA_Mutants_cDNA_P Parameter: Treatment Value: 100uM ABA vs. No Treatment
  misc_feature: MA Experiment ID: 20000072 Result: Up-regulated in Transcription
  misc_feature: MA Experiment 20000072 PARAMETER Experiment Name: At_100uM_ABA_Mutants_cDNA_P Parameter: Plant Line Value: CS8105
  misc_feature: MA Experiment 20000072 PARAMETER Experiment Name: At_100uM_ABA_Mutants_cDNA_P Parameter: Timepoint (hr) Value: 6
  misc_feature: MA Experiment 20000072 PARAMETER Experiment Name: At_100uM_ABA_Mutants_cDNA_P Parameter: Tissue Value: Aerial
  misc_feature: MA Experiment 20000072 PARAMETER Experiment Name: At_100uM_ABA_Mutants_cDNA_P Parameter: Treatment Value: 100uM ABA vs. No Treatment
  misc_feature: MA Experiment ID: 20000086 Result: Up-regulated in Transcription
  misc_feature: MA Experiment 20000086 PARAMETER Experiment Name: At_100uM_ABA_Mutants_cDNA_P Parameter: Plant Line Value: CS22
  misc_feature: MA Experiment 20000086 PARAMETER Experiment Name: At_100uM_ABA_Mutants_cDNA_P Parameter: Timepoint (hr) Value: 6
  misc_feature: MA Experiment 20000086 PARAMETER Experiment Name: At_100uM_ABA_Mutants_cDNA_P Parameter: Tissue Value: Aerial
  misc_feature: MA Experiment 20000086 PARAMETER Experiment Name: At_100uM_ABA_Mutants_cDNA_P Parameter: Treatment Value: 100uM ABA vs. No Treatment
  misc_feature: MA Experiment ID: 20000087 Result: Up-regulated in Transcription
  misc_feature: MA Experiment 20000087 PARAMETER Experiment Name: At_100uM_ABA_Mutants_cDNA_P Parameter: Plant Line Value: WS
  misc_feature: MA Experiment 20000087 PARAMETER Experiment Name: At_100uM_ABA_Mutants_cDNA_P Parameter: Timepoint (hr) Value: 6
  misc_feature: MA Experiment 20000087 PARAMETER Experiment Name: At_100uM_ABA_Mutants_cDNA_P Parameter: Tissue Value: Aerial
  misc_feature: MA Experiment 20000087 PARAMETER Experiment Name: At_100uM_ABA_Mutants_cDNA_P Parameter: Treatment Value: 100uM ABA vs. No Treatment
  misc_feature: MA Experiment ID: 20000090 Result: Up-regulated in Transcription
  misc_feature: MA Experiment ID: 20000111 Result: Down-regulated in Transcription
  misc_feature: MA Experiment 20000111 PARAMETER Experiment Name: At_42deg_Heat_cDNA_P Parameter: Temperature (deg C) Value: 42 vs. 22
  misc_feature: MA Experiment 20000111 PARAMETER Experiment Name: At_42deg_Heat_cDNA_P Parameter: Timepoint (hr) Value: 6
  misc_feature: MA Experiment 20000111 PARAMETER Experiment Name: At_42deg_Heat_cDNA_P Parameter: Tissue Value: Aerial
  misc_feature: MA Experiment ID: 20000117 Result: Up-regulated in Transcription
  misc_feature: MA Experiment 20000117 PARAMETER Experiment Name: At_100uM_ABA_Mutants_cDNA_P Parameter: Plant Line Value: Columbia
  misc_feature: MA Experiment 20000117 PARAMETER Experiment Name: At_100uM_ABA_Mutants_cDNA_P Parameter: Timepoint (hr) Value: 6
  misc_feature: MA Experiment 20000117 PARAMETER Experiment Name: At_100uM_ABA_Mutants_cDNA_P Parameter: Tissue Value: Aerial
  misc_feature: MA Experiment 20000117 PARAMETER Experiment Name: At_100uM_ABA_Mutants_cDNA_P Parameter: Treatment Value: 100uM ABA vs. No Treatment
  misc_feature: MA Experiment ID: 20000315 Result: Down-regulated in Transcription
  misc_feature: MA Experiment 20000315 PARAMETER Experiment Name: At_14day_Shoots-Roots_Sub_P Parameter: Age (day) Value: 14
  misc_feature: MA Experiment 20000315 PARAMETER Experiment Name: At_14day_Shoots-Roots_Sub_P Parameter: Organism Value: A. thaliana
  misc_feature: MA Experiment 20000315 PARAMETER Experiment Name: At_14day_Shoots-Roots_Sub_P Parameter: Plant Line Value: WS
  misc_feature: MA Experiment 20000315 PARAMETER Experiment Name: At_14day_Shoots-Roots_Sub_P Parameter: Tissue Value: Shoots vs. Whole Plant
  misc_feature: MA Experiment ID: 20000347 Result: Up-regulated in Transcription
  misc_feature: MA Experiment 20000347 PARAMETER Experiment Name: At_2mM_SA_Sub_P Parameter: Age (day) Value: 14
  misc_feature: MA Experiment 20000347 PARAMETER Experiment Name: At_2mM_SA_Sub_P Parameter: Organism Value: A. thaliana
  misc_feature: MA Experiment 20000347 PARAMETER Experiment Name: At_2mM_SA_Sub_P Parameter: Plant Line Value: WS
  misc_feature: MA Experiment 20000347 PARAMETER Experiment Name: At_2mM_SA_Sub_P Parameter: Timepoint (hr) Value: 6
  misc_feature: MA Experiment 20000347 PARAMETER Experiment Name: At_2mM_SA_Sub_P Parameter: Tissue Value: Aerial
  misc_feature: MA Experiment 20000347 PARAMETER Experiment Name: At_2mM_SA_Sub_P Parameter: Treatment Value: 2mM SA vs. No Treatment
  misc_feature: MA Experiment ID: 20000355 Result: Down-regulated in Transcription
  misc_feature: MA Experiment 20000355 PARAMETER Experiment Name: At_Siliques_Sub_P Parameter: Age (day) Value: 21
  misc_feature: MA Experiment 20000355 PARAMETER Experiment Name: At_Siliques_Sub_P Parameter: Organism Value: A. thaliana
  misc_feature: MA Experiment 20000355 PARAMETER Experiment Name: At_Siliques_Sub_P Parameter: Plant Line Value: WS
  misc_feature: MA Experiment 20000355 PARAMETER Experiment Name: At_Siliques_Sub_P Parameter: Tissue Value: Less Than 5mm Siliques vs. Whole Plant
aatcaccctgacgaagttgaaacaagcagcacaagaagaagacgaagcacgacgactctctcgcttccagatttcttgatccgatatttatattccctctgcccttgaaatcaaatctcttctcgaatttgtgctctagaaattataatctggcaatttgaagatcttgtgggtcacgacacaaacttataagcaagagcttagcattttcatcatctgctgaagaacgtatgggagaaactgttaaagagcgtggtgatggaagtgcagagctggttaaatccgtagctgataagcatgccggtctcgtgagaccagttgctaaatattactctgcagttaaagatgctatggtgtgtgggaaaggaagatatacgcttgtaaaagacgtagacgaggtggaaaatggagtgtatgacaagcctcttccatgctttggttgtggaatcggatggttctcctttctcttgggttttgtgttccctttcttatggtactatgcaacatttttatatttcgggaactactaccgcaaggatcctagagaaagagccggccttgctgcttccgcaatcactgggatgggattctccctcttgctactagtgattgttgttttctggtggctctaatgggttctctgacttatacgccataatcttgagatatatatgatggaaagtctcatccttgtcaaaggaaaaaggaggggacttagatatatatataaaccctatatacacagattatagttatacctctctcaagctctgtatcattttcttctcaaaaatctgcagtttgtgtacaaagaacagaaaatacaataataaatgagtaaatggttgttgc

SEQ ID NO: 29795 - protein, 133 aa, Arabidopsis thaliana
  peptide (1)..(133): Ceres Seq. ID no. 12332048
  misc_feature (1)..(130): Homolog of NCBI NO: 21593960 NR Description: unknown [Arabidopsis thaliana]
  misc_feature (9)..(132): Homolog of NCBI NO: 18423932 NR Description: putative protein
  misc_feature (9)..(132): Homolog of NCBI NO: 8777446 NR Description: gene_id:MHM17.20~pir||T04261~similar to unknown
  misc_feature (1)..(133): Homolog of NCBI NO: 15236106 NR Description: putative protein
  misc_feature (1)..(133): Homolog of NCBI NO: 21553625 NR Description: unknown [Arabidopsis thaliana]
MGETVKERGDGSAELVKSVADKHAGLVRPVAKYYSAVKDAMVCGKGRYTLVKDVDEVENGVYDKPLPCFGCGIGWFSFLLGFVFPFLWYYATFLYFGNYYRKDPRERAGLAASAITGMGFSLLLLVIVVFWWL

SEQ ID NO: 29796 - protein, 93 aa, Arabidopsis thaliana
  peptide (1)..(93): Ceres Seq. ID no. 12332049
  misc_feature (1)..(90): Homolog of NCBI NO: 21593960 NR Description: unknown [Arabidopsis thaliana]
  misc_feature (1)..(92): Homolog of NCBI NO: 18423932 NR Description: putative protein
  misc_feature (1)..(92): Homolog of NCBI NO: 8777446 NR Description: gene_id:MHM17.20~pir||T04261~similar to unknown
  misc_feature (1)..(93): Homolog of NCBI NO: 15236106 NR Description: putative protein
  misc_feature (1)..(93): Homolog of NCBI NO: 21553625 NR Description: unknown [Arabidopsis thaliana]
MVCGKGRYTLVKDVDEVENGVYDKPLPCFGCGIGWFSFLLGFVFPFLWYYATFLYFGNYYRKDPRERAGLAASAITGMGFSLLLLVIVVFWWL

SEQ ID NO: 29797 - protein, 66 aa, Arabidopsis thaliana
  peptide (1)..(66): Ceres Seq. ID no. 12332050
MECMTSLFHALVVESDGSPFSWVLCSLSYGTMQHFYISGTTTARILEKEPALLLPQSLGWDSPSCY

SEQ ID NO: 29798 - DNA, 912 bp, Arabidopsis thaliana
  misc_feature (1)..(912): Ceres Seq. ID no. 12333050
  misc_feature: MA Experiment ID: 108434 Result: Down-regulated in Transcription
  misc_feature: MA Experiment 108434 PARAMETER Experiment Name: At_Root_Tips_cDNA_P Parameter: Tissue Value: Root Tips
atttcctttgccagctccatctctctctctctctctaaaaccagtctgcaactttctctctctcaaaatcagaaacaaaaaaaacgatgtcgtccgatgacgaaggaggagaagagtatctattcaagatagtgataatcggcgactctgccgtcgggaaatcgaaccttctctctcgctatgctcgtaacgagttcaacgctcattccaaggccacgatcggcgtcgagttagagacgcagaatatggaaatcgaaggtaaagaagttaaagctcagatttgggatactgcttgtcaagaacggtttcgtgccgtcacttccgcttattatcgcggcgccgtcggagctctcgtcgtttacgatattagtcgtcgatccacgtttgagagtgttggtcgttggcttgatgagctcaagacacattcggatacaacggttgcgaggatgctggtgggaaacaaatgcgatctagaaagcataagagcggtgagcgtggaagaaggcaaagcactagctgaaaccgaaggactatttttcatggaaacatcagctctcgattcaacaaatgttaaaacagctttcgaaatggtaatccgtgacatctataccaatataagccggaaacaactcaactccgacacttataaaaccgaactaagcatgaaaaacagagtcagtctcgttaaggacgataataaaagctccacacaaggctttggtttctcttgctgttcttcctcgtgacctgaattttgatcccaaattatttttcttttgcttcatttgtggattttttttcttttgaatttttttcaaccatagaaaaaagggcagatcatatagattcaaaaattgtagtgtttatgtgtggatcgtatagtaaacaatttatacgataattatttattgc

SEQ ID NO: 29799 - protein, 219 aa, Arabidopsis thaliana
  peptide (1)..(219): Ceres Seq. ID no. 12333051
  misc_feature (14)..(175): Pfam Name: Ras family Pfam Description: Ras family
  misc_feature (2)..(218): Homolog of NCBI NO: 1370154 NR Description: RAB11G [Lotus japonicus]
  misc_feature (1)..(217): Homolog of NCBI NO: 15224226 NR Description: Ras-related GTP-binding protein (ARA-4)
  misc_feature (1)..(219): Homolog of NCBI NO: 17380746 NR Description: putative RAS-related protein ARA-1 [Arabidopsis
  misc_feature (1)..(219): Homolog of NCBI NO: 18390575 NR Description: RAS-related GTP-binding protein (ARA-1)
  misc_feature (1)..(219): Homolog of NCBI NO: 29893534 NR Description: putative RAS-related protein ARA-1 [Arabidopsis
  misc_feature (1)..(219): Homolog of NCBI NO: 1076457 NR Description: GTP-binding protein bra - rape
  misc_feature (1)..(219): Homolog of NCBI NO: 15225121 NR Description: GTP-binding protein, putative
  misc_feature (1)..(219): Homolog of NCBI NO: 21553627 NR Description: putative RAS superfamily GTP-binding protein
MSSDDEGGEEYLFKIVIIGDSAVGKSNLLSRYARNEFNAHSKATIGVELETQNMEIEGKEVKAQIWDTACQERFRAVTSAYYRGAVGALVVYDISRRSTFESVGRWLDELKTHSDTTVARMLVGNKCDLESIRAVSVEEGKALAETEGLFFMETSALDSTNVKTAFEMVIRDIYTNISRKQLNSDTYKTELSMKNRVSLVKDDNKSSTQGFGFSCCSSS

SEQ ID NO: 29800 - protein, 166 aa, Arabidopsis thaliana
  peptide (1)..(166): Ceres Seq. ID no. 12333052
  misc_feature (1)..(122): Pfam Name: Ras family Pfam Description: Ras family
  misc_feature (1)..(165): Homolog of NCBI NO: 1370154 NR Description: RAB11G [Lotus japonicus]
  misc_feature (1)..(164): Homolog of NCBI NO: 15224226 NR Description: Ras-related GTP-binding protein (ARA-4)
  misc_feature (1)..(166): Homolog of NCBI NO: 17380746 NR Description: putative RAS-related protein ARA-1 [Arabidopsis
  misc_feature (1)..(166): Homolog of NCBI NO: 18390575 NR Description: RAS-related GTP-binding protein (ARA-1)
  misc_feature (1)..(166): Homolog of NCBI NO: 29893534 NR Description: putative RAS-related protein ARA-1 [Arabidopsis
  misc_feature (1)..(166): Homolog of NCBI NO: 1076457 NR Description: GTP-binding protein bra - rape
  misc_feature (1)..(166): Homolog of NCBI NO: 15225121 NR Description: GTP-binding protein, putative
  misc_feature (1)..(166): Homolog of NCBI NO: 21553627 NR Description: putative RAS superfamily GTP-binding protein
MEIEGKEVKAQIWDTACQERFRAVTSAYYRGAVGALVVYDISRRSTFESVGRWLDELKTHSDTTVARMLVGNKCDLESIRAVSVEEGKALAETEGLFFMETSALDSTNVKTAFEMVIRDIYTNISRKQLNSDTYKTELSMKNRVSLVKDDNKSSTQGFGFSCCSSS

SEQ ID NO: 29801 - DNA, 594 bp, Arabidopsis thaliana
  misc_feature (1)..(594): Ceres Seq. ID no. 12333048
  misc_feature: MA Experiment ID: 108434 Result: Up-regulated in Transcription
  misc_feature: MA Experiment 108434 PARAMETER Experiment Name: At_Root_Tips_cDNA_P Parameter: Tissue Value: Root Tips
  misc_feature: MA Experiment ID: 108462 Result: Up-regulated in Transcription
  misc_feature: MA Experiment 108462 PARAMETER Experiment Name: At_Germinating_Seeds_cDNA_P Parameter: Age (day) Value: 2 vs. 0
  misc_feature: MA Experiment 108462 PARAMETER Experiment Name: At_Germinating_Seeds_cDNA_P Parameter: Tissue Value: Germinating Seeds
  misc_feature: MA Experiment ID: 108573 Result: Down-regulated in Transcription
  misc_feature: MA Experiment 108573 PARAMETER Experiment Name: At_Drought_cDNA_P Parameter: Timepoint (hr) Value: 6
  misc_feature: MA Experiment 108573 PARAMETER Experiment Name: At_Drought_cDNA_P Parameter: Tissue Value: Aerial
  misc_feature: MA Experiment 108573 PARAMETER Experiment Name: At_Drought_cDNA_P Parameter: Treatment Value: Drought vs. No Drought
  misc_feature: MA Experiment ID: 108577 Result: Down-regulated in Transcription
  misc_feature: MA Experiment 108577 PARAMETER Experiment Name: At_42deg_Heat_cDNA_P Parameter: Temperature (deg C) Value: 42 vs. 22
  misc_feature: MA Experiment 108577 PARAMETER Experiment Name: At_42deg_Heat_cDNA_P Parameter: Timepoint (hr) Value: 6
  misc_feature: MA Experiment 108577 PARAMETER Experiment Name: At_42deg_Heat_cDNA_P Parameter: Tissue Value: Aerial
  misc_feature: MA Experiment ID: 108585 Result: Down-regulated in Transcription
  misc_feature: MA Experiment 108585 PARAMETER Experiment Name: At_5mM_NaNP_cDNA_P Parameter: Timepoint (hr) Value: 6
  misc_feature: MA Experiment 108585 PARAMETER Experiment Name: At_5mM_NaNP_cDNA_P Parameter: Tissue Value: Aerial
  misc_feature: MA Experiment 108585 PARAMETER Experiment Name: At_5mM_NaNP_cDNA_P Parameter: Treatment Value: null
  misc_feature: MA Experiment ID: 20000071 Result: Down-regulated in Transcription
  misc_feature: MA Experiment 20000071 PARAMETER Experiment Name: At_100uM_ABA_Mutants_cDNA_P Parameter: Plant Line Value: CS8104
  misc_feature: MA Experiment 20000071 PARAMETER Experiment Name: At_100uM_ABA_Mutants_cDNA_P Parameter: Timepoint (hr) Value: 6
  misc_feature: MA Experiment 20000071 PARAMETER Experiment Name: At_100uM_ABA_Mutants_cDNA_P Parameter: Tissue Value: Aerial
  misc_feature: MA Experiment 20000071 PARAMETER Experiment Name: At_100uM_ABA_Mutants_cDNA_P Parameter: Treatment Value: 100uM ABA vs. No Treatment
  misc_feature: MA Experiment ID: 20000093 Result: Down-regulated in Transcription
  misc_feature: MA Experiment 20000093 PARAMETER Experiment Name: At_42deg_Heat_cDNA_P Parameter: Temperature (deg C) Value: 42 vs. 22
  misc_feature: MA Experiment 20000093 PARAMETER Experiment Name: At_42deg_Heat_cDNA_P Parameter: Timepoint (hr) Value: 0.5
  misc_feature: MA Experiment 20000093 PARAMETER Experiment Name: At_42deg_Heat_cDNA_P Parameter: Tissue Value: Aerial
  misc_feature: MA Experiment ID: 20000117 Result: Down-regulated in Transcription
  misc_feature: MA Experiment 20000117 PARAMETER Experiment Name: At_100uM_ABA_Mutants_cDNA_P Parameter: Plant Line Value: Columbia
  misc_feature: MA Experiment 20000117 PARAMETER Experiment Name: At_100uM_ABA_Mutants_cDNA_P Parameter: Timepoint (hr) Value: 6
  misc_feature: MA Experiment 20000117 PARAMETER Experiment Name: At_100uM_ABA_Mutants_cDNA_P Parameter: Tissue Value: Aerial
  misc_feature: MA Experiment 20000117 PARAMETER Experiment Name: At_100uM_ABA_Mutants_cDNA_P Parameter: Treatment Value: 100uM ABA vs. No Treatment
  misc_feature: MA Experiment ID: 20000179 Result: Up-regulated in Transcription
  misc_feature: MA Experiment 20000179 PARAMETER Experiment Name: At_Germinating_Seeds_P Parameter: Age (hr) Value: 6 vs. 0
  misc_feature: MA Experiment 20000179 PARAMETER Experiment Name: At_Germinating_Seeds_P Parameter: Tissue Value: Germinating Seeds
  misc_feature: MA Experiment ID: 20000180 Result: Up-regulated in Transcription
  misc_feature: MA Experiment 20000180 PARAMETER Experiment Name: At_Germinating_Seeds_P Parameter: Age (hr) Value: 24 vs. 0
  misc_feature: MA Experiment 20000180 PARAMETER Experiment Name: At_Germinating_Seeds_P Parameter: Tissue Value: Germinating Seeds
  misc_feature: MA Experiment ID: 20000224 Result: Down-regulated in Transcription
  misc_feature: MA Experiment ID: 20000451 Result: Down-regulated in Transcription
  misc_feature: MA Experiment 20000451 PARAMETER Experiment Name: At_CS6879_Shoots-Roots_P Parameter: Age (day) Value: 14
  misc_feature: MA Experiment 20000451 PARAMETER Experiment Name: At_CS6879_Shoots-Roots_P Parameter: Organism Value: A. thaliana
  misc_feature: MA Experiment 20000451 PARAMETER Experiment Name: At_CS6879_Shoots-Roots_P Parameter: Plant Line Value: CS6879 vs. WS
  misc_feature: MA Experiment 20000451 PARAMETER Experiment Name: At_CS6879_Shoots-Roots_P Parameter: Tissue Value: Roots
  misc_feature: MA Experiment ID: 20000794 Result: Down-regulated in Transcription
  misc_feature: MA Experiment 20000794 PARAMETER Experiment Name: At_Petals_P Parameter: Age (day) Value: 23-25 days
  misc_feature: MA Experiment 20000794 PARAMETER Experiment Name: At_Petals_P Parameter: Plant Line Value: WS
  misc_feature: MA Experiment 20000794 PARAMETER Experiment Name: At_Petals_P Parameter: Tissue Value: Petals vs. Whole plant
aatttcacatctttctcacccaaatctactcttaaccgttcttcttcttctacagacatcaatttctctcgagataaactaaatcttcgctgaaaaaatgtcgggtcgtggaaagggaggaaaaggtttgggtaagggaggagccaagcgtcacaggaaggttctgagagacaacatccaaggaatcaccaagcctgcgattcgaagattggctcgtagaggtggagtcaagcgtatcagtggtctcatctacgaggagactcgtggcgtcctcaagatctttctcgagaacgtgattcgtgatgctgtcacttacaccgagcacgctaggaggaagactgtgaccgccatggatgttgtctacgctctcaagaggcaaggaaggactctttacggattcggtggttaattagagtttttcagatccgcgtttgtgttttctgggtttctcacttaagcgtctgcgttttacttttgtattgggtttggcgtttagtagtttgcggtagcgttcttgttatgtgtaattacgctttttcttcttgcttcagcagtttcggttgaaatataaatcgaatcaagtttcactttaat

SEQ ID NO: 29802 - protein, 103 aa, Arabidopsis thaliana; identical to SEQ ID NO: 7737
  peptide (1)..(103): Ceres Seq. ID no. 12333049
  misc_feature (1)..(103): Homolog of NCBI NO: 462242 NR Description: Histone H4
  misc_feature (1)..(103): Homolog of NCBI NO: 37590121 NR Description: Hist1h4h protein [Mus musculus]
  misc_feature (1)..(103): Homolog of NCBI NO: 34858262 NR Description: similar to germinal histone H4 gene [Rattus
  misc_feature (1)..(103): Homolog of NCBI NO: 27692960 NR Description: Similar to germinal histone H4 gene [Mus musculus]
  misc_feature (1)..(103): Homolog of NCBI NO: 27692935 NR Description: Similar to germinal histone H4 gene [Mus musculus]
  misc_feature (1)..(103): Homolog of NCBI NO: 4504301 NR Description: H4 histone family, member A [Homo sapiens]
  misc_feature (1)..(103): Homolog of NCBI NO: 1806283 NR Description: Histone H4 homologue [Sesbania rostrata]
  misc_feature (1)..(103): Homolog of NCBI NO: 462243 NR Description: Histone H4
  misc_feature (1)..(103): Homolog of NCBI NO: 15226944 NR Description: histone H4
  misc_feature (1)..(103): Homolog of NCBI NO: 34876368 NR Description: similar to germinal histone H4 gene [Rattus

SEQ ID NO: 29803 - DNA, 1136 bp, Arabidopsis thaliana
  misc_feature (1)..(1136): Ceres Seq. ID no. 12330223
  misc_feature: MA Experiment ID: 108434 Result: Up-regulated in Transcription
  misc_feature: MA Experiment 108434 PARAMETER Experiment Name: At_Root_Tips_cDNA_P Parameter: Tissue Value: Root Tips
  misc_feature: MA Experiment ID: 20000185 Result: Up-regulated in Transcription
  misc_feature: MA Experiment 20000185 PARAMETER Experiment Name: At_Roots__P Parameter: Age (day) Value: 7 vs. 21
  misc_feature: MA Experiment 20000185 PARAMETER Experiment Name: At_Roots__P Parameter: Organism Value: A. thaliana
  misc_feature: MA Experiment 20000185 PARAMETER Experiment Name: At_Roots__P Parameter: Tissue Value: Roots vs. Whole Plant
  misc_feature: MA Experiment ID: 20000227 Result: Up-regulated in Transcription
  misc_feature: MA Experiment 20000227 PARAMETER Experiment Name: At_Root-Tips-vs-Tops_P Parameter: Tissue Value: Root Tips vs. Root Tops
  misc_feature: MA Experiment ID: 20000436 Result: Up-regulated in Transcription
  misc_feature: MA Experiment 20000436 PARAMETER Experiment Name: At_Drought_P Parameter: Age (day) Value: 7
  misc_feature: MA Experiment 20000436 PARAMETER Experiment Name: At_Drought_P Parameter: Organism Value: A. thaliana
  misc_feature: MA Experiment 20000436 PARAMETER Experiment Name: At_Drought_P Parameter: Plant Line Value: WS
  misc_feature: MA Experiment 20000436 PARAMETER Experiment Name: At_Drought_P Parameter: Timepoint (hr) Value: 12
  misc_feature: MA Experiment 20000436 PARAMETER Experiment Name: At_Drought_P Parameter: Tissue Value: Whole Plant
  misc_feature: MA Experiment 20000436 PARAMETER Experiment Name: At_Drought_P Parameter: Treatment Value: Drought vs. No Drought
  misc_feature: MA Experiment ID: 20000437 Result: Up-regulated in Transcription
  misc_feature: MA Experiment 20000437 PARAMETER Experiment Name: At_Drought_P Parameter: Age (day) Value: 8
  misc_feature: MA Experiment 20000437 PARAMETER Experiment Name: At_Drought_P Parameter: Organism Value: A. thaliana
  misc_feature: MA Experiment 20000437 PARAMETER Experiment Name: At_Drought_P Parameter: Plant Line Value: WS
  misc_feature: MA Experiment 20000437 PARAMETER Experiment Name: At_Drought_P Parameter: Timepoint (hr) Value: 24
  misc_feature: MA Experiment 20000437 PARAMETER Experiment Name: At_Drought_P Parameter: Tissue Value: Whole Plant
  misc_feature: MA Experiment 20000437 PARAMETER Experiment Name: At_Drought_P Parameter: Treatment Value: Drought vs. No Drought
  misc_feature: MA Experiment ID: 20001557 Result: Up-regulated in Transcription
  misc_feature: MA Experiment 20001557 PARAMETER Experiment Name: At_Drought_Soil_Dry_P Parameter: Age (day) Value: 27
  misc_feature: MA Experiment 20001557 PARAMETER Experiment Name: At_Drought_Soil_Dry_P Parameter: Organism Value: A. thaliana
  misc_feature: MA Experiment 20001557 PARAMETER Experiment Name: At_Drought_Soil_Dry_P Parameter: Plant Line Value: WS
  misc_feature: MA Experiment 20001557 PARAMETER Experiment Name: At_Drought_Soil_Dry_P Parameter: Post Timepoint (hr) Value: 3
  misc_feature: MA Experiment 20001557 PARAMETER Experiment Name: At_Drought_Soil_Dry_P Parameter: Post-Treatment Value: Re-Water vs. No Drought
  misc_feature: MA Experiment 20001557 PARAMETER Experiment Name: At_Drought_Soil_Dry_P Parameter: Timepoint (day) Value: 13
  misc_feature: MA Experiment 20001557 PARAMETER Experiment Name: At_Drought_Soil_Dry_P Parameter: Treatment Value: Drought vs. No Drought
  misc_feature: MA Experiment ID: 20001558 Result: Up-regulated in Transcription
  misc_feature: MA Experiment 20001558 PARAMETER Experiment Name: At_Drought_Soil_Dry_P Parameter: Age (day) Value: 27
  misc_feature: MA Experiment 20001558 PARAMETER Experiment Name: At_Drought_Soil_Dry_P Parameter: Organism Value: A. thaliana
  misc_feature: MA Experiment 20001558 PARAMETER Experiment Name: At_Drought_Soil_Dry_P Parameter: Plant Line Value: WS
  misc_feature: MA Experiment 20001558 PARAMETER Experiment Name: At_Drought_Soil_Dry_P Parameter: Post Timepoint (hr) Value: 6
  misc_feature: MA Experiment 20001558 PARAMETER Experiment Name: At_Drought_Soil_Dry_P Parameter: Post-Treatment Value: Re-Water vs. No Drought
  misc_feature: MA Experiment 20001558 PARAMETER Experiment Name: At_Drought_Soil_Dry_P Parameter: Timepoint (day) Value: 13
  misc_feature: MA Experiment 20001558 PARAMETER Experiment Name: At_Drought_Soil_Dry_P Parameter: Treatment Value: Drought vs. No Drought
atgctagtatgcttcaggttcaatcaccgccccattagattctctctccctctctaaagaccacacctttatgttccctctatatctatataagacgcaaacacagggaccattctcttcaaagacgagaaattataagttaggaaacgacaaagaccgatctatatatatatctcggagcaatatagctagcacaaacatgtttcagattggaaaaaacgcattattcaagaatgtgagcaagaacttccttatcaagggaatatcctcatcctcatcatctcattcaacttcaaggaagctagaaggtaaagtagcactcatcactggaggagcaagtgggattggcaaagcaacagccggaaaattcatcagtcatggagccaaagttatcattgccgatatccaaccgcagattgggcgagaaaccgagcaagaactcggtcccagttgtgcttacttcccatgcgatgtgaccaaagaatcagacattgctaacgcagttgacttcgctgtctcgctccatacaaagctcgacattatgtacaacaatgctggtattccctgcaaaacgcctcctagtatcgttgatcttgatctcaatgttttcgacaaggtaatcaacacaaatgtccgtggagtcatggcaggaatcaaacatgctgctcgtgtgatgatcccgcgtaactctggatccatcatttgtgcagggagtgtcacggggatgatgggcggtttagcccaacatacttacagcgtctcaaaatccgctgttatcggaattgtaagatcaacagcttcagaactatgcaagcacaggatccgggtcaactgcatttctccttttgcgatcacaacatcattcgtgatggatgagatgcgacagatttaccccggtgttgatgactcaaggctgatccagatagtgcagagtacaggagtgttaaatggagaggtttgtgaaccaaccgatgtagctaatgcagcggtgtatctcgcttccgatgattcaaagtatgtaaatgggcataatctggtggtagatggaggattcacaactgtaaagacgttagatttccctgcacctgaccaagtgaagtaacaaaactcataatatacaaagaaaactgttcttg

SEQ ID NO: 29804 - protein, 343 aa, Arabidopsis thaliana
  peptide (1)..(343): Ceres Seq. ID no. 12330224
  misc_feature (66)..(340): Homolog of NCBI NO: 34899190 NR Description: alcohol dehydrogenase-like protein
  misc_feature (61)..(336): Homolog of NCBI NO: 34899216 NR Description: alcohol dehydrogenase-like protein
  misc_feature (35)..(341): Homolog of NCBI NO: 34899188 NR Description: similar to alcohol dehydrogenase
  misc_feature (64)..(339): Homolog of NCBI NO: 33146507 NR Description: putative short-chain alcohol dehydrogenase
  misc_feature (74)..(339): Homolog of NCBI NO: 15529184 NR Description: AT3g26770/MDJ14_21 [Arabidopsis thaliana]
  misc_feature (74)..(339): Homolog of NCBI NO: 18405088 NR Description: putative short chain alcohol dehydrogenase
  misc_feature (55)..(338): Homolog of NCBI NO: 30688484 NR Description: short-chain dehydrogenase/reductase family
  misc_feature (177)..(343): Homolog of NCBI NO: 21618306 NR Description: unknown [Arabidopsis thaliana]
  misc_feature (76)..(343): Homolog of NCBI NO: 18412155 NR Description: putative alcohol dehydrogenase; protein id:
  misc_feature (76)..(343): Homolog of NCBI NO: 25283123 NR Description: probable alcohol dehydrogenase [imported] -
  misc_feature (66)..(340): Homolog of NCBI NO: 34899190 NR Description: alcohol dehydrogenase-like protein
  misc_feature (61)..(336): Homolog of NCBI NO: 34899216 NR Description: alcohol dehydrogenase-like protein
  misc_feature (35)..(341): Homolog of NCBI NO: 34899188 NR Description: similar to alcohol dehydrogenase
  misc_feature (64)..(339): Homolog of NCBI NO: 33146507 NR Description: putative short-chain alcohol dehydrogenase
  misc_feature (74)..(339): Homolog of NCBI NO: 15529184 NR Description: AT3g26770/MDJ14_21 [Arabidopsis thaliana]
  misc_feature (74)..(339): Homolog of NCBI NO: 18405088 NR Description: putative short chain alcohol dehydrogenase
  misc_feature (55)..(338): Homolog of NCBI NO: 30688484 NR Description: short-chain dehydrogenase/reductase family
  misc_feature (177)..(343): Homolog of NCBI NO: 21618306 NR Description: unknown [Arabidopsis thaliana]
  misc_feature (76)..(343): Homolog of NCBI NO: 18412155 NR Description: putative alcohol dehydrogenase; protein id:
  misc_feature (76)..(343): Homolog of NCBI NO: 25283123 NR Description: probable alcohol dehydrogenase [imported] -
MFPLYLYKTQTQGPFSSKTRNYKLGNDKDRSIYISRSNIASTNMFQIGKNALFKNVSKNFLIKGISSSSSSHSTSRKLEGKVALITGGASGIGKATAGKFISHGAKVIIADIQPQIGRETEQELGPSCAYFPCDVTKESDIANAVDFAVSLHTKLDIMYNNAGIPCKTPPSIVDLDLNVFDKVINTNVRGVMAGIKHAARVMIPRNSGSIICAGSVTGMMGGLAQHTYSVSKSAVIGIVRSTASELCKHRIRVNCISPFAITTSFVMDEMRQIYPGVDDSRLIQIVQSTGVLNGEVCEPTDVANAAVYLASDDSKYVNGHNLVVDGGFTTVKTLDFPAPDQVK

SEQ ID NO: 29805 - protein, 300 aa, Arabidopsis thaliana
  peptide (1)..(300): Ceres Seq. ID no. 12330225
  misc_feature (23)..(297): Homolog of NCBI NO: 34899190 NR Description: alcohol dehydrogenase-like protein
  misc_feature (18)..(293): Homolog of NCBI NO: 34899216 NR Description: alcohol dehydrogenase-like protein
  misc_feature (1)..(298): Homolog of NCBI NO: 34899188 NR Description: similar to alcohol dehydrogenase
  misc_feature (21)..(296): Homolog of NCBI NO: 33146507 NR Description: putative short-chain alcohol dehydrogenase
  misc_feature (31)..(296): Homolog of NCBI NO: 15529184 NR Description: AT3g26770/MDJ14_21 [Arabidopsis thaliana]
  misc_feature (31)..(296): Homolog of NCBI NO: 18405088 NR Description: putative short chain alcohol dehydrogenase
  misc_feature (12)..(295): Homolog of NCBI NO: 30688484 NR Description: short-chain dehydrogenase/reductase family
  misc_feature (134)..(300): Homolog of NCBI NO: 21618306 NR Description: unknown [Arabidopsis thaliana]
  misc_feature (33)..(300): Homolog of NCBI NO: 18412155 NR Description: putative alcohol dehydrogenase; protein id:
  misc_feature (33)..(300): Homolog of NCBI NO: 25283123 NR Description: probable alcohol dehydrogenase [imported] -
  misc_feature (23)..(297): Homolog of NCBI NO: 34899190 NR Description: alcohol dehydrogenase-like protein
  misc_feature (18)..(293): Homolog of NCBI NO: 34899216 NR Description: alcohol dehydrogenase-like protein
  misc_feature (1)..(298): Homolog of NCBI NO: 34899188 NR Description: similar to alcohol dehydrogenase
  misc_feature (21)..(296): Homolog of NCBI NO: 33146507 NR Description: putative short-chain alcohol dehydrogenase
  misc_feature (31)..(296): Homolog of NCBI NO: 15529184 NR Description: AT3g26770/MDJ14_21 [Arabidopsis thaliana]
  misc_feature (31)..(296): Homolog of NCBI NO: 18405088 NR Description: putative short chain alcohol dehydrogenase
  misc_feature (12)..(295): Homolog of NCBI NO: 30688484 NR Description: short-chain dehydrogenase/reductase family
  misc_feature (134)..(300): Homolog of NCBI NO: 21618306 NR Description: unknown [Arabidopsis thaliana]
  misc_feature (33)..(300): Homolog of NCBI NO: 18412155 NR Description: putative alcohol dehydrogenase; protein id:
  misc_feature (33)..(300): Homolog of NCBI NO: 25283123 NR Description: probable alcohol dehydrogenase [imported] -
MFQIGKNALFKNVSKNFLIKGISSSSSSHSTSRKLEGKVALITGGASGIGKATAGKFISHGAKVIIADIQPQIGRETEQELGPSCAYFPCDVTKESDIANAVDFAVSLHTKLDIMYNNAGIPCKTPPSIVDLDLNVFDKVINTNVRGVMAGIKHAARVMIPRNSGSIICAGSVTGMMGGLAQHTYSVSKSAVIGIVRSTASELCKHRIRVNCISPFAITTSFVMDEMRQIYPGVDDSRLIQIVQSTGVLNGEVCEPTDVANAAVYLASDDSKYVNGHNLVVDGGFTTVKTLDFPAPDQVK

SEQ ID NO: 29806 - protein, 186 aa, Arabidopsis thaliana
  peptide (1)..(186): Ceres Seq. ID no. 12330226
  misc_feature (1)..(183): Homolog of NCBI NO: 34899190 NR Description: alcohol dehydrogenase-like protein
  misc_feature (1)..(179): Homolog of NCBI NO: 34899216 NR Description: alcohol dehydrogenase-like protein
  misc_feature (1)..(184): Homolog of NCBI NO: 34899188 NR Description: similar to alcohol dehydrogenase
  misc_feature (1)..(182): Homolog of NCBI NO: 33146507 NR Description: putative short-chain alcohol dehydrogenase
  misc_feature (1)..(182): Homolog of NCBI NO: 15529184 NR Description: AT3g26770/MDJ14_21 [Arabidopsis thaliana]
  misc_feature (1)..(182): Homolog of NCBI NO: 18405088 NR Description: putative short chain alcohol dehydrogenase
  misc_feature (1)..(181): Homolog of NCBI NO: 30688484 NR Description: short-chain dehydrogenase/reductase family
  misc_feature (20)..(186): Homolog of NCBI NO: 21618306 NR Description: unknown [Arabidopsis thaliana]
  misc_feature (1)..(186): Homolog of NCBI NO: 18412155 NR Description: putative alcohol dehydrogenase; protein id:
  misc_feature (1)..(186): Homolog of NCBI NO: 25283123 NR Description: probable alcohol dehydrogenase [imported] -
  misc_feature (1)..(183): Homolog of NCBI NO: 34899190 NR Description: alcohol dehydrogenase-like protein
  misc_feature (1)..(179): Homolog of NCBI NO: 34899216 NR Description: alcohol dehydrogenase-like protein
  misc_feature (1)..(184): Homolog of NCBI NO: 34899188 NR Description: similar to alcohol dehydrogenase
  misc_feature (1)..(182): Homolog of NCBI NO: 33146507 NR Description: putative short-chain alcohol dehydrogenase
  misc_feature (1)..(182): Homolog of NCBI NO: 15529184 NR Description: AT3g26770/MDJ14_21 [Arabidopsis thaliana]
  misc_feature (1)..(182): Homolog of NCBI NO: 18405088 NR Description: putative short chain alcohol dehydrogenase
  misc_feature (1)..(181): Homolog of NCBI NO: 30688484 NR Description: short-chain dehydrogenase/reductase family
  misc_feature (20)..(186): Homolog of NCBI NO: 21618306 NR Description: unknown [Arabidopsis thaliana]
  misc_feature (1)..(186): Homolog of NCBI NO: 18412155 NR Description: putative alcohol dehydrogenase; protein id:
  misc_feature (1)..(186): Homolog of NCBI NO: 25283123 NR Description: probable alcohol dehydrogenase [imported] -
MYNNAGIPCKTPPSIVDLDLNVFDKVINTNVRGVMAGIKHAARVMIPRNSGSIICAGSVTGMMGGLAQHTYSVSKSAVIGIVRSTASELCKHRIRVNCISPFAITTSFVMDEMRQIYPGVDDSRLIQIVQSTGVLNGEVCEPTDVANAAVYLASDDSKYVNGHNLVVDGGFTTVKTLDFPAPDQVK

SEQ ID NO: 29807 - DNA, 820 bp, Arabidopsis thaliana
  misc_feature (1)..(820): Ceres Seq. ID no. 13490245
  misc_feature: MA Experiment ID: 108461 Result: Up-regulated in Transcription
  misc_feature: MA Experiment 108461 PARAMETER Experiment Name: At_Germinating_Seeds_cDNA_P Parameter: Age (day) Value: 1 vs. 0
  misc_feature: MA Experiment 108461 PARAMETER Experiment Name: At_Germinating_Seeds_cDNA_P Parameter: Tissue Value: Germinating Seeds
  misc_feature: MA Experiment ID: 108462 Result: Up-regulated in Transcription
  misc_feature: MA Experiment 108462 PARAMETER Experiment Name: At_Germinating_Seeds_cDNA_P Parameter: Age (day) Value: 2 vs. 0
  misc_feature: MA Experiment 108462 PARAMETER Experiment Name: At_Germinating_Seeds_cDNA_P Parameter: Tissue Value: Germinating Seeds
  misc_feature: MA Experiment ID: 108463 Result: Up-regulated in Transcription
  misc_feature: MA Experiment 108463 PARAMETER Experiment Name: At_Germinating_Seeds_cDNA_P Parameter: Age (day) Value: 3 vs. 0
  misc_feature: MA Experiment 108463 PARAMETER Experiment Name: At_Germinating_Seeds_cDNA_P Parameter: Tissue Value: Germinating Seeds
  misc_feature: MA Experiment ID: 20000180 Result: Up-regulated in Transcription
  misc_feature: MA Experiment 20000180 PARAMETER Experiment Name: At_Germinating_Seeds_P Parameter: Age (hr) Value: 24 vs. 0
  misc_feature: MA Experiment 20000180 PARAMETER Experiment Name: At_Germinating_Seeds_P Parameter: Tissue Value: Germinating Seeds
  misc_feature: MA Experiment ID: 20000185 Result: Up-regulated in Transcription
  misc_feature: MA Experiment 20000185 PARAMETER Experiment Name: At_Roots__P Parameter: Age (day) Value: 7 vs. 21
  misc_feature: MA Experiment 20000185 PARAMETER Experiment Name: At_Roots__P Parameter: Organism Value: A. thaliana
  misc_feature: MA Experiment 20000185 PARAMETER Experiment Name: At_Roots__P Parameter: Tissue Value: Roots vs. Whole Plant
  misc_feature: MA Experiment ID: 20000227 Result: Up-regulated in Transcription
  misc_feature: MA Experiment 20000227 PARAMETER Experiment Name: At_Root-Tips-vs-Tops_P Parameter: Tissue Value: Root Tips vs. Root Tops
  misc_feature: MA Experiment ID: 20000264 Result: Up-regulated in Transcription
  misc_feature: MA Experiment 20000264 PARAMETER Experiment Name: At_Open_Flower_P Parameter: Age (day) Value: 21
  misc_feature: MA Experiment 20000264 PARAMETER Experiment Name: At_Open_Flower_P Parameter: Plant Line Value: WS
  misc_feature: MA Experiment 20000264 PARAMETER Experiment Name: At_Open_Flower_P Parameter: Tissue Value: Open Flower vs. Whole Plant
  misc_feature: MA Experiment ID: 20000265 Result: Up-regulated in Transcription
  misc_feature: MA Experiment 20000265 PARAMETER Experiment Name: At_Open_Flower_P Parameter: Age (day) Value: 21
  misc_feature: MA Experiment 20000265 PARAMETER Experiment Name: At_Open_Flower_P Parameter: Plant Line Value: WS
  misc_feature: MA Experiment 20000265 PARAMETER Experiment Name: At_Open_Flower_P Parameter: Tissue Value: Closed Flower vs. Whole Plant
  misc_feature: MA Experiment ID: 20000286 Result: Up-regulated in Transcription
  misc_feature: MA Experiment 20000286 PARAMETER Experiment Name: At_Open_Flower_P Parameter: Age (day) Value: 21
  misc_feature: MA Experiment 20000286 PARAMETER Experiment Name: At_Open_Flower_P Parameter: Plant Line Value: WS
  misc_feature: MA Experiment 20000286 PARAMETER Experiment Name: At_Open_Flower_P Parameter: Tissue Value: Half Open vs. Whole Plant
  misc_feature: MA Experiment ID: 20000439 Result: Up-regulated in Transcription
  misc_feature: MA Experiment 20000439 PARAMETER Experiment Name: At_Roots__P Parameter: Age (day) Value: 14 vs. 21
  misc_feature: MA Experiment 20000439 PARAMETER Experiment Name: At_Roots__P Parameter: Organism Value: A. thaliana
  misc_feature: MA Experiment 20000439 PARAMETER Experiment Name: At_Roots__P Parameter: Tissue Value: Roots vs. Whole Plant
gagaagggagaaaactttctccgagctcgattgtttttggaaatcgtcaatcagatatttctcgttcgtctccgccttcgatttatccaaaggctcttgttattgaaaatggcagattccaccaaagcagggttgaagaagccagctttcactaaggttgatcagctgcgtcctgggactagcggacacaatgtcaatgtgaagattgtcagcacgaaaatggtgttacagaaaggtcgtgctgatggtcctcaagctcgccagttgcggatttctgaatgcattgttggtgacgagacaggagtgatcgtctttaccgcaagaaatgaccaagtggacttaatgaaagagggatcaactgtaactctacgcaatgcgaaaatcgacatgtataaaggatcaatgaggctagctgtagacaagtggggtcgtgttgaagtcacagagcctgcgagcttcaaagtgaaagaagacaccaacatgtcccttatcgagtatgagctcgtaaacgtcgttgaatgagtgacaaattcctcgaaataccactaggagaaacgccctcaagaataaacaagtcaaatccgtaaccgtttatgttagcgtcaagaaaagagttaaaccctgatcagctgatgtcttgcactaagctatgtaagagtgatgatggctctaaaagttgaatgcagagcttttggcttaggttatgacttcgtgataccttttcttttgtaatgtcatcatacacgctaaggcttttgtgctacattattactctctttgtctttgcctcgtttcaaaaaatccatattcttagtgaagc

SEQ ID NO: 29808 - protein, 173 aa, Arabidopsis thaliana
  peptide (1)..(173): Ceres Seq. ID no. 13490246
  misc_feature (88)..(143): Pfam Name: OB-fold nucleic acid binding domain Pfam Description: OB-fold nucleic acid binding domain
  misc_feature (37)..(171): Homolog of NCBI NO: 15235304 NR Description: expressed protein [Arabidopsis thaliana]
  misc_feature (45)..(173): Homolog of NCBI NO: 24413970 NR Description: contains EST AU181579(C50456)~similar to Oryza
  misc_feature (38)..(173): Homolog of NCBI NO: 34904470 NR Description: OSJNBa0086P08.14 [Oryza sativa (japonica
  misc_feature (46)..(173): Homolog of NCBI NO: 18403397 NR Description: expressed protein [Arabidopsis thaliana]
  misc_feature (37)..(171): Homolog of NCBI NO: 34909622 NR Description: P0435B05.31 [Oryza sativa (japonica
  misc_feature (112)..(171): Homolog of NCBI NO: 6573753 NR Description: F20B24.1 [Arabidopsis thaliana]
  misc_feature (33)..(111): Homolog of NCBI NO: 6573753 NR Description: F20B24.1 [Arabidopsis thaliana]
  misc_feature (37)..(171): Homolog of NCBI NO: 18391179 NR Description: expressed protein [Arabidopsis thaliana]
  misc_feature (33)..(171): Homolog of NCBI NO: 30681801 NR Description: expressed protein [Arabidopsis thaliana]
  misc_feature (37)..(173): Homolog of NCBI NO: 18395285 NR Description: expressed protein [Arabidopsis thaliana]
EKGENFLRARLFLEIVNQIFLVRLRLRFIQRLLLLKMADSTKAGLKKPAFTKVDQLRPGTSGHNVNVKIVSTKMVLQKGRADGPQARQLRISECIVGDETGVIVFTARNDQVDLMKEGSTVTLRNAKIDMYKGSMRLAVDKWGRVEVTEPASFKVKEDTNMSLIEYELVNVVE

SEQ ID NO: 29809 - protein, 137 aa, Arabidopsis thaliana
  peptide (1)..(137): Ceres Seq. ID no. 13490247
  misc_feature (52)..(107): Pfam Name: OB-fold nucleic acid binding domain Pfam Description: OB-fold nucleic acid binding domain
  misc_feature (1)..(135): Homolog of NCBI NO: 15235304 NR Description: expressed protein [Arabidopsis thaliana]
  misc_feature (9)..(137): Homolog of NCBI NO: 24413970 NR Description: contains EST AU181579(C50456)~similar to Oryza
  misc_feature (2)..(137): Homolog of NCBI NO: 34904470 NR Description: OSJNBa0086P08.14 [Oryza sativa (japonica
  misc_feature (10)..(137): Homolog of NCBI NO: 18403397 NR Description: expressed protein [Arabidopsis thaliana]
  misc_feature (1)..(135): Homolog of NCBI NO: 34909622 NR Description: P0435B05.31 [Oryza sativa (japonica
  misc_feature (76)..(135): Homolog of NCBI NO: 6573753 NR Description: F20B24.1 [Arabidopsis thaliana]
  misc_feature (1)..(75): Homolog of NCBI NO: 6573753 NR Description: F20B24.1 [Arabidopsis thaliana]
  misc_feature (1)..(135): Homolog of NCBI NO: 18391179 NR Description: expressed protein [Arabidopsis thaliana]
  misc_feature (1)..(135): Homolog of NCBI NO: 30681801 NR Description: expressed protein [Arabidopsis thaliana]
  misc_feature (1)..(137): Homolog of NCBI NO: 18395285 NR Description: expressed protein [Arabidopsis thaliana]
MADSTKAGLKKPAFTKVDQLRPGTSGHNVNVKIVSTKMVLQKGRADGPQARQLRISECIVGDETGVIVFTARNDQVDLMKEGSTVTLRNAKIDMYKGSMRLAVDKWGRVEVTEPASFKVKEDTNMSLIEYELVNVVE

SEQ ID NO: 29810 - protein, 100 aa, Arabidopsis thaliana
  peptide (1)..(100): Ceres Seq. ID no. 13490248
  misc_feature (15)..(70): Pfam Name: OB-fold nucleic acid binding domain Pfam Description: OB-fold nucleic acid binding domain
  misc_feature (1)..(98): Homolog of NCBI NO: 15235304 NR Description: expressed protein [Arabidopsis thaliana]
  misc_feature (1)..(100): Homolog of NCBI NO: 24413970 NR Description: contains EST AU181579(C50456)~similar to Oryza
  misc_feature (1)..(100): Homolog of NCBI NO: 34904470 NR Description: OSJNBa0086P08.14 [Oryza sativa (japonica
  misc_feature (1)..(100): Homolog of NCBI NO: 18403397 NR Description: expressed protein [Arabidopsis thaliana]
  misc_feature (1)..(98): Homolog of NCBI NO: 34909622 NR Description: P0435B05.31 [Oryza sativa (japonica
  misc_feature (39)..(98): Homolog of NCBI NO: 6573753 NR Description: F20B24.1 [Arabidopsis thaliana]
  misc_feature (1)..(38): Homolog of NCBI NO: 6573753 NR Description: F20B24.1 [Arabidopsis thaliana]
  misc_feature (1)..(98): Homolog of NCBI NO: 18391179 NR Description: expressed protein [Arabidopsis thaliana]
  misc_feature (1)..(98): Homolog of NCBI NO: 30681801 NR Description: expressed protein [Arabidopsis thaliana]
  misc_feature (1)..(100): Homolog of NCBI NO: 18395285 NR Description: expressed protein [Arabidopsis thaliana]
MVLQKGRADGPQARQLRISECIVGDETGVIVFTARNDQVDLMKEGSTVTLRNAKIDMYKGSMRLAVDKWGRVEVTEPASFKVKEDTNMSLIEYELVNVVE

SEQ ID NO: 29811 - DNA, 1026 bp, Arabidopsis thaliana
  misc_feature (1)..(1026): Ceres Seq. ID no. 13495944
  misc_feature: MA Experiment ID: 20001248 Result: Up-regulated in Transcription
  misc_feature: MA Experiment 20001248 PARAMETER Experiment Name: At_Far-red-induction_P Parameter: Age (day) Value: 7
  misc_feature: MA Experiment 20001248 PARAMETER Experiment Name: At_Far-red-induction_P Parameter: Light Value: Far-red vs. White
  misc_feature: MA Experiment 20001248 PARAMETER Experiment Name: At_Far-red-induction_P Parameter: Organism Value: A. thaliana
  misc_feature: MA Experiment 20001248 PARAMETER Experiment Name: At_Far-red-induction_P Parameter: Plant Line Value: Columbia
  misc_feature: MA Experiment 20001248 PARAMETER Experiment Name: At_Far-red-induction_P Parameter: Timepoint (hr) Value: 4
  misc_feature: MA Experiment 20001248 PARAMETER Experiment Name: At_Far-red-induction_P Parameter: Tissue Value: Whole Plant
agaaactgatttgataaaaaaaaatatcttcgttgaagtgagggtgacgagaagtttctgctttcatcaattaaaggtttacgcgtgaagcagatcatcagcaatggcggcgtcgcaagataagttggataagatgaaacttaggcaagattaccggaatttatggcactccgatctcatgggcaccgtcaccgccgacactccctattgctgcatctcgtgtctgtgtggaccttgtgtgtcatacatgcttcggagaagagcactttacaatgacatgtcaaggtatacttgctgtgctggatatatgccctgtagtggaaggtgtggagaaagcaaatgtcctcaactttgccttgccactgaggtcttcctttgcttcggaaactctgtggcctctacccgctttcttctgcaggatgaattcaacatccagacaacacaatgcgacaattgcataattggatttatgttctgcctcagccaagttgcttgcatattctctatagttgcttgcattgttggtagtgatgaactttccgaggcttctcagatactctcttgctgtgctgatatggtctactgcacggtctgcgcatgtatgcagacacaacacaaacttgagatggacaaaagagatggagtgtttggatcgcagccaatgggtgtgccaccagctcagcagatgtctcgttttgatcaacctgtccctcctccagtcggataccctcagtcctatccaccgcctgctcaaggctaccctcctgcatcttacccgcctcccggttatcctcagcattaagaaatttaaccagtatcttcattttatgtgtcaaagtgttgttgttacttggtttaggtgtgcagaactattatattgttcagctttgtcctctgcttatttctgcgatttatttattttgaggtattggtactctggttatgtctgaaaagcttttgctatcatcaactggtttgttgactttggtatttaagtaaagaaaaagaacaacatatgtattagct

SEQ ID NO: 29812 - protein, 232 aa, Arabidopsis thaliana
  peptide (1)..(232): Ceres Seq. ID no. 13495945
  misc_feature (173)..(232): Homolog of NCBI NO: 7485554 NR Description: hypothetical protein F16G20.180 - Arabidopsis
  misc_feature (185)..(232): Homolog of NCBI NO: 25446695 NR Description: Unknown protein [Oryza sativa (japonica
  misc_feature (1)..(45): Homolog of NCBI NO: 25446695 NR Description: Unknown protein [Oryza sativa (japonica
  misc_feature (64)..(231): Homolog of NCBI NO: 25446695 NR Description: Unknown protein [Oryza sativa (japonica
  misc_feature (5)..(162): Homolog of NCBI NO: 7485553 NR Description: hypothetical protein F16G20.170 - Arabidopsis
  misc_feature (1)..(213): Homolog of NCBI NO: 37536436 NR Description: hypothetical protein [Oryza sativa (japonica
  misc_feature (1)..(201): Homolog of NCBI NO: 15238071 NR Description: hypothetical protein [Arabidopsis thaliana]
  misc_feature (11)..(232): Homolog of NCBI NO: 21554542 NR Description: unknown [Arabidopsis thaliana]
  misc_feature (5)..(232): Homolog of NCBI NO: 22328885 NR Description: proline-rich protein family [Arabidopsis
  misc_feature (1)..(232): Homolog of NCBI NO: 15222552 NR Description: proline-rich protein family [Arabidopsis
MAASQDKLDKMKLRQDYRNLWHSDLMGTVTADTPYCCISCLCGPCVSYMLRRRALYNDMSRYTCCAGYMPCSGRCGESKCPQLCLATEVFLCFGNSVASTRFLLQDEFNIQTTQCDNCIIGFMFCLSQVACIFSIVACIVGSDELSEASQILSCCADMVYCTVCACMQTQHKLEMDKRDGVFGSQPMGVPPAQQMSRFDQPVPPPVGYPQSYPPPAQGYPPASYPPPGYPQH

SEQ ID NO: 29813 - protein, 222 aa, Arabidopsis thaliana
  peptide (1)..(222): Ceres Seq. ID no. 13495946
  misc_feature (163)..(222): Homolog of NCBI NO: 7485554 NR Description: hypothetical protein F16G20.180 - Arabidopsis
  misc_feature (175)..(222): Homolog of NCBI NO: 25446695 NR Description: Unknown protein [Oryza sativa (japonica
  misc_feature (1)..(35): Homolog of NCBI NO: 25446695 NR Description: Unknown protein [Oryza sativa (japonica
  misc_feature (54)..(221): Homolog of NCBI NO: 25446695 NR Description: Unknown protein [Oryza sativa (japonica
  misc_feature (1)..(152): Homolog of NCBI NO: 7485553 NR Description: hypothetical protein F16G20.170 - Arabidopsis
  misc_feature (1)..(203): Homolog of NCBI NO: 37536436 NR Description: hypothetical protein [Oryza sativa (japonica
  misc_feature (1)..(191): Homolog of NCBI NO: 15238071 NR Description: hypothetical protein [Arabidopsis thaliana]
  misc_feature (1)..(222): Homolog of NCBI NO: 21554542 NR Description: unknown [Arabidopsis thaliana]
  misc_feature (1)..(222): Homolog of NCBI NO: 22328885 NR Description: proline-rich protein family [Arabidopsis
  misc_feature (1)..(222): Homolog of NCBI NO: 15222552 NR Description: proline-rich protein family [Arabidopsis
MKLRQDYRNLWHSDLMGTVTADTPYCCISCLCGPCVSYMLRRRALYNDMSRYTCCAGYMPCSGRCGESKCPQLCLATEVFLCFGNSVASTRFLLQDEFNIQTTQCDNCIIGFMFCLSQVACIFSIVACIVGSDELSEASQILSCCADMVYCTVCACMQTQHKLEMDKRDGVFGSQPMGVPPAQQMSRFDQPVPPPVGYPQSYPPPAQGYPPASYPPPGYPQH

SEQ ID NO: 29814 - protein, 207 aa, Arabidopsis thaliana
  peptide (1)..(207): Ceres Seq. ID no. 13495947
  misc_feature (148)..(207): Homolog of NCBI NO: 7485554 NR Description: hypothetical protein F16G20.180 - Arabidopsis
  misc_feature (160)..(207): Homolog of NCBI NO: 25446695 NR Description: Unknown protein [Oryza sativa (japonica
  misc_feature (1)..(20): Homolog of NCBI NO: 25446695 NR Description: Unknown protein [Oryza sativa (japonica
  misc_feature (39)..(206): Homolog of NCBI NO: 25446695 NR Description: Unknown protein [Oryza sativa (japonica
  misc_feature (1)..(137): Homolog of NCBI NO: 7485553 NR Description: hypothetical protein F16G20.170 - Arabidopsis
  misc_feature (1)..(188): Homolog of NCBI NO: 37536436 NR Description: hypothetical protein [Oryza sativa (japonica
  misc_feature (1)..(176): Homolog of NCBI NO: 15238071 NR Description: hypothetical protein [Arabidopsis thaliana]
  misc_feature (1)..(207): Homolog of NCBI NO: 21554542 NR Description: unknown [Arabidopsis thaliana]
  misc_feature (1)..(207): Homolog of NCBI NO: 22328885 NR Description: proline-rich protein family [Arabidopsis
  misc_feature (1)..(207): Homolog of NCBI NO: 15222552 NR Description: proline-rich protein family [Arabidopsis
MGTVTADTPYCCISCLCGPCVSYMLRRRALYNDMSRYTCCAGYMPCSGRCGESKCPQLCLATEVFLCFGNSVASTRFLLQDEFNIQTTQCDNCIIGFMFCLSQVACIFSIVACIVGSDELSEASQILSCCADMVYCTVCACMQTQHKLEMDKRDGVFGSQPMGVPPAQQMSRFDQPVPPPVGYPQSYPPPAQGYPPASYPPPGYPQH

SEQ ID NO: 29815 - DNA, 873 bp, Arabidopsis thaliana; identical to SEQ ID NO: 21755
  misc_feature (1)..(873): Ceres Seq. ID no. 13497760
  misc_feature: MA Experiment ID: 108488 Result: Down-regulated in Transcription
  misc_feature: MA Experiment ID: 20000069 Result: Up-regulated in Transcription
  misc_feature: MA Experiment 20000069 PARAMETER Experiment Name: At_100uM_ABA_Mutants_cDNA_P Parameter: Plant Line Value: CS23
  misc_feature: MA Experiment 20000069 PARAMETER Experiment Name: At_100uM_ABA_Mutants_cDNA_P Parameter: Timepoint (hr) Value: 6
  misc_feature: MA Experiment 20000069 PARAMETER Experiment Name: At_100uM_ABA_Mutants_cDNA_P Parameter: Tissue Value: Aerial
  misc_feature: MA Experiment 20000069 PARAMETER Experiment Name: At_100uM_ABA_Mutants_cDNA_P Parameter: Treatment Value: 100uM ABA vs. No Treatment
  misc_feature: MA Experiment ID: 20000070 Result: Up-regulated in Transcription
  misc_feature: MA Experiment 20000070 PARAMETER Experiment Name: At_100uM_ABA_Mutants_cDNA_P Parameter: Plant Line Value: CS24
  misc_feature: MA Experiment 20000070 PARAMETER Experiment Name: At_100uM_ABA_Mutants_cDNA_P Parameter: Timepoint (hr) Value: 6
  misc_feature: MA Experiment 20000070 PARAMETER Experiment Name: At_100uM_ABA_Mutants_cDNA_P Parameter: Tissue Value: Aerial
  misc_feature: MA Experiment 20000070 PARAMETER Experiment Name: At_100uM_ABA_Mutants_cDNA_P Parameter: Treatment Value: 100uM ABA vs. No Treatment
  misc_feature: MA Experiment ID: 20000071 Result: Up-regulated in Transcription
  misc_feature: MA Experiment 20000071 PARAMETER Experiment Name: At_100uM_ABA_Mutants_cDNA_P Parameter: Plant Line Value: CS8104
  misc_feature: MA Experiment 20000071 PARAMETER Experiment Name: At_100uM_ABA_Mutants_cDNA_P Parameter: Timepoint (hr) Value: 6
  misc_feature: MA Experiment 20000071 PARAMETER Experiment Name: At_100uM_ABA_Mutants_cDNA_P Parameter: Tissue Value: Aerial
  misc_feature: MA Experiment 20000071 PARAMETER Experiment Name: At_100uM_ABA_Mutants_cDNA_P Parameter: Treatment Value: 100uM ABA vs. No Treatment
  misc_feature: MA Experiment ID: 20000072 Result: Up-regulated in Transcription
  misc_feature: MA Experiment 20000072 PARAMETER Experiment Name: At_100uM_ABA_Mutants_cDNA_P Parameter: Plant Line Value: CS8105
  misc_feature: MA Experiment 20000072 PARAMETER Experiment Name: At_100uM_ABA_Mutants_cDNA_P Parameter: Timepoint (hr) Value: 6
  misc_feature: MA Experiment 20000072 PARAMETER Experiment Name: At_100uM_ABA_Mutants_cDNA_P Parameter: Tissue Value: Aerial
  misc_feature: MA Experiment 20000072 PARAMETER Experiment Name: At_100uM_ABA_Mutants_cDNA_P Parameter: Treatment Value: 100uM ABA vs. No Treatment
  misc_feature: MA Experiment ID: 20000086 Result: Up-regulated in Transcription
  misc_feature: MA Experiment 20000086 PARAMETER Experiment Name: At_100uM_ABA_Mutants_cDNA_P Parameter: Plant Line Value: CS22
  misc_feature: MA Experiment 20000086 PARAMETER Experiment Name: At_100uM_ABA_Mutants_cDNA_P Parameter: Timepoint (hr) Value: 6
  misc_feature: MA Experiment 20000086 PARAMETER Experiment Name: At_100uM_ABA_Mutants_cDNA_P Parameter: Tissue Value: Aerial
  misc_feature: MA Experiment 20000086 PARAMETER Experiment Name: At_100uM_ABA_Mutants_cDNA_P Parameter: Treatment Value: 100uM ABA vs. No Treatment
  misc_feature: MA Experiment ID: 20000087 Result: Up-regulated in Transcription
  misc_feature: MA Experiment 20000087 PARAMETER Experiment Name: At_100uM_ABA_Mutants_cDNA_P Parameter: Plant Line Value: WS
  misc_feature: MA Experiment 20000087 PARAMETER Experiment Name: At_100uM_ABA_Mutants_cDNA_P Parameter: Timepoint (hr) Value: 6
  misc_feature: MA Experiment 20000087 PARAMETER Experiment Name: At_100uM_ABA_Mutants_cDNA_P Parameter: Tissue Value: Aerial
  misc_feature: MA Experiment 20000087 PARAMETER Experiment Name: At_100uM_ABA_Mutants_cDNA_P Parameter: Treatment Value: 100uM ABA vs. No Treatment
  misc_feature: MA Experiment ID: 20000089 Result: Up-regulated in Transcription
  misc_feature: MA Experiment ID: 20000090 Result: Up-regulated in Transcription
  misc_feature: MA Experiment ID: 20000117 Result: Up-regulated in Transcription
  misc_feature: MA Experiment 20000117 PARAMETER Experiment Name: At_100uM_ABA_Mutants_cDNA_P Parameter: Plant Line Value: Columbia
  misc_feature: MA Experiment 20000117 PARAMETER Experiment Name: At_100uM_ABA_Mutants_cDNA_P Parameter: Timepoint (hr) Value: 6
  misc_feature: MA Experiment 20000117 PARAMETER Experiment Name: At_100uM_ABA_Mutants_cDNA_P Parameter: Tissue Value: Aerial
  misc_feature: MA Experiment 20000117 PARAMETER Experiment Name: At_100uM_ABA_Mutants_cDNA_P Parameter: Treatment Value: 100uM ABA vs. No Treatment
  misc_feature: MA Experiment ID: 20000171 Result: Down-regulated in Transcription
  misc_feature: MA Experiment 20000171 PARAMETER Experiment Name: At_42deg_Heat_P Parameter: Age (day) Value: 14
  misc_feature: MA Experiment 20000171 PARAMETER Experiment Name: At_42deg_Heat_P Parameter: Organism Value: A. thaliana
  misc_feature: MA Experiment 20000171 PARAMETER Experiment Name: At_42deg_Heat_P Parameter: Plant Line Value: WS
  misc_feature: MA Experiment 20000171 PARAMETER Experiment Name: At_42deg_Heat_P Parameter: Temperature (deg C) Value: 42 vs. 22
  misc_feature: MA Experiment 20000171 PARAMETER Experiment Name: At_42deg_Heat_P Parameter: Timepoint (hr) Value: 1
  misc_feature: MA Experiment 20000171 PARAMETER Experiment Name: At_42deg_Heat_P Parameter: Tissue Value: Aerial
  misc_feature: MA Experiment ID: 20000173 Result: Down-regulated in Transcription
  misc_feature: MA Experiment 20000173 PARAMETER Experiment Name: At_42deg_Heat_P Parameter: Age (day) Value: 14
  misc_feature: MA Experiment 20000173 PARAMETER Experiment Name: At_42deg_Heat_P Parameter: Organism Value: A. thaliana
  misc_feature: MA Experiment 20000173 PARAMETER Experiment Name: At_42deg_Heat_P Parameter: Plant Line Value: WS
  misc_feature: MA Experiment 20000173 PARAMETER Experiment Name: At_42deg_Heat_P Parameter: Temperature (deg C) Value: 42 vs. 22
  misc_feature: MA Experiment 20000173 PARAMETER Experiment Name: At_42deg_Heat_P Parameter: Timepoint (hr) Value: 6
  misc_feature: MA Experiment 20000173 PARAMETER Experiment Name: At_42deg_Heat_P Parameter: Tissue Value: Aerial
  misc_feature: MA Experiment ID: 20000184 Result: Down-regulated in Transcription
  misc_feature: MA Experiment 20000184 PARAMETER Experiment Name: At_Shoots__P Parameter: Age (day) Value: 7
  misc_feature: MA Experiment 20000184 PARAMETER Experiment Name: At_Shoots__P Parameter: Tissue Value: Shoots vs. Whole Plant
  misc_feature: MA Experiment ID: 20000234 Result: Down-regulated in Transcription
  misc_feature: MA Experiment 20000234 PARAMETER Experiment Name: At_Siliques_P Parameter: Age (day) Value: 21
  misc_feature: MA Experiment 20000234 PARAMETER Experiment Name: At_Siliques_P Parameter: Organism Value: A. thaliana
  misc_feature: MA Experiment 20000234 PARAMETER Experiment Name: At_Siliques_P Parameter: Plant Line Value: WS
  misc_feature: MA Experiment 20000234 PARAMETER Experiment Name: At_Siliques_P Parameter: Tissue Value: Less Than 5mm Siliques vs. Whole Plant
  misc_feature: MA Experiment ID: 20000235 Result: Down-regulated in Transcription
  misc_feature: MA Experiment 20000235 PARAMETER Experiment Name: At_Siliques_P Parameter: Age (day) Value: 21
  misc_feature: MA Experiment 20000235 PARAMETER Experiment Name: At_Siliques_P Parameter: Organism Value: A. thaliana
  misc_feature: MA Experiment 20000235 PARAMETER Experiment Name: At_Siliques_P Parameter: Plant Line Value: WS
  misc_feature: MA Experiment 20000235 PARAMETER Experiment Name: At_Siliques_P Parameter: Tissue Value: 5-10mm Siliques vs. Whole Plant
  misc_feature: MA Experiment ID: 20000436 Result: Up-regulated in Transcription
  misc_feature: MA Experiment 20000436 PARAMETER Experiment Name: At_Drought_P Parameter: Age (day) Value: 7
  misc_feature: MA Experiment 20000436 PARAMETER Experiment Name: At_Drought_P Parameter: Organism Value: A. thaliana
  misc_feature: MA Experiment 20000436 PARAMETER Experiment Name: At_Drought_P Parameter: Plant Line Value: WS
  misc_feature: MA Experiment 20000436 PARAMETER Experiment Name: At_Drought_P Parameter: Timepoint (hr) Value: 12
  misc_feature: MA Experiment 20000436 PARAMETER Experiment Name: At_Drought_P Parameter: Tissue Value: Whole Plant
  misc_feature: MA Experiment 20000436 PARAMETER Experiment Name: At_Drought_P Parameter: Treatment Value: Drought vs. No Drought
  misc_feature: MA Experiment ID: 20000437 Result: Up-regulated in Transcription
  misc_feature: MA Experiment 20000437 PARAMETER Experiment Name: At_Drought_P Parameter: Age (day) Value: 8
  misc_feature: MA Experiment 20000437 PARAMETER Experiment Name: At_Drought_P Parameter: Organism Value: A. thaliana
  misc_feature: MA Experiment 20000437 PARAMETER Experiment Name: At_Drought_P Parameter: Plant Line Value: WS
  misc_feature: MA Experiment 20000437 PARAMETER Experiment Name: At_Drought_P Parameter: Timepoint (hr) Value: 24
  misc_feature: MA Experiment 20000437 PARAMETER Experiment Name: At_Drought_P Parameter: Tissue Value: Whole Plant
  misc_feature: MA Experiment 20000437 PARAMETER Experiment Name: At_Drought_P Parameter: Treatment Value: Drought vs. No Drought
  misc_feature: MA Experiment ID: 20000438 Result: Down-regulated in Transcription
  misc_feature: MA Experiment 20000438 PARAMETER Experiment Name: At_Shoots__P Parameter: Age (day) Value: 14
  misc_feature: MA Experiment 20000438 PARAMETER Experiment Name: At_Shoots__P Parameter: Tissue Value: Shoots vs. Whole Plant
  misc_feature: MA Experiment ID: 20000439 Result: Down-regulated in Transcription
  misc_feature: MA Experiment 20000439 PARAMETER Experiment Name: At_Roots__P Parameter: Age (day) Value: 14 vs. 21
  misc_feature: MA Experiment 20000439 PARAMETER Experiment Name: At_Roots__P Parameter: Organism Value: A. thaliana
  misc_feature: MA Experiment 20000439 PARAMETER Experiment Name: At_Roots__P Parameter: Tissue Value: Roots vs. Whole Plant
  misc_feature: MA Experiment ID: 20000495 Result: Down-regulated in Transcription
  misc_feature: MA Experiment 20000495 PARAMETER Experiment Name: At_Guard_Cells_P Parameter: Harvest Date Value: 8/2/2002
  misc_feature: MA Experiment 20000495 PARAMETER Experiment Name: At_Guard_Cells_P Parameter: Organism Value: A. thaliana
  misc_feature: MA Experiment 20000495 PARAMETER Experiment Name: At_Guard_Cells_P Parameter: Tissue Value: Guard Cells vs. Leaves
  misc_feature: MA Experiment ID: 20001451 Result: Down-regulated in Transcription
  misc_feature: MA Experiment 20001451 PARAMETER Experiment Name: At_Far-red-induction_P Parameter: Age (day) Value: 7
  misc_feature: MA Experiment 20001451 PARAMETER Experiment Name: At_Far-red-induction_P Parameter: Light Value: Far-red vs. White
  misc_feature: MA Experiment 20001451 PARAMETER Experiment Name: At_Far-red-induction_P Parameter: Organism Value: A. thaliana
  misc_feature: MA Experiment 20001451 PARAMETER Experiment Name: At_Far-red-induction_P Parameter: Plant Line Value: Columbia
  misc_feature: MA Experiment 20001451 PARAMETER Experiment Name: At_Far-red-induction_P Parameter: Timepoint (hr) Value: 24
  misc_feature: MA Experiment 20001451 PARAMETER Experiment Name: At_Far-red-induction_P Parameter: Tissue Value: Whole Plant
  misc_feature: MA Experiment ID: 20001558 Result: Down-regulated in Transcription
  misc_feature: MA Experiment 20001558 PARAMETER Experiment Name: At_Drought_Soil_Dry_P Parameter: Age (day) Value: 27
  misc_feature: MA Experiment 20001558 PARAMETER Experiment Name: At_Drought_Soil_Dry_P Parameter: Organism Value: A. thaliana
  misc_feature: MA Experiment 20001558 PARAMETER Experiment Name: At_Drought_Soil_Dry_P Parameter: Plant Line Value: WS
  misc_feature: MA Experiment 20001558 PARAMETER Experiment Name: At_Drought_Soil_Dry_P Parameter: Post Timepoint (hr) Value: 6
  misc_feature: MA Experiment 20001558 PARAMETER Experiment Name: At_Drought_Soil_Dry_P Parameter: Post-Treatment Value: Re-Water vs. No Drought
  misc_feature: MA Experiment 20001558 PARAMETER Experiment Name: At_Drought_Soil_Dry_P Parameter: Timepoint (day) Value: 13
  misc_feature: MA Experiment 20001558 PARAMETER Experiment Name: At_Drought_Soil_Dry_P Parameter: Treatment Value: Drought vs. No Drought
  misc_feature: MA Experiment ID: 20001560 Result: Down-regulated in Transcription
  misc_feature: MA Experiment 20001560 PARAMETER Experiment Name: At_Drought_Soil_Dry_P Parameter: Age (day) Value: 28
  misc_feature: MA Experiment 20001560 PARAMETER Experiment Name: At_Drought_Soil_Dry_P Parameter: Organism Value: A. thaliana
  misc_feature: MA Experiment 20001560 PARAMETER Experiment Name: At_Drought_Soil_Dry_P Parameter: Plant Line Value: WS
  misc_feature: MA Experiment 20001560 PARAMETER Experiment Name: At_Drought_Soil_Dry_P Parameter: Post Timepoint (hr) Value: None
  misc_feature: MA Experiment 20001560 PARAMETER Experiment Name: At_Drought_Soil_Dry_P Parameter: Post-Treatment Value: None
  misc_feature: MA Experiment 20001560 PARAMETER Experiment Name: At_Drought_Soil_Dry_P Parameter: Timepoint (day) Value: 14
  misc_feature: MA Experiment 20001560 PARAMETER Experiment Name: At_Drought_Soil_Dry_P Parameter: Treatment Value: Drought vs. No Drought

SEQ ID NO: 29816 - protein, 200 aa, Arabidopsis thaliana; identical to SEQ ID NO: 21756
  peptide (1)..(200): Ceres Seq. ID no. 13497761
  misc_feature (113)..(154): Pfam Name: Zinc finger, C3HC4 type (RING finger) Pfam Description: Zinc finger, C3HC4 type (RING finger)
  misc_feature (113)..(154): Pfam Name: Zinc finger, C3HC4 type (RING finger) Pfam Description: Zinc finger, C3HC4 type (RING finger)
  misc_feature (113)..(154): Pfam Name: Zinc finger, C3HC4 type (RING finger) Pfam Description: Zinc finger, C3HC4 type (RING finger)
  misc_feature (10)..(182): Homolog of NCBI NO: 15222073 NR Description: RING-H2 finger protein RHA3a -related
  misc_feature (20)..(188): Homolog of NCBI NO: 9293902 NR Description: contains similarity to RING zinc finger
  misc_feature (6)..(167): Homolog of NCBI NO: 21555237 NR Description: putative RING zinc finger protein [Arabidopsis
  misc_feature (6)..(167): Homolog of NCBI NO: 15223041 NR Description: RING zinc finger protein -related [Arabidopsis
  misc_feature (1)..(164): Homolog of NCBI NO: 7489432 NR Description: probable ring finger protein - barley
  misc_feature (10)..(182): Homolog of NCBI NO: 15222073 NR Description: RING-H2 finger protein RHA3a -related
  misc_feature (6)..(167): Homolog of NCBI NO: 21555237 NR Description: putative RING zinc finger protein [Arabidopsis
  misc_feature (1)..(164): Homolog of NCBI NO: 7489432 NR Description: probable ring finger protein - barley
  misc_feature (6)..(167): Homolog of NCBI NO: 15223041 NR Description: RING zinc finger protein -related [Arabidopsis
  misc_feature (6)..(167): Homolog of NCBI NO: 21555237 NR Description: putative RING zinc finger protein [Arabidopsis
  misc_feature (20)..(188): Homolog of NCBI NO: 9293902 NR Description: contains similarity to RING zinc finger
  misc_feature (10)..(182): Homolog of NCBI NO: 15222073 NR Description: RING-H2 finger protein RHA3a -related
  misc_feature (1)..(200): Homolog of NCBI NO: 15237013 NR Description: RING-H2 finger protein RHA3b [Arabidopsis
  misc_feature (1)..(200): Homolog of NCBI NO: 15227839 NR Description: RING zinc finger protein -related [Arabidopsis
  misc_feature (10)..(181): Homolog of NCBI NO: 15218042 NR Description: RING zinc finger protein -related [Arabidopsis
  misc_feature (71)..(166): Homolog of NCBI NO: 37536508 NR Description: putative ring finger protein
  misc_feature (1)..(68): Homolog of NCBI NO: 37536508 NR Description: putative ring finger protein
  misc_feature (1)..(200): Homolog of NCBI NO: 15237013 NR Description: RING-H2 finger protein RHA3b [Arabidopsis
  misc_feature (1)..(200): Homolog of NCBI NO: 15227839 NR Description: RING zinc finger protein -related [Arabidopsis
  misc_feature (10)..(181): Homolog of NCBI NO: 15218042 NR Description: RING zinc finger protein -related [Arabidopsis
  misc_feature (71)..(166): Homolog of NCBI NO: 37536508 NR Description: putative ring finger protein
  misc_feature (1)..(68): Homolog of NCBI NO: 37536508 NR Description: putative ring finger protein
  misc_feature (1)..(164): Homolog of NCBI NO: 7489432 NR Description: probable ring finger protein - barley
  misc_feature (6)..(167): Homolog of NCBI NO: 15223041 NR Description: RING zinc finger protein -related [Arabidopsis
  misc_feature (20)..(188): Homolog of NCBI NO: 9293902 NR Description: contains similarity to RING zinc finger
  misc_feature (1)..(68): Homolog of NCBI NO: 37536508 NR Description: putative ring finger protein
  misc_feature (71)..(166): Homolog of NCBI NO: 37536508 NR Description: putative ring finger protein
  misc_feature (10)..(181): Homolog of NCBI NO: 15218042 NR Description: RING zinc finger protein -related [Arabidopsis
  misc_feature (1)..(200): Homolog of NCBI NO: 15227839 NR Description: RING zinc finger protein -related [Arabidopsis
  misc_feature (1)..(200): Homolog of NCBI NO: 15237013 NR Description: RING-H2 finger protein RHA3b [Arabidopsis

SEQ ID NO: 29817 - protein, 175 aa, Arabidopsis thaliana; identical to SEQ ID NO: 21757
  peptide (1)..(175): Ceres Seq. ID no. 13497762
  misc_feature (88)..(129): Pfam Name: Zinc finger, C3HC4 type (RING finger) Pfam Description: Zinc finger, C3HC4 type (RING finger)
  misc_feature (88)..(129): Pfam Name: Zinc finger, C3HC4 type (RING finger) Pfam Description: Zinc finger, C3HC4 type (RING finger)
  misc_feature (88)..(129): Pfam Name: Zinc finger, C3HC4 type (RING finger) Pfam Description: Zinc finger, C3HC4 type (RING finger)
  misc_feature (1)..(157): Homolog of NCBI NO: 15222073 NR Description: RING-H2 finger protein RHA3a -related
  misc_feature (1)..(163): Homolog of NCBI NO: 9293902 NR Description: contains similarity to RING zinc finger
  misc_feature (1)..(142): Homolog of NCBI NO: 21555237 NR Description: putative RING zinc finger protein [Arabidopsis
  misc_feature (1)..(142): Homolog of NCBI NO: 15223041 NR Description: RING zinc finger protein -related [Arabidopsis
  misc_feature (1)..(139): Homolog of NCBI NO: 7489432 NR Description: probable ring finger protein - barley
  misc_feature (1)..(157): Homolog of NCBI NO: 15222073 NR Description: RING-H2 finger protein RHA3a -related
  misc_feature (1)..(142): Homolog of NCBI NO: 21555237 NR Description: putative RING zinc finger protein [Arabidopsis
  misc_feature (1)..(139): Homolog of NCBI NO: 7489432 NR Description: probable ring finger protein - barley
  misc_feature (1)..(142): Homolog of NCBI NO: 15223041 NR Description: RING zinc finger protein -related [Arabidopsis
  misc_feature (1)..(142): Homolog of NCBI NO: 21555237 NR Description: putative RING zinc finger protein [Arabidopsis
  misc_feature (1)..(163): Homolog of NCBI NO: 9293902 NR Description: contains similarity to RING zinc finger
  misc_feature (1)..(157): Homolog of NCBI NO: 15222073 NR Description: RING-H2 finger protein RHA3a -related
  misc_feature (1)..(175): Homolog of NCBI NO: 15237013 NR Description: RING-H2 finger protein RHA3b [Arabidopsis
  misc_feature (1)..(175): Homolog of NCBI NO: 15227839 NR Description: RING zinc finger protein -related [Arabidopsis
  misc_feature (1)..(156): Homolog of NCBI NO: 15218042 NR Description: RING zinc finger protein -related [Arabidopsis
  misc_feature (46)..(141): Homolog of NCBI NO: 37536508 NR Description: putative ring finger protein
  misc_feature (1)..(43): Homolog of NCBI NO: 37536508 NR Description: putative ring finger protein
  misc_feature (1)..(175): Homolog of NCBI NO: 15237013 NR Description: RING-H2 finger protein RHA3b [Arabidopsis
  misc_feature (1)..(175): Homolog of NCBI NO: 15227839 NR Description: RING zinc finger protein -related [Arabidopsis
  misc_feature (1)..(156): Homolog of NCBI NO: 15218042 NR Description: RING zinc finger protein -related [Arabidopsis
  misc_feature (46)..(141): Homolog of NCBI NO: 37536508 NR Description: putative ring finger protein
  misc_feature (1)..(43): Homolog of NCBI NO: 37536508 NR Description: putative ring finger protein
  misc_feature (1)..(139): Homolog of NCBI NO: 7489432 NR Description: probable ring finger protein - barley
  misc_feature (1)..(142): Homolog of NCBI NO: 15223041 NR Description: RING zinc finger protein -related [Arabidopsis
  misc_feature (1)..(163): Homolog of NCBI NO: 9293902 NR Description: contains similarity to RING zinc finger
  misc_feature (1)..(43): Homolog of NCBI NO: 37536508 NR Description: putative ring finger protein
  misc_feature (46)..(141): Homolog of NCBI NO: 37536508 NR Description: putative ring finger protein
  misc_feature (1)..(156): Homolog of NCBI NO: 15218042 NR Description: RING zinc finger protein -related [Arabidopsis
  misc_feature (1)..(175): Homolog of NCBI NO: 15227839 NR Description: RING zinc finger protein -related [Arabidopsis
  misc_feature (1)..(175): Homolog of NCBI NO: 15237013 NR Description: RING-H2 finger protein RHA3b [Arabidopsis

SEQ ID NO: 29818 - DNA, 608 bp, Arabidopsis thaliana
  misc_feature (1)..(608): Ceres Seq. ID no. 12397109
  misc_feature: MA Experiment ID: 108434 Result: Down-regulated in Transcription
  misc_feature: MA Experiment 108434 PARAMETER Experiment Name: At_Root_Tips_cDNA_P Parameter: Tissue Value: Root Tips
  misc_feature: MA Experiment ID: 108461 Result: Up-regulated in Transcription
  misc_feature: MA Experiment 108461 PARAMETER Experiment Name: At_Germinating_Seeds_cDNA_P Parameter: Age (day) Value: 1 vs. 0
  misc_feature: MA Experiment 108461 PARAMETER Experiment Name: At_Germinating_Seeds_cDNA_P Parameter: Tissue Value: Germinating Seeds
  misc_feature: MA Experiment ID: 108462 Result: Up-regulated in Transcription
  misc_feature: MA Experiment 108462 PARAMETER Experiment Name: At_Germinating_Seeds_cDNA_P Parameter: Age (day) Value: 2 vs. 0
  misc_feature: MA Experiment 108462 PARAMETER Experiment Name: At_Germinating_Seeds_cDNA_P Parameter: Tissue Value: Germinating Seeds
  misc_feature: MA Experiment ID: 108463 Result: Up-regulated in Transcription
  misc_feature: MA Experiment 108463 PARAMETER Experiment Name: At_Germinating_Seeds_cDNA_P Parameter: Age (day) Value: 3 vs. 0
  misc_feature: MA Experiment 108463 PARAMETER Experiment Name: At_Germinating_Seeds_cDNA_P Parameter: Tissue Value: Germinating Seeds
  misc_feature: MA Experiment ID: 108464 Result: Up-regulated in Transcription
  misc_feature: MA Experiment 108464 PARAMETER Experiment Name: At_Germinating_Seeds_cDNA_P Parameter: Age (day) Value: 4 vs. 0
  misc_feature: MA Experiment 108464 PARAMETER Experiment Name: At_Germinating_Seeds_cDNA_P Parameter: Tissue Value: Germinating Seeds
  misc_feature: MA Experiment ID: 108469 Result: Up-regulated in Transcription
  misc_feature: MA Experiment ID: 108488 Result: Down-regulated in Transcription
  misc_feature: MA Experiment ID: 108501 Result: Down-regulated in Transcription
  misc_feature: MA Experiment 108501 PARAMETER Experiment Name: At_ap2_floral_buds_cDNA_P Parameter: Plant Line Value: ap2 (Ler.)
  misc_feature: MA Experiment 108501 PARAMETER Experiment Name: At_ap2_floral_buds_cDNA_P Parameter: Tissue Value: Closed Flower
  misc_feature: MA Experiment ID: 108572 Result: Down-regulated in Transcription
  misc_feature: MA Experiment 108572 PARAMETER Experiment Name: At_Drought_cDNA_P Parameter: Timepoint (hr) Value: 1
  misc_feature: MA Experiment 108572 PARAMETER Experiment Name: At_Drought_cDNA_P Parameter: Tissue Value: Aerial
  misc_feature: MA Experiment 108572 PARAMETER Experiment Name: At_Drought_cDNA_P Parameter: Treatment Value: Drought vs. No Drought
  misc_feature: MA Experiment ID: 108668 Result: Up-regulated in Transcription
  misc_feature: MA Experiment 108668 PARAMETER Experiment Name: At_2mM_SA_cDNA_P Parameter: Plant Line Value: WS
  misc_feature: MA Experiment 108668 PARAMETER Experiment Name: At_2mM_SA_cDNA_P Parameter: Timepoint (hr) Value: 6
  misc_feature: MA Experiment 108668 PARAMETER Experiment Name: At_2mM_SA_cDNA_P Parameter: Treatment Value: 2mM SA vs. No Treatment
  misc_feature: MA Experiment ID: 20000090 Result: Up-regulated in Transcription
  misc_feature: MA Experiment ID: 20000111 Result: Down-regulated in Transcription
  misc_feature: MA Experiment 20000111 PARAMETER Experiment Name: At_42deg_Heat_cDNA_P Parameter: Temperature (deg C) Value: 42 vs. 22
  misc_feature: MA Experiment 20000111 PARAMETER Experiment Name: At_42deg_Heat_cDNA_P Parameter: Timepoint (hr) Value: 6
  misc_feature: MA Experiment 20000111 PARAMETER Experiment Name: At_42deg_Heat_cDNA_P Parameter: Tissue Value: Aerial
  misc_feature: MA Experiment ID: 20000144 Result: Down-regulated in Transcription
  misc_feature: MA Experiment 20000144 PARAMETER Experiment Name: At_42deg_Heat_cDNA_P Parameter: Temperature (deg C) Value: 42 vs. 22
  misc_feature: MA Experiment 20000144 PARAMETER Experiment Name: At_42deg_Heat_cDNA_P Parameter: Timepoint (hr) Value: 1
  misc_feature: MA Experiment 20000144 PARAMETER Experiment Name: At_42deg_Heat_cDNA_P Parameter: Tissue Value: Aerial
  misc_feature: MA Experiment ID: 20000173 Result: Down-regulated in Transcription
  misc_feature: MA Experiment 20000173 PARAMETER Experiment Name: At_42deg_Heat_P Parameter: Age (day) Value: 14
  misc_feature: MA Experiment 20000173 PARAMETER Experiment Name: At_42deg_Heat_P Parameter: Organism Value: A. thaliana
  misc_feature: MA Experiment 20000173 PARAMETER Experiment Name: At_42deg_Heat_P Parameter: Plant Line Value: WS
  misc_feature: MA Experiment 20000173 PARAMETER Experiment Name: At_42deg_Heat_P Parameter: Temperature (deg C) Value: 42 vs. 22
  misc_feature: MA Experiment 20000173 PARAMETER Experiment Name: At_42deg_Heat_P Parameter: Timepoint (hr) Value: 6
  misc_feature: MA Experiment 20000173 PARAMETER Experiment Name: At_42deg_Heat_P Parameter: Tissue Value: Aerial
  misc_feature: MA Experiment ID: 20000182 Result: Up-regulated in Transcription
  misc_feature: MA Experiment 20000182 PARAMETER Experiment Name: At_2mM_SA_P Parameter: Age (day) Value: 14
  misc_feature: MA Experiment 20000182 PARAMETER Experiment Name: At_2mM_SA_P Parameter: Organism Value: A. thaliana
  misc_feature: MA Experiment 20000182 PARAMETER Experiment Name: At_2mM_SA_P Parameter: Plant Line Value: WS
  misc_feature: MA Experiment 20000182 PARAMETER Experiment Name: At_2mM_SA_P Parameter: Timepoint (hr) Value: 6
  misc_feature: MA Experiment 20000182 PARAMETER Experiment Name: At_2mM_SA_P Parameter: Tissue Value: Aerial
  misc_feature: MA Experiment 20000182 PARAMETER Experiment Name: At_2mM_SA_P Parameter: Treatment Value: 2mM SA vs. No Treatment
  misc_feature: MA Experiment ID: 20000185 Result: Up-regulated in Transcription
  misc_feature: MA Experiment 20000185 PARAMETER Experiment Name: At_Roots__P Parameter: Age (day) Value: 7 vs. 21
  misc_feature: MA Experiment 20000185 PARAMETER Experiment Name: At_Roots__P Parameter: Organism Value: A. thaliana
  misc_feature: MA Experiment 20000185 PARAMETER Experiment Name: At_Roots__P Parameter: Tissue Value: Roots vs. Whole Plant
  misc_feature: MA Experiment ID: 20000439 Result: Up-regulated in Transcription
  misc_feature: MA Experiment 20000439 PARAMETER Experiment Name: At_Roots__P Parameter: Age (day) Value: 14 vs. 21
  misc_feature: MA Experiment 20000439 PARAMETER Experiment Name: At_Roots__P Parameter: Organism Value: A. thaliana
  misc_feature: MA Experiment 20000439 PARAMETER Experiment Name: At_Roots__P Parameter: Tissue Value: Roots vs. Whole Plant
  misc_feature: MA Experiment ID: 20001556 Result: Down-regulated in Transcription
  misc_feature: MA Experiment 20001556 PARAMETER Experiment Name: At_Drought_Soil_Dry_P Parameter: Age (day) Value: 26
  misc_feature: MA Experiment 20001556 PARAMETER Experiment Name: At_Drought_Soil_Dry_P Parameter: Organism Value: A. thaliana
  misc_feature: MA Experiment 20001556 PARAMETER Experiment Name: At_Drought_Soil_Dry_P Parameter: Plant Line Value: WS
  misc_feature: MA Experiment 20001556 PARAMETER Experiment Name: At_Drought_Soil_Dry_P Parameter: Post Timepoint (hr) Value: None
  misc_feature: MA Experiment 20001556 PARAMETER Experiment Name: At_Drought_Soil_Dry_P Parameter: Post-Treatment Value: None
  misc_feature: MA Experiment 20001556 PARAMETER Experiment Name: At_Drought_Soil_Dry_P Parameter: Timepoint (day) Value: 12
  misc_feature: MA Experiment 20001556 PARAMETER Experiment Name: At_Drought_Soil_Dry_P Parameter: Treatment Value: Drought vs. No Drought
aaccaccacaaatctcatcgaaatgtcgtctcaagaaacgaaatcagatcaaagagaaggagcagagatctgcaatggcgaatcaaactgcaaacagaaagccaaagagattttatcaaccatgaatctacccaaaggtcttcttcctctagacaacatgacagagatcggtcacaacaaatcaaccggttatgtctggatcaagatcaagaacaaggttcaacatcggtttaaagccattggacgaaacgtatcgtacgattcggaggttactgcgatccttgagaatcgtcggatgagtcagcttacgggaatcaagagcaaagagattttgatttgggttacgatctctgagatctttgttaatcatcaagatccgactcaaatcacttttgctaatcctacgggactatcacgtactttccccgtcactgcttttgaagaagacgaatgattcatttgtcaacgctcaccatcatgatactttgcttagctaaattatcttttgttttttccttataattccttttgtttagctaagttctattttcaacatttgtatttctgcatcttttccattagagattttataaaattaataatatagg

SEQ ID NO: 29819 - protein, 150 aa, Arabidopsis thaliana
  peptide (1)..(150): Ceres Seq. ID no. 12397110
  misc_feature (8)..(150): Pfam Name: Protein of unknown function, DUF538 Pfam Description: Protein of unknown function, DUF538
  misc_feature (8)..(150): Homolog of NCBI NO: 34915378 NR Description: hypothetical protein~similar to Oryza sativa
  misc_feature (8)..(146): Homolog of NCBI NO: 34915376 NR Description: hypothetical protein~similar to Oryza sativa
  misc_feature (8)..(146): Homolog of NCBI NO: 34915426 NR Description: hypothetical protein~similar to Arabidopsis
  misc_feature (8)..(146): Homolog of NCBI NO: 34915422 NR Description: hypothetical protein~similar to Arabidopsis
  misc_feature (8)..(146): Homolog of NCBI NO: 34915418 NR Description: hypothetical protein~similar to Arabidopsis
  misc_feature (8)..(146): Homolog of NCBI NO: 33146557 NR Description: unknown protein [Oryza sativa (japonica
  misc_feature (8)..(146): Homolog of NCBI NO: 34915410 NR Description: hypothetical protein~similar to Arabidopsis
  misc_feature (18)..(146): Homolog of NCBI NO: 18391006 NR Description: expressed protein
  misc_feature (8)..(150): Homolog of NCBI NO: 34903866 NR Description: unnamed protein product [Oryza sativa (japonica
  misc_feature (8)..(150): Homolog of NCBI NO: 18422648 NR Description: expressed protein
TTTNLIEMSSQETKSDQREGAEICNGESNCKQKAKEILSTMNLPKGLLPLDNMTEIGHNKSTGYVWIKIKNKVQHRFKAIGRNVSYDSEVTAILENRRMSQLTGIKSKEILIWVTISEIFVNHQDPTQITFANPTGLSRTFPVTAFEEDE

SEQ ID NO: 29820 - protein, 143 aa, Arabidopsis thaliana
  peptide (1)..(143): Ceres Seq. ID no. 12397111
  misc_feature (1)..(143): Pfam Name: Protein of unknown function, DUF538 Pfam Description: Protein of unknown function, DUF538
  misc_feature (1)..(143): Homolog of NCBI NO: 34915378 NR Description: hypothetical protein~similar to Oryza sativa
  misc_feature (1)..(139): Homolog of NCBI NO: 34915376 NR Description: hypothetical protein~similar to Oryza sativa
  misc_feature (1)..(139): Homolog of NCBI NO: 34915426 NR Description: hypothetical protein~similar to Arabidopsis
  misc_feature (1)..(139): Homolog of NCBI NO: 34915422 NR Description: hypothetical protein~similar to Arabidopsis
  misc_feature (1)..(139): Homolog of NCBI NO: 34915418 NR Description: hypothetical protein~similar to Arabidopsis
  misc_feature (1)..(139): Homolog of NCBI NO: 33146557 NR Description: unknown protein [Oryza sativa (japonica
  misc_feature (1)..(139): Homolog of NCBI NO: 34915410 NR Description: hypothetical protein~similar to Arabidopsis
  misc_feature (11)..(139): Homolog of NCBI NO: 18391006 NR Description: expressed protein
  misc_feature (1)..(143): Homolog of NCBI NO: 34903866 NR Description: unnamed protein product [Oryza sativa (japonica
  misc_feature (1)..(143): Homolog of NCBI NO: 18422648 NR Description: expressed protein
MSSQETKSDQREGAEICNGESNCKQKAKEILSTMNLPKGLLPLDNMTEIGHNKSTGYVWIKIKNKVQHRFKAIGRNVSYDSEVTAILENRRMSQLTGIKSKEILIWVTISEIFVNHQDPTQITFANPTGLSRTFPVTAFEEDE

SEQ ID NO: 29821 - protein, 110 aa, Arabidopsis thaliana
  peptide (1)..(110): Ceres Seq. ID no. 12397112
  misc_feature (1)..(110): Pfam Name: Protein of unknown function, DUF538 Pfam Description: Protein of unknown function, DUF538
  misc_feature (1)..(110): Homolog of NCBI NO: 34915378 NR Description: hypothetical protein~similar to Oryza sativa
  misc_feature (1)..(106): Homolog of NCBI NO: 34915376 NR Description: hypothetical protein~similar to Oryza sativa
  misc_feature (1)..(106): Homolog of NCBI NO: 34915426 NR Description: hypothetical protein~similar to Arabidopsis
  misc_feature (1)..(106): Homolog of NCBI NO: 34915422 NR Description: hypothetical protein~similar to Arabidopsis
  misc_feature (1)..(106): Homolog of NCBI NO: 34915418 NR Description: hypothetical protein~similar to Arabidopsis
  misc_feature (1)..(106): Homolog of NCBI NO: 33146557 NR Description: unknown protein [Oryza sativa (japonica
  misc_feature (1)..(106): Homolog of NCBI NO: 34915410 NR Description: hypothetical protein~similar to Arabidopsis
  misc_feature (1)..(106): Homolog of NCBI NO: 18391006 NR Description: expressed protein
  misc_feature (1)..(110): Homolog of NCBI NO: 34903866 NR Description: unnamed protein product [Oryza sativa (japonica
  misc_feature (1)..(110): Homolog of NCBI NO: 18422648 NR Description: expressed protein
MNLPKGLLPLDNMTEIGHNKSTGYVWIKIKNKVQHRFKAIGRNVSYDSEVTAILENRRMSQLTGIKSKEILIWVTISEIFVNHQDPTQITFANPTGLSRTFPVTAFEEDE

SEQ ID NO: 29822 - DNA, 971 bp, Arabidopsis thaliana
  misc_feature (1)..(971): Ceres Seq. ID no. 12372139
  misc_feature: MA Experiment ID: 108434 Result: Up-regulated in Transcription
  misc_feature: MA Experiment 108434 PARAMETER Experiment Name: At_Root_Tips_cDNA_P Parameter: Tissue Value: Root Tips
  misc_feature: MA Experiment ID: 108462 Result: Down-regulated in Transcription
  misc_feature: MA Experiment 108462 PARAMETER Experiment Name: At_Germinating_Seeds_cDNA_P Parameter: Age (day) Value: 2 vs. 0
  misc_feature: MA Experiment 108462 PARAMETER Experiment Name: At_Germinating_Seeds_cDNA_P Parameter: Tissue Value: Germinating Seeds
  misc_feature: MA Experiment ID: 20000113 Result: Up-regulated in Transcription
  misc_feature: MA Experiment 20000113 PARAMETER Experiment Name: At_42deg_Heat_cDNA_P Parameter: Temperature (deg C) Value: 42 vs. 22
  misc_feature: MA Experiment 20000113 PARAMETER Experiment Name: At_42deg_Heat_cDNA_P Parameter: Timepoint (hr) Value: 8
  misc_feature: MA Experiment 20000113 PARAMETER Experiment Name: At_42deg_Heat_cDNA_P Parameter: Tissue Value: Aerial
  misc_feature: MA Experiment ID: 20000573 Result: Down-regulated in Transcription
  misc_feature: MA Experiment 20000573 PARAMETER Experiment Name: At_100uM_ABA_Mutants__P Parameter: Organism Value: A. thaliana
  misc_feature: MA Experiment 20000573 PARAMETER Experiment Name: At_100uM_ABA_Mutants__P Parameter: Plant Line Value: CS22 vs. Ler wt
  misc_feature: MA Experiment 20000573 PARAMETER Experiment Name: At_100uM_ABA_Mutants__P Parameter: Timepoint (hr) Value: N/A
  misc_feature: MA Experiment 20000573 PARAMETER Experiment Name: At_100uM_ABA_Mutants__P Parameter: Tissue Value: Whole Plant
  misc_feature: MA Experiment 20000573 PARAMETER Experiment Name: At_100uM_ABA_Mutants__P Parameter: Treatment Value: None
aacgaagcatcggagaaaaaagaagatgaacatcgttggattgtgcaaacgtttcttctccgatcgtcgctctcttcacgggatcaacaatgctctcgtaaaaacagtgttcacgggtcggaaaccgattctcggattctccggccgatcgtttcacgagctgcgaaaaactgggaatttcgtaatccctcgtgttttctccgtttcacgaaatctaacgacgaaggcttcgtcttcttcttcttcgaaacaacctgcgtttctacgatggtatttgagaaagctcgaatcacatccttttatgactaagagtatcactacttctgtcatctatatggctgcagatctcacttctcagatgatcacgatggagccaactggttcttttgacttgataagaacagcgagaatggcgagctttgggttgatatttctcgggccgtctcagcatctgtggttcagttatctttcgaagatattgccaaagcgcgacgtgttgacaacctttaagaaaataatgatggggcaggttcttttcggacctgttagcaacacagtcttctattcctacaatgctgctttacaaggtgaaaattctgaggaaattgtggcgagattgaagcgagatcttctgccaacattgaaaaatggacttatgtattggccggtctgtgattttgttacattcaagtatgtgccagttcatctacagccactgatgaatagctcgtgcgcatatatatggacaatctatttgacatatatggcaaaccagacgaaagctgacagctgaacaatgacaagtatgagtgttcttggtcacacgcaatcgcattctttttattcaattgaaccaaccatcagtactagtagaatttgtctttttggtgtctacaatgcagcaaaagtgtcgcatagatatggacacaaacatgtatgaattttgatcatctaagcatatatttatcagc

SEQ ID NO: 29823 - protein, 263 aa, Arabidopsis thaliana
  peptide (1)..(263): Ceres Seq. ID no. 12372140
  misc_feature (194)..(261): Pfam Name: Mpv17 / PMP22 family Pfam Description: Mpv17 / PMP22 family
  misc_feature (80)..(256): Homolog of NCBI NO: 15233520 NR Description: PEROXISOMAL MEMBRANE PROTEIN PMP22; protein id:
  misc_feature (78)..(258): Homolog of NCBI NO: 16648746 NR Description: AT5g19750/T29J13_170 [Arabidopsis thaliana]
  misc_feature (78)..(258): Homolog of NCBI NO: 15241166 NR Description: putative protein
  misc_feature (78)..(258): Homolog of NCBI NO: 21594286 NR Description: unknown [Arabidopsis thaliana]
  misc_feature (68)..(239): Homolog of NCBI NO: 7485624 NR Description: hypothetical protein F17I5.90 - Arabidopsis
  misc_feature (77)..(260): Homolog of NCBI NO: 15226016 NR Description: 22 kDa peroxisomal membrane protein; protein id:
  misc_feature (68)..(258): Homolog of NCBI NO: 18418319 NR Description: Expressed protein
  misc_feature (9)..(237): Homolog of NCBI NO: 9757841 NR Description: contains similarity to 22 kDa peroxisomal
  misc_feature (9)..(263): Homolog of NCBI NO: 18422298 NR Description: putative protein
  misc_feature (9)..(263): Homolog of NCBI NO: 21553640 NR Description: contains similarity to 22 kDa peroxisomal
TKHRRKKKMNIVGLCKRFFSDRRSLHGINNALVKTVFTGRKPILGFSGRSFHELRKTGNFVIPRVFSVSRNLTTKASSSSSSKQPAFLRWYLRKLESHPFMTKSITTSVIYMAADLTSQMITMEPTGSFDLIRTARMASFGLIFLGPSQHLWFSYLSKILPKRDVLTTFKKIMMGQVLFGPVSNTVFYSYNAALQGENSEEIVARLKRDLLPTLKNGLMYWPVCDFVTFKYVPVHLQPLMNSSCAYIWTIYLTYMANQTKADS

SEQ ID NO: 29824 - protein, 255 aa, Arabidopsis thaliana
  peptide (1)..(255): Ceres Seq. ID no. 12372141
  misc_feature (186)..(253): Pfam Name: Mpv17 / PMP22 family Pfam Description: Mpv17 / PMP22 family
  misc_feature (72)..(248): Homolog of NCBI NO: 15233520 NR Description: PEROXISOMAL MEMBRANE PROTEIN PMP22; protein id:
  misc_feature (70)..(250): Homolog of NCBI NO: 16648746 NR Description: AT5g19750/T29J13_170 [Arabidopsis thaliana]
  misc_feature (70)..(250): Homolog of NCBI NO: 15241166 NR Description: putative protein
  misc_feature (70)..(250): Homolog of NCBI NO: 21594286 NR Description: unknown [Arabidopsis thaliana]
  misc_feature (60)..(231): Homolog of NCBI NO: 7485624 NR Description: hypothetical protein F17I5.90 - Arabidopsis
  misc_feature (69)..(252): Homolog of NCBI NO: 15226016 NR Description: 22 kDa peroxisomal membrane protein; protein id:
  misc_feature (60)..(250): Homolog of NCBI NO: 18418319 NR Description: Expressed protein
  misc_feature (1)..(229): Homolog of NCBI NO: 9757841 NR Description: contains similarity to 22 kDa peroxisomal
  misc_feature (1)..(255): Homolog of NCBI NO: 18422298 NR Description: putative protein
  misc_feature (1)..(255): Homolog of NCBI NO: 21553640 NR Description: contains similarity to 22 kDa peroxisomal
MNIVGLCKRFFSDRRSLHGINNALVKTVFTGRKPILGFSGRSFHELRKTGNFVIPRVFSVSRNLTTKASSSSSSKQPAFLRWYLRKLESHPFMTKSITTSVIYMAADLTSQMITMEPTGSFDLIRTARMASFGLIFLGPSQHLWFSYLSKILPKRDVLTTFKKIMMGQVLFGPVSNTVFYSYNAALQGENSEEIVARLKRDLLPTLKNGLMYWPVCDFVTFKYVPVHLQPLMNSSCAYIWTIYLTYMANQTKADS

SEQ ID NO: 29825 - protein, 163 aa, Arabidopsis thaliana
  peptide (1)..(163): Ceres Seq. ID no. 12372142
  misc_feature (94)..(161): Pfam Name: Mpv17 / PMP22 family Pfam Description: Mpv17 / PMP22 family
  misc_feature (1)..(156): Homolog of NCBI NO: 15233520 NR Description: PEROXISOMAL MEMBRANE PROTEIN PMP22; protein id:
  misc_feature (1)..(158): Homolog of NCBI NO: 16648746 NR Description: AT5g19750/T29J13_170 [Arabidopsis thaliana]
  misc_feature (1)..(158): Homolog of NCBI NO: 15241166 NR Description: putative protein
  misc_feature (1)..(158): Homolog of NCBI NO: 21594286 NR Description: unknown [Arabidopsis thaliana]
  misc_feature (1)..(139): Homolog of NCBI NO: 7485624 NR Description: hypothetical protein F17I5.90 - Arabidopsis
  misc_feature (1)..(160): Homolog of NCBI NO: 15226016 NR Description: 22 kDa peroxisomal membrane protein; protein id:
  misc_feature (1)..(158): Homolog of NCBI NO: 18418319 NR Description: Expressed protein
  misc_feature (1)..(137): Homolog of NCBI NO: 9757841 NR Description: contains similarity to 22 kDa peroxisomal
  misc_feature (1)..(163): Homolog of NCBI NO: 18422298 NR Description: putative protein
  misc_feature (1)..(163): Homolog of NCBI NO: 21553640 NR Description: contains similarity to 22 kDa peroxisomal
MTKSITTSVIYMAADLTSQMITMEPTGSFDLIRTARMASFGLIFLGPSQHLWFSYLSKILPKRDVLTTFKKIMMGQVLFGPVSNTVFYSYNAALQGENSEEIVARLKRDLLPTLKNGLMYWPVCDFVTFKYVPVHLQPLMNSSCAYIWTIYLTYMANQTKADS

SEQ ID NO: 29826 - DNA, 1717 bp, Arabidopsis thaliana
  misc_feature (1)..(1717): Ceres Seq. ID no. 12423026
  misc_feature: MA Experiment ID: 108577 Result: Up-regulated in Transcription
  misc_feature: MA Experiment 108577 PARAMETER Experiment Name: At_42deg_Heat_cDNA_P Parameter: Temperature (deg C) Value: 42 vs. 22
  misc_feature: MA Experiment 108577 PARAMETER Experiment Name: At_42deg_Heat_cDNA_P Parameter: Timepoint (hr) Value: 6
  misc_feature: MA Experiment 108577 PARAMETER Experiment Name: At_42deg_Heat_cDNA_P Parameter: Tissue Value: Aerial
  misc_feature: MA Experiment ID: 20000069 Result: Down-regulated in Transcription
  misc_feature: MA Experiment 20000069 PARAMETER Experiment Name: At_100uM_ABA_Mutants_cDNA_P Parameter: Plant Line Value: CS23
  misc_feature: MA Experiment 20000069 PARAMETER Experiment Name: At_100uM_ABA_Mutants_cDNA_P Parameter: Timepoint (hr) Value: 6
  misc_feature: MA Experiment 20000069 PARAMETER Experiment Name: At_100uM_ABA_Mutants_cDNA_P Parameter: Tissue Value: Aerial
  misc_feature: MA Experiment 20000069 PARAMETER Experiment Name: At_100uM_ABA_Mutants_cDNA_P Parameter: Treatment Value: 100uM ABA vs. No Treatment
  misc_feature: MA Experiment ID: 20000087 Result: Down-regulated in Transcription
  misc_feature: MA Experiment 20000087 PARAMETER Experiment Name: At_100uM_ABA_Mutants_cDNA_P Parameter: Plant Line Value: WS
  misc_feature: MA Experiment 20000087 PARAMETER Experiment Name: At_100uM_ABA_Mutants_cDNA_P Parameter: Timepoint (hr) Value: 6
  misc_feature: MA Experiment 20000087 PARAMETER Experiment Name: At_100uM_ABA_Mutants_cDNA_P Parameter: Tissue Value: Aerial
  misc_feature: MA Experiment 20000087 PARAMETER Experiment Name: At_100uM_ABA_Mutants_cDNA_P Parameter: Treatment Value: 100uM ABA vs. No Treatment
  misc_feature: MA Experiment ID: 20000111 Result: Up-regulated in Transcription
  misc_feature: MA Experiment 20000111 PARAMETER Experiment Name: At_42deg_Heat_cDNA_P Parameter: Temperature (deg C) Value: 42 vs. 22
  misc_feature: MA Experiment 20000111 PARAMETER Experiment Name: At_42deg_Heat_cDNA_P Parameter: Timepoint (hr) Value: 6
  misc_feature: MA Experiment 20000111 PARAMETER Experiment Name: At_42deg_Heat_cDNA_P Parameter: Tissue Value: Aerial
  misc_feature: MA Experiment ID: 20000315 Result: Up-regulated in Transcription
  misc_feature: MA Experiment 20000315 PARAMETER Experiment Name: At_14day_Shoots-Roots_Sub_P Parameter: Age (day) Value: 14
  misc_feature: MA Experiment 20000315 PARAMETER Experiment Name: At_14day_Shoots-Roots_Sub_P Parameter: Organism Value: A. thaliana
  misc_feature: MA Experiment 20000315 PARAMETER Experiment Name: At_14day_Shoots-Roots_Sub_P Parameter: Plant Line Value: WS
  misc_feature: MA Experiment 20000315 PARAMETER Experiment Name: At_14day_Shoots-Roots_Sub_P Parameter: Tissue Value: Shoots vs. Whole Plant
  misc_feature: MA Experiment ID: 20000328 Result: Up-regulated in Transcription
  misc_feature: MA Experiment 20000328 PARAMETER Experiment Name: At_42deg_Heat_Sub_P Parameter: Age (day) Value: 14
  misc_feature: MA Experiment 20000328 PARAMETER Experiment Name: At_42deg_Heat_Sub_P Parameter: Organism Value: A. thaliana
  misc_feature: MA Experiment 20000328 PARAMETER Experiment Name: At_42deg_Heat_Sub_P Parameter: Plant Line Value: WS
  misc_feature: MA Experiment 20000328 PARAMETER Experiment Name: At_42deg_Heat_Sub_P Parameter: Temperature (deg C) Value: 42 vs. 22
  misc_feature: MA Experiment 20000328 PARAMETER Experiment Name: At_42deg_Heat_Sub_P Parameter: Timepoint (hr) Value: 6
  misc_feature: MA Experiment 20000328 PARAMETER Experiment Name: At_42deg_Heat_Sub_P Parameter: Tissue Value: Aerial
ataaataaaaccactctcgttgctgattccatttatcgttcttattgaccctagccgctacacacttttctgcgatatctctgagatttgttgacagtctctaaccatgggtaaagagaagtttcacatcaacattgtggtcattggccacgtcgattctggaaagtcgaccaccactgggcacttgatctacaagttgggtggtattgacaagcgtgtcattgagaggttcgagaaggaggctgctgagatgaacaagaggtccttcaagtacgcatgggttttggacaaacttaaggctgagcgtgagcgtggtatcaccattgacattgctctctggaagttcgagaccaccaagtactactgcactgtcattgatgctcctggccatcgtgatttcatcaagaacatgatcactggtacctcccaggctgattgtgctgtccttatcattgactccaccactggtggttttgaggctggtatctccaaggatggtcagacccgtgagcacgctctacttgctttcacccttggtgtcaagcagatgatctgctgttgtaacaagatggatgccactacccccaagtactccaaggccaggtacgatgaaatcatcaaggaggtgtcttcctacttgaagaaggttggttacaaccccgacaaaatcccatttgtgcccatctctggatttgagggtgacaacatgattgagaggtccaccaaccttgactggtacaagggaccaactctccttgaggctcttgaccagatcaacgagcccaagaggccgtcagacaagccccttcgtctcccacttcaggatgtctacaagattggtggtattggaacggtgccagtgggacgtgttgagactggtatgatcaagcctggtatggttgtgacctttgctcccacaggattgaccactgaggtcaagtctgttgagatgcaccacgagtctcttcttgaggcacttccaggtgacaacgttgggttcaatgttaagaatgttgctgtcaaggatcttaagagagggtacgtcgcatccaactccaaggatgaccctgccaagggtgctgctaacttcacctcccaggtcatcatcatgaaccaccctggtcagattggtaacggttacgccccagtcctggattgccacacctctcacattgcagtcaagttctctgagatcttgaccaagattgacaggcgttctggtaaggagattgagaaggagcctaaattcttgaagaatggtgatgctggtatggtgaagatgactccaaccaagcccatggttgtggagaccttctctgagtacccaccacttggacgtttcgctgtgagggacatgaggcagactgttgcagtcggtgttatcaagagtgttgacaagaaggacccaactggagccaaggttaccaaggctgcagtcaagaagggtgccaagtgaactctgaacatcaaaactctttccgctgatgaaatgaaggactattttagtttctttactttagtagtttggtatttggttggttgtttgtgttaccgcttcgtttattctccgtcggagctcaattctcggaattgggttcttgatcggaggtggcggaggtacttggcactcgagcttcctgtttatttcttttgttttgtgttatgattttgaacctttttggatattcggttatatgatatttgtgtcattcctgcc

SEQ ID NO: 29827 - protein, 449 aa, Arabidopsis thaliana; identical to SEQ ID NO: 27284
  peptide (1)..(449): Ceres Seq. ID no. 12423027
  misc_feature (5)..(227): Pfam Name: Elongation factor Tu GTP binding domain Pfam Description: Elongation factor Tu GTP binding domain
  misc_feature (1)..(449): Homolog of NCBI NO: 15081765 NR Description: At1g07930/T6D22_3 [Arabidopsis thaliana]
  misc_feature (1)..(449): Homolog of NCBI NO: 17064954 NR Description: putative elongation factor 1-a [Arabidopsis
  misc_feature (1)..(449): Homolog of NCBI NO: 18086389 NR Description: At1g07930/T6D22_3 [Arabidopsis thaliana]
  misc_feature (1)..(449): Homolog of NCBI NO: 23397097 NR Description: putative translation elongation factor eEF-1
  misc_feature (1)..(449): Homolog of NCBI NO: 13430510 NR Description: putative translation elongation factor eEF-1
  misc_feature (1)..(449): Homolog of NCBI NO: 13605682 NR Description: At1g07930/T6D22_3 [Arabidopsis thaliana]
  misc_feature (1)..(449): Homolog of NCBI NO: 99688 NR Description: translation elongation factor eEF-1 alpha chain
  misc_feature (1)..(449): Homolog of NCBI NO: 15239308 NR Description: elongation factor 1-alpha (EF-1-alpha)
  misc_feature (1)..(449): Homolog of NCBI NO: 25407012 NR Description: protein T6D22.2 [imported] - Arabidopsis thaliana
  misc_feature (1)..(449): Homolog of NCBI NO: 25407012 NR Description: protein T6D22.2 [imported] - Arabidopsis thaliana

SEQ ID NO: 29828 - protein, 401 aa, Arabidopsis thaliana; identical to SEQ ID NO: 21437
  peptide (1)..(401): Ceres Seq. ID no. 12423028
  misc_feature (1)..(179): Pfam Name: Elongation factor Tu GTP binding domain Pfam Description: Elongation factor Tu GTP binding domain
  misc_feature (1)..(401): Homolog of NCBI NO: 15081765 NR Description: At1g07930/T6D22_3 [Arabidopsis thaliana]
  misc_feature (1)..(401): Homolog of NCBI NO: 17064954 NR Description: putative elongation factor 1-a [Arabidopsis
  misc_feature (1)..(401): Homolog of NCBI NO: 18086389 NR Description: At1g07930/T6D22_3 [Arabidopsis thaliana]
  misc_feature (1)..(401): Homolog of NCBI NO: 23397097 NR Description: putative translation elongation factor eEF-1
  misc_feature (1)..(401): Homolog of NCBI NO: 13430510 NR Description: putative translation elongation factor eEF-1
  misc_feature (1)..(401): Homolog of NCBI NO: 13605682 NR Description: At1g07930/T6D22_3 [Arabidopsis thaliana]
  misc_feature (1)..(401): Homolog of NCBI NO: 99688 NR Description: translation elongation factor eEF-1 alpha chain
  misc_feature (1)..(401): Homolog of NCBI NO: 15239308 NR Description: elongation factor 1-alpha (EF-1-alpha)
  misc_feature (1)..(401): Homolog of NCBI NO: 25407012 NR Description: protein T6D22.2 [imported] - Arabidopsis thaliana
  misc_feature (1)..(401): Homolog of NCBI NO: 25407012 NR Description: protein T6D22.2 [imported] - Arabidopsis thaliana

SEQ ID NO: 29829 - protein, 348 aa, Arabidopsis thaliana; identical to SEQ ID NO: 21438
  peptide (1)..(348): Ceres Seq. ID no. 12423029
  misc_feature (1)..(126): Pfam Name: Elongation factor Tu GTP binding domain Pfam Description: Elongation factor Tu GTP binding domain
  misc_feature (1)..(348): Homolog of NCBI NO: 15081765 NR Description: At1g07930/T6D22_3 [Arabidopsis thaliana]
  misc_feature (1)..(348): Homolog of NCBI NO: 17064954 NR Description: putative elongation factor 1-a [Arabidopsis
  misc_feature (1)..(348): Homolog of NCBI NO: 18086389 NR Description: At1g07930/T6D22_3 [Arabidopsis thaliana]
  misc_feature (1)..(348): Homolog of NCBI NO: 23397097 NR Description: putative translation elongation factor eEF-1
  misc_feature (1)..(348): Homolog of NCBI NO: 13430510 NR Description: putative translation elongation factor eEF-1
  misc_feature (1)..(348): Homolog of NCBI NO: 13605682 NR Description: At1g07930/T6D22_3 [Arabidopsis thaliana]
  misc_feature (1)..(348): Homolog of NCBI NO: 99688 NR Description: translation elongation factor eEF-1 alpha chain
  misc_feature (1)..(348): Homolog of NCBI NO: 15239308 NR Description: elongation factor 1-alpha (EF-1-alpha)
  misc_feature (1)..(348): Homolog of NCBI NO: 25407012 NR Description: protein T6D22.2 [imported] - Arabidopsis thaliana
  misc_feature (1)..(348): Homolog of NCBI NO: 25407012 NR Description: protein T6D22.2 [imported] - Arabidopsis thaliana

SEQ ID NO: 29830 - DNA, 2004 bp, Arabidopsis thaliana
  misc_feature (1)..(2004): Ceres Seq. ID no. 12558495
  misc_feature: MA Experiment ID: 108488 Result: Up-regulated in Transcription
  misc_feature: MA Experiment ID: 108595 Result: Down-regulated in Transcription
  misc_feature: MA Experiment 108595 PARAMETER Experiment Name: At_Ler-pi_Ovule_cDNA_P Parameter: Plant Line Value: null
  misc_feature: MA Experiment ID: 20000113 Result: Down-regulated in Transcription
  misc_feature: MA Experiment 20000113 PARAMETER Experiment Name: At_42deg_Heat_cDNA_P Parameter: Temperature (deg C) Value: 42 vs. 22
  misc_feature: MA Experiment 20000113 PARAMETER Experiment Name: At_42deg_Heat_cDNA_P Parameter: Timepoint (hr) Value: 8
  misc_feature: MA Experiment 20000113 PARAMETER Experiment Name: At_42deg_Heat_cDNA_P Parameter: Tissue Value: Aerial
  misc_feature: MA Experiment ID: 20000496 Result: Up-regulated in Transcription
  misc_feature: MA Experiment 20000496 PARAMETER Experiment Name: At_Guard_Cells_P Parameter: Harvest Date Value: 7/19/2002
  misc_feature: MA Experiment 20000496 PARAMETER Experiment Name: At_Guard_Cells_P Parameter: Organism Value: Canola
  misc_feature: MA Experiment 20000496 PARAMETER Experiment Name: At_Guard_Cells_P Parameter: Tissue Value: Guard Cells vs. Leaves
  misc_feature: MA Experiment ID: 20001560 Result: Up-regulated in Transcription
  misc_feature: MA Experiment 20001560 PARAMETER Experiment Name: At_Drought_Soil_Dry_P Parameter: Age (day) Value: 28
  misc_feature: MA Experiment 20001560 PARAMETER Experiment Name: At_Drought_Soil_Dry_P Parameter: Organism Value: A. thaliana
  misc_feature: MA Experiment 20001560 PARAMETER Experiment Name: At_Drought_Soil_Dry_P Parameter: Plant Line Value: WS
  misc_feature: MA Experiment 20001560 PARAMETER Experiment Name: At_Drought_Soil_Dry_P Parameter: Post Timepoint (hr) Value: None
  misc_feature: MA Experiment 20001560 PARAMETER Experiment Name: At_Drought_Soil_Dry_P Parameter: Post-Treatment Value: None
  misc_feature: MA Experiment 20001560 PARAMETER Experiment Name: At_Drought_Soil_Dry_P Parameter: Timepoint (day) Value: 14
  misc_feature: MA Experiment 20001560 PARAMETER Experiment Name: At_Drought_Soil_Dry_P Parameter: Treatment Value: Drought vs. No Drought
acattcattttctctggtctttgattgcttttcttttcactgcttaggttctttgtctgttaggtttagagagatcctttccaaagatccaaagctggaaactttctagtcaatgctgcttaagatctgactttttcccttcaatgtcgctctgaaatcccctaaatttttgggcccatcaggtgaataaagcggaggtcagaagatgggttctggtttaaatgacacattatctcggaactacaatggtttggagctatgggagataatagtgattgttctctctgcgatattcgttgtagttttagctatatcgctatggcttactttcagaagaaaaacctctagatcttcttctaatctaatccctgttagtcgccagattcctcctagtgttcctgaagagattaaagagattagagtcgacgaggtttcttcaagcaatggtgggaatggatacccctctattagtgagaaatttggcgataaagaacccgaaaaagggataaaagcagagtcagaaaatggcgatagtagccggtcaggctcgtttaatcacttggagaaaaaagacggatcgagcgtatcttctgctaatcctttgacagctccatctcctttgtctggtcttcctgagttttctcaccttggatggggacattggttcactcttagagatcttcagatggctactaatcagttttcaagggataatatcatcggtgatggtggatatggagttgtttaccgcggtaaccttgttaatggtactcctgttgctgttaaaaagttgctcaacaatttaggacaagctgataaagacttcagagttgaagttgaagctataggtcacgttcgacataaaaacttggtccgccttctcggatattgtatggaaggaacgcagaggatgctggtgtatgagtatgttaacaatggaaatttggagcaatggctccgtggagacaatcaaaatcatgagtatcttacatgggaggcacgagtgaaaattcttattgggacagccaaagcgctcgcgtaccttcacgaggcgattgagccaaaagtggtgcacagagacattaagtctagtaacattctgattgatgacaaattcaattctaaaatttctgactttggacttgctaaactacttggtgctgataagagttttataactactagagttatgggtaccttcggttacgtagctccagagtatgcgaattccggtcttctgaatgagaaaagcgatgtctacagcttcggggttgtactcttggaagctataactggtagatatccggtagactatgctcgtccaccacccgaggtacatttggtggagtggctgaagatgatggtccaacaaagacgatcagaagaagtggttgatccaaaccttgaaacaaaaccatctacaagtgctttgaaaagaacactattgactgctttgagatgtgttgatccaatgtctgagaaaagaccgaggatgagccaagttgcacgtatgcttgaatccgaagaatacccaattgctagagaggataggagaagacgaaggagtcagaacgggacaacaagagattcagatcctccgaggaacagcacagacactgacaagagtgagtaccatgacctaaagcctgaaggtggatagccattggaaataatggaggtgtaaattgtcgtaaagtctcgagctttatgggaagtttcaagtccttagttcttctccagatcttctgcgttatttgatgtttcttttcttttgtaataaggagggagagagagagtgaatgagttagtgagtgttcatcgttcgtttgttgcttgtatagtatttgtttgttgtattatcgtttgcttctccacgttttgcaatgtaggttgtttttggactaagtaaacgctatttgcaggttttgtagggtatgtaagtctttgagagaaacgacgtgtaatttgcaatttgcttgtggaagatattgttatttgagagag

SEQ ID NO: 29831 - protein, 484 aa, Arabidopsis thaliana
  peptide (1)..(484): Ceres Seq. ID no. 12558496
  misc_feature (166)..(437): Pfam Name: Protein kinase domain Pfam Description: Protein kinase domain
  misc_feature (110)..(442): Homolog of NCBI NO: 34912364 NR Description: putative receptor-like protein kinase
  misc_feature (21)..(482): Homolog of NCBI NO: 15231637 NR Description: receptor-like protein kinase; protein id:
  misc_feature (3)..(455): Homolog of NCBI NO: 15228043 NR Description: putative protein kinase; protein id: At2g42960.1
  misc_feature (15)..(474): Homolog of NCBI NO: 15217511 NR Description: putative ser/thr protein kinase; protein id:
  misc_feature (22)..(481): Homolog of NCBI NO: 34894708 NR Description: Putative protein kinase [Oryza sativa (japonica
  misc_feature (1)..(475): Homolog of NCBI NO: 25404144 NR Description: probable protein kinase F25P12.84
  misc_feature (1)..(475): Homolog of NCBI NO: 21593085 NR Description: Putative protein kinase [Arabidopsis thaliana]
  misc_feature (1)..(475): Homolog of NCBI NO: 18405946 NR Description: expressed protein
  misc_feature (1)..(473): Homolog of NCBI NO: 22331140 NR Description: serine/threonine protein kinase, putative
  misc_feature (1)..(484): Homolog of NCBI NO: 15238840 NR Description: Ser/Thr specific protein kinase - like protein
MGSGLNDTLSRNYNGLELWEIIVIVLSAIFVVVLAISLWLTFRRKTSRSSSNLIPVSRQIPPSVPEEIKEIRVDEVSSSNGGNGYPSISEKFGDKEPEKGIKAESENGDSSRSGSFNHLEKKDGSSVSSANPLTAPSPLSGLPEFSHLGWGHWFTLRDLQMATNQFSRDNIIGDGGYGVVYRGNLVNGTPVAVKKLLNNLGQADKDFRVEVEAIGHVRHKNLVRLLGYCMEGTQRMLVYEYVNNGNLEQWLRGDNQNHEYLTWEARVKILIGTAKALAYLHEAIEPKVVHRDIKSSNILIDDKFNSKISDFGLAKLLGADKSFITTRVMGTFGYVAPEYANSGLLNEKSDVYSFGVVLLEAITGRYPVDYARPPPEVHLVEWLKMMVQQRRSEEVVDPNLETKPSTSALKRTLLTALRCVDPMSEKRPRMSQVARMLESEEYPIAREDRRRRRSQNGTTRDSDPPRNSTDTDKSEYHDLKPEGG

SEQ ID NO: 29832 - protein, 324 aa, Arabidopsis thaliana
  peptide (1)..(324): Ceres Seq. ID no. 12558497
  misc_feature (6)..(277): Pfam Name: Protein kinase domain Pfam Description: Protein kinase domain
  misc_feature (1)..(282): Homolog of NCBI NO: 34912364 NR Description: putative receptor-like protein kinase
  misc_feature (1)..(322): Homolog of NCBI NO: 15231637 NR Description: receptor-like protein kinase; protein id:
  misc_feature (1)..(295): Homolog of NCBI NO: 15228043 NR Description: putative protein kinase; protein id: At2g42960.1
  misc_feature (1)..(314): Homolog of NCBI NO: 15217511 NR Description: putative ser/thr protein kinase; protein id:
  misc_feature (1)..(321): Homolog of NCBI NO: 34894708 NR Description: Putative protein kinase [Oryza sativa (japonica
  misc_feature (1)..(315): Homolog of NCBI NO: 25404144 NR Description: probable protein kinase F25P12.84
  misc_feature (1)..(315): Homolog of NCBI NO: 21593085 NR Description: Putative protein kinase [Arabidopsis thaliana]
  misc_feature (1)..(315): Homolog of NCBI NO: 18405946 NR Description: expressed protein
  misc_feature (1)..(313): Homolog of NCBI NO: 22331140 NR Description: serine/threonine protein kinase, putative
  misc_feature (1)..(324): Homolog of NCBI NO: 15238840 NR Description: Ser/Thr specific protein kinase - like protein
MATNQFSRDNIIGDGGYGVVYRGNLVNGTPVAVKKLLNNLGQADKDFRVEVEAIGHVRHKNLVRLLGYCMEGTQRMLVYEYVNNGNLEQWLRGDNQNHEYLTWEARVKILIGTAKALAYLHEAIEPKVVHRDIKSSNILIDDKFNSKISDFGLAKLLGADKSFITTRVMGTFGYVAPEYANSGLLNEKSDVYSFGVVLLEAITGRYPVDYARPPPEVHLVEWLKMMVQQRRSEEVVDPNLETKPSTSALKRTLLTALRCVDPMSEKRPRMSQVARMLESEEYPIAREDRRRRRSQNGTTRDSDPPRNSTDTDKSEYHDLKPEGG

SEQ ID NO: 29833 - protein, 255 aa, Arabidopsis thaliana
  peptide (1)..(255): Ceres Seq. ID no. 12558498
  misc_feature (1)..(208): Pfam Name: Protein kinase domain Pfam Description: Protein kinase domain
  misc_feature (1)..(213): Homolog of NCBI NO: 34912364 NR Description: putative receptor-like protein kinase
  misc_feature (1)..(253): Homolog of NCBI NO: 15231637 NR Description: receptor-like protein kinase; protein id:
  misc_feature (1)..(226): Homolog of NCBI NO: 15228043 NR Description: putative protein kinase; protein id: At2g42960.1
  misc_feature (1)..(245): Homolog of NCBI NO: 15217511 NR Description: putative ser/thr protein kinase; protein id:
  misc_feature (1)..(252): Homolog of NCBI NO: 34894708 NR Description: Putative protein kinase [Oryza sativa (japonica
  misc_feature (1)..(246): Homolog of NCBI NO: 25404144 NR Description: probable protein kinase F25P12.84
  misc_feature (1)..(246): Homolog of NCBI NO: 21593085 NR Description: Putative protein kinase [Arabidopsis thaliana]
  misc_feature (1)..(246): Homolog of NCBI NO: 18405946 NR Description: expressed protein
  misc_feature (1)..(244): Homolog of NCBI NO: 22331140 NR Description: serine/threonine protein kinase, putative
  misc_feature (1)..(255): Homolog of NCBI NO: 15238840 NR Description: Ser/Thr specific protein kinase - like protein
MEGTQRMLVYEYVNNGNLEQWLRGDNQNHEYLTWEARVKILIGTAKALAYLHEAIEPKVVHRDIKSSNILIDDKFNSKISDFGLAKLLGADKSFITTRVMGTFGYVAPEYANSGLLNEKSDVYSFGVVLLEAITGRYPVDYARPPPEVHLVEWLKMMVQQRRSEEVVDPNLETKPSTSALKRTLLTALRCVDPMSEKRPRMSQVARMLESEEYPIAREDRRRRRSQNGTTRDSDPPRNSTDTDKSEYHDLKPEGG

SEQ ID NO: 29834 - DNA, 1239 bp, Arabidopsis thaliana
  misc_feature (1)..(1239): Ceres Seq. ID no. 6443802
  misc_feature: MA Experiment ID: 108464 Result: Up-regulated in Transcription
  misc_feature: MA Experiment 108464 PARAMETER Experiment Name: At_Germinating_Seeds_cDNA_P Parameter: Age (day) Value: 4 vs. 0
  misc_feature: MA Experiment 108464 PARAMETER Experiment Name: At_Germinating_Seeds_cDNA_P Parameter: Tissue Value: Germinating Seeds
  misc_feature: MA Experiment ID: 108488 Result: Down-regulated in Transcription
  misc_feature: MA Experiment ID: 108489 Result: Up-regulated in Transcription
  misc_feature: MA Experiment ID: 108561 Result: Up-regulated in Transcription
  misc_feature: MA Experiment 108561 PARAMETER Experiment Name: At_100uM_ABA_cDNA_P Parameter: Timepoint (hr) Value: 6
  misc_feature: MA Experiment 108561 PARAMETER Experiment Name: At_100uM_ABA_cDNA_P Parameter: Tissue Value: Aerial
  misc_feature: MA Experiment 108561 PARAMETER Experiment Name: At_100uM_ABA_cDNA_P Parameter: Treatment Value: 100uM ABA vs. No Treatment
  misc_feature: MA Experiment ID: 108572 Result: Up-regulated in Transcription
  misc_feature: MA Experiment 108572 PARAMETER Experiment Name: At_Drought_cDNA_P Parameter: Timepoint (hr) Value: 1
  misc_feature: MA Experiment 108572 PARAMETER Experiment Name: At_Drought_cDNA_P Parameter: Tissue Value: Aerial
  misc_feature: MA Experiment 108572 PARAMETER Experiment Name: At_Drought_cDNA_P Parameter: Treatment Value: Drought vs. No Drought
  misc_feature: MA Experiment ID: 108573 Result: Up-regulated in Transcription
  misc_feature: MA Experiment 108573 PARAMETER Experiment Name: At_Drought_cDNA_P Parameter: Timepoint (hr) Value: 6
  misc_feature: MA Experiment 108573 PARAMETER Experiment Name: At_Drought_cDNA_P Parameter: Tissue Value: Aerial
  misc_feature: MA Experiment 108573 PARAMETER Experiment Name: At_Drought_cDNA_P Parameter: Treatment Value: Drought vs. No Drought
  misc_feature: MA Experiment ID: 108574 Result: Up-regulated in Transcription
  misc_feature: MA Experiment 108574 PARAMETER Experiment Name: At_Wounding__cDNA_P Parameter: Timepoint (hr) Value: 1
  misc_feature: MA Experiment 108574 PARAMETER Experiment Name: At_Wounding__cDNA_P Parameter: Tissue Value: Aerial
  misc_feature: MA Experiment 108574 PARAMETER Experiment Name: At_Wounding__cDNA_P Parameter: Treatment Value: Wounding vs. No Wounding
  misc_feature: MA Experiment ID: 108585 Result: Up-regulated in Transcription
  misc_feature: MA Experiment 108585 PARAMETER Experiment Name: At_5mM_NaNP_cDNA_P Parameter: Timepoint (hr) Value: 6
  misc_feature: MA Experiment 108585 PARAMETER Experiment Name: At_5mM_NaNP_cDNA_P Parameter: Tissue Value: Aerial
  misc_feature: MA Experiment 108585 PARAMETER Experiment Name: At_5mM_NaNP_cDNA_P Parameter: Treatment Value: null
  misc_feature: MA Experiment ID: 108595 Result: Down-regulated in Transcription
  misc_feature: MA Experiment 108595 PARAMETER Experiment Name: At_Ler-pi_Ovule_cDNA_P Parameter: Plant Line Value: null
  misc_feature: MA Experiment ID: 108605 Result: Up-regulated in Transcription
  misc_feature: MA Experiment 108605 PARAMETER Experiment Name: At_100uM_ABA_cDNA_P Parameter: Timepoint (hr) Value: 6
  misc_feature: MA Experiment 108605 PARAMETER Experiment Name: At_100uM_ABA_cDNA_P Parameter: Tissue Value: Aerial
  misc_feature: MA Experiment 108605 PARAMETER Experiment Name: At_100uM_ABA_cDNA_P Parameter: Treatment Value: 100uM ABA vs. No Treatment
  misc_feature: MA Experiment ID: 108607 Result: Up-regulated in Transcription
  misc_feature: MA Experiment 108607 PARAMETER Experiment Name: At_100uM_ABA_cDNA_P Parameter: Timepoint (hr) Value: 4
  misc_feature: MA Experiment 108607 PARAMETER Experiment Name: At_100uM_ABA_cDNA_P Parameter: Tissue Value: Aerial
  misc_feature: MA Experiment 108607 PARAMETER Experiment Name: At_100uM_ABA_cDNA_P Parameter: Treatment Value: 100uM ABA vs. No Treatment
  misc_feature: MA Experiment ID: 108668 Result: Up-regulated in Transcription
  misc_feature: MA Experiment 108668 PARAMETER Experiment Name: At_2mM_SA_cDNA_P Parameter: Plant Line Value: WS
  misc_feature: MA Experiment 108668 PARAMETER Experiment Name: At_2mM_SA_cDNA_P Parameter: Timepoint (hr) Value: 6
  misc_feature: MA Experiment 108668 PARAMETER Experiment Name: At_2mM_SA_cDNA_P Parameter: Treatment Value: 2mM SA vs. No Treatment
  misc_feature: MA Experiment ID: 20000069 Result: Up-regulated in Transcription
  misc_feature: MA Experiment 20000069 PARAMETER Experiment Name: At_100uM_ABA_Mutants_cDNA_P Parameter: Plant Line Value: CS23
  misc_feature: MA Experiment 20000069 PARAMETER Experiment Name: At_100uM_ABA_Mutants_cDNA_P Parameter: Timepoint (hr) Value: 6
  misc_feature: MA Experiment 20000069 PARAMETER Experiment Name: At_100uM_ABA_Mutants_cDNA_P Parameter: Tissue Value: Aerial
  misc_feature: MA Experiment 20000069 PARAMETER Experiment Name: At_100uM_ABA_Mutants_cDNA_P Parameter: Treatment Value: 100uM ABA vs. No Treatment
  misc_feature: MA Experiment ID: 20000070 Result: Up-regulated in Transcription
  misc_feature: MA Experiment 20000070 PARAMETER Experiment Name: At_100uM_ABA_Mutants_cDNA_P Parameter: Plant Line Value: CS24
  misc_feature: MA Experiment 20000070 PARAMETER Experiment Name: At_100uM_ABA_Mutants_cDNA_P Parameter: Timepoint (hr) Value: 6
  misc_feature: MA Experiment 20000070 PARAMETER Experiment Name: At_100uM_ABA_Mutants_cDNA_P Parameter: Tissue Value: Aerial
  misc_feature: MA Experiment 20000070 PARAMETER Experiment Name: At_100uM_ABA_Mutants_cDNA_P Parameter: Treatment Value: 100uM ABA vs. No Treatment
  misc_feature: MA Experiment ID: 20000071 Result: Up-regulated in Transcription
  misc_feature: MA Experiment 20000071 PARAMETER Experiment Name: At_100uM_ABA_Mutants_cDNA_P Parameter: Plant Line Value: CS8104
  misc_feature: MA Experiment 20000071 PARAMETER Experiment Name: At_100uM_ABA_Mutants_cDNA_P Parameter: Timepoint (hr) Value: 6
  misc_feature: MA Experiment 20000071 PARAMETER Experiment Name: At_100uM_ABA_Mutants_cDNA_P Parameter: Tissue Value: Aerial
  misc_feature: MA Experiment 20000071 PARAMETER Experiment Name: At_100uM_ABA_Mutants_cDNA_P Parameter: Treatment Value: 100uM ABA vs. No Treatment
  misc_feature: MA Experiment ID: 20000072 Result: Up-regulated in Transcription
  misc_feature: MA Experiment 20000072 PARAMETER Experiment Name: At_100uM_ABA_Mutants_cDNA_P Parameter: Plant Line Value: CS8105
  misc_feature: MA Experiment 20000072 PARAMETER Experiment Name: At_100uM_ABA_Mutants_cDNA_P Parameter: Timepoint (hr) Value: 6
  misc_feature: MA Experiment 20000072 PARAMETER Experiment Name: At_100uM_ABA_Mutants_cDNA_P Parameter: Tissue Value: Aerial
  misc_feature: MA Experiment 20000072 PARAMETER Experiment Name: At_100uM_ABA_Mutants_cDNA_P Parameter: Treatment Value: 100uM ABA vs. No Treatment
  misc_feature: MA Experiment ID: 20000087 Result: Up-regulated in Transcription
  misc_feature: MA Experiment 20000087 PARAMETER Experiment Name: At_100uM_ABA_Mutants_cDNA_P Parameter: Plant Line Value: WS
  misc_feature: MA Experiment 20000087 PARAMETER Experiment Name: At_100uM_ABA_Mutants_cDNA_P Parameter: Timepoint (hr) Value: 6
  misc_feature: MA Experiment 20000087 PARAMETER Experiment Name: At_100uM_ABA_Mutants_cDNA_P Parameter: Tissue Value: Aerial
  misc_feature: MA Experiment 20000087 PARAMETER Experiment Name: At_100uM_ABA_Mutants_cDNA_P Parameter: Treatment Value: 100uM ABA vs. No Treatment
  misc_feature: MA Experiment ID: 20000088 Result: Up-regulated in Transcription
  misc_feature: MA Experiment 20000088 PARAMETER Experiment Name: At_100uM_ABA_Mutants_cDNA_P Parameter: Plant Line Value: Landsberg
  misc_feature: MA Experiment 20000088 PARAMETER Experiment Name: At_100uM_ABA_Mutants_cDNA_P Parameter: Timepoint (hr) Value: 6
  misc_feature: MA Experiment 20000088 PARAMETER Experiment Name: At_100uM_ABA_Mutants_cDNA_P Parameter: Tissue Value: Aerial
  misc_feature: MA Experiment 20000088 PARAMETER Experiment Name: At_100uM_ABA_Mutants_cDNA_P Parameter: Treatment Value: 100uM ABA vs. No Treatment
  misc_feature: MA Experiment ID: 20000117 Result: Up-regulated in Transcription
  misc_feature: MA Experiment 20000117 PARAMETER Experiment Name: At_100uM_ABA_Mutants_cDNA_P Parameter: Plant Line Value: Columbia
  misc_feature: MA Experiment 20000117 PARAMETER Experiment Name: At_100uM_ABA_Mutants_cDNA_P Parameter: Timepoint (hr) Value: 6
  misc_feature: MA Experiment 20000117 PARAMETER Experiment Name: At_100uM_ABA_Mutants_cDNA_P Parameter: Tissue Value: Aerial
  misc_feature: MA Experiment 20000117 PARAMETER Experiment Name: At_100uM_ABA_Mutants_cDNA_P Parameter: Treatment Value: 100uM ABA vs. No Treatment
  misc_feature: MA Experiment ID: 20000166 Result: Up-regulated in Transcription
  misc_feature: MA Experiment 20000166 PARAMETER Experiment Name: At_100uM_ABA_P Parameter: Age (day) Value: 14
  misc_feature: MA Experiment 20000166 PARAMETER Experiment Name: At_100uM_ABA_P Parameter: Organism Value: A. thaliana
  misc_feature: MA Experiment 20000166 PARAMETER Experiment Name: At_100uM_ABA_P Parameter: Plant Line Value: WS
  misc_feature: MA Experiment 20000166 PARAMETER Experiment Name: At_100uM_ABA_P Parameter: Timepoint (hr) Value: 1
  misc_feature: MA Experiment 20000166 PARAMETER Experiment Name: At_100uM_ABA_P Parameter: Tissue Value: Aerial
  misc_feature: MA Experiment 20000166 PARAMETER Experiment Name: At_100uM_ABA_P Parameter: Treatment Value: 100uM ABA vs. No Treatment
  misc_feature: MA Experiment ID: 20000169 Result: Up-regulated in Transcription
  misc_feature: MA Experiment 20000169 PARAMETER Experiment Name: At_100uM_ABA_P Parameter: Age (day) Value: 14
  misc_feature: MA Experiment 20000169 PARAMETER Experiment Name: At_100uM_ABA_P Parameter: Organism Value: A. thaliana
  misc_feature: MA Experiment 20000169 PARAMETER Experiment Name: At_100uM_ABA_P Parameter: Plant Line Value: WS
  misc_feature: MA Experiment 20000169 PARAMETER Experiment Name: At_100uM_ABA_P Parameter: Timepoint (hr) Value: 6
  misc_feature: MA Experiment 20000169 PARAMETER Experiment Name: At_100uM_ABA_P Parameter: Tissue Value: Aerial
  misc_feature: MA Experiment 20000169 PARAMETER Experiment Name: At_100uM_ABA_P Parameter: Treatment Value: 100uM ABA vs. No Treatment
  misc_feature: MA Experiment ID: 20000182 Result: Up-regulated in Transcription
  misc_feature: MA Experiment 20000182 PARAMETER Experiment Name: At_2mM_SA_P Parameter: Age (day) Value: 14
  misc_feature: MA Experiment 20000182 PARAMETER Experiment Name: At_2mM_SA_P Parameter: Organism Value: A. thaliana
  misc_feature: MA Experiment 20000182 PARAMETER Experiment Name: At_2mM_SA_P Parameter: Plant Line Value: WS
  misc_feature: MA Experiment 20000182 PARAMETER Experiment Name: At_2mM_SA_P Parameter: Timepoint (hr) Value: 6
  misc_feature: MA Experiment 20000182 PARAMETER Experiment Name: At_2mM_SA_P Parameter: Tissue Value: Aerial
  misc_feature: MA Experiment 20000182 PARAMETER Experiment Name: At_2mM_SA_P Parameter: Treatment Value: 2mM SA vs. No Treatment
  misc_feature: MA Experiment ID: 20000184 Result: Down-regulated in Transcription
  misc_feature: MA Experiment 20000184 PARAMETER Experiment Name: At_Shoots__P Parameter: Age (day) Value: 7
  misc_feature: MA Experiment 20000184 PARAMETER Experiment Name: At_Shoots__P Parameter: Tissue Value: Shoots vs. Whole Plant
  misc_feature: MA Experiment ID: 20000213 Result: Up-regulated in Transcription
  misc_feature: MA Experiment 20000213 PARAMETER Experiment Name: At_4deg_Cold_P Parameter: Timepoint (hr) Value: 2
  misc_feature: MA Experiment ID: 20000224 Result: Up-regulated in Transcription
  misc_feature: MA Experiment ID: 20000234 Result: Down-regulated in Transcription
  misc_feature: MA Experiment 20000234 PARAMETER Experiment Name: At_Siliques_P Parameter: Age (day) Value: 21
  misc_feature: MA Experiment 20000234 PARAMETER Experiment Name: At_Siliques_P Parameter: Organism Value: A. thaliana
  misc_feature: MA Experiment 20000234 PARAMETER Experiment Name: At_Siliques_P Parameter: Plant Line Value: WS
  misc_feature: MA Experiment 20000234 PARAMETER Experiment Name: At_Siliques_P Parameter: Tissue Value: Less Than 5mm Siliques vs. Whole Plant
  misc_feature: MA Experiment ID: 20000235 Result: Down-regulated in Transcription
  misc_feature: MA Experiment 20000235 PARAMETER Experiment Name: At_Siliques_P Parameter: Age (day) Value: 21
  misc_feature: MA Experiment 20000235 PARAMETER Experiment Name: At_Siliques_P Parameter: Organism Value: A. thaliana
  misc_feature: MA Experiment 20000235 PARAMETER Experiment Name: At_Siliques_P Parameter: Plant Line Value: WS
  misc_feature: MA Experiment 20000235 PARAMETER Experiment Name: At_Siliques_P Parameter: Tissue Value: 5-10mm Siliques vs. Whole Plant
  misc_feature: MA Experiment ID: 20000286 Result: Down-regulated in Transcription
  misc_feature: MA Experiment 20000286 PARAMETER Experiment Name: At_Open_Flower_P Parameter: Age (day) Value: 21
  misc_feature: MA Experiment 20000286 PARAMETER Experiment Name: At_Open_Flower_P Parameter: Plant Line Value: WS
  misc_feature: MA Experiment 20000286 PARAMETER Experiment Name: At_Open_Flower_P Parameter: Tissue Value: Half Open vs. Whole Plant
  misc_feature: MA Experiment ID: 20000437 Result: Up-regulated in Transcription
  misc_feature: MA Experiment 20000437 PARAMETER Experiment Name: At_Drought_P Parameter: Age (day) Value: 8
  misc_feature: MA Experiment 20000437 PARAMETER Experiment Name: At_Drought_P Parameter: Organism Value: A. thaliana
  misc_feature: MA Experiment 20000437 PARAMETER Experiment Name: At_Drought_P Parameter: Plant Line Value: WS
  misc_feature: MA Experiment 20000437 PARAMETER Experiment Name: At_Drought_P Parameter: Timepoint (hr) Value: 24
  misc_feature: MA Experiment 20000437 PARAMETER Experiment Name: At_Drought_P Parameter: Tissue Value: Whole Plant
  misc_feature: MA Experiment 20000437 PARAMETER Experiment Name: At_Drought_P Parameter: Treatment Value: Drought vs. No Drought
  misc_feature: MA Experiment ID: 20000495 Result: Down-regulated in Transcription
  misc_feature: MA Experiment 20000495 PARAMETER Experiment Name: At_Guard_Cells_P Parameter: Harvest Date Value: 8/2/2002
  misc_feature: MA Experiment 20000495 PARAMETER Experiment Name: At_Guard_Cells_P Parameter: Organism Value: A. thaliana
  misc_feature: MA Experiment 20000495 PARAMETER Experiment Name: At_Guard_Cells_P Parameter: Tissue Value: Guard Cells vs. Leaves
  misc_feature: MA Experiment ID: 20001247 Result: Up-regulated in Transcription
  misc_feature: MA Experiment 20001247 PARAMETER Experiment Name: At_Far-red-induction_P Parameter: Age (day) Value: 7
  misc_feature: MA Experiment 20001247 PARAMETER Experiment Name: At_Far-red-induction_P Parameter: Light Value: Far-red vs. White
  misc_feature: MA Experiment 20001247 PARAMETER Experiment Name: At_Far-red-induction_P Parameter: Organism Value: A. thaliana
  misc_feature: MA Experiment 20001247 PARAMETER Experiment Name: At_Far-red-induction_P Parameter: Plant Line Value: Columbia
  misc_feature: MA Experiment 20001247 PARAMETER Experiment Name: At_Far-red-induction_P Parameter: Timepoint (hr) Value: 1
  misc_feature: MA Experiment 20001247 PARAMETER Experiment Name: At_Far-red-induction_P Parameter: Tissue Value: Whole Plant
  misc_feature: MA Experiment ID: 20001560 Result: Down-regulated in Transcription
  misc_feature: MA Experiment 20001560 PARAMETER Experiment Name: At_Drought_Soil_Dry_P Parameter: Age (day) Value: 28
  misc_feature: MA Experiment 20001560 PARAMETER Experiment Name: At_Drought_Soil_Dry_P Parameter: Organism Value: A. thaliana
  misc_feature: MA Experiment 20001560 PARAMETER Experiment Name: At_Drought_Soil_Dry_P Parameter: Plant Line Value: WS
  misc_feature: MA Experiment 20001560 PARAMETER Experiment Name: At_Drought_Soil_Dry_P Parameter: Post Timepoint (hr) Value: None
  misc_feature: MA Experiment 20001560 PARAMETER Experiment Name: At_Drought_Soil_Dry_P Parameter: Post-Treatment Value: None
  misc_feature: MA Experiment 20001560 PARAMETER Experiment Name: At_Drought_Soil_Dry_P Parameter: Timepoint (day) Value: 14
  misc_feature: MA Experiment 20001560 PARAMETER Experiment Name: At_Drought_Soil_Dry_P Parameter: Treatment Value: Drought vs. No Drought
  misc_feature: MA Experiment ID: 20001904 Result: Up-regulated in Transcription
  misc_feature: MA Experiment 20001904 PARAMETER Experiment Name: At_Drought_Reproduction_P Parameter: Age (day) Value: 37
  misc_feature: MA Experiment 20001904 PARAMETER Experiment Name: At_Drought_Reproduction_P Parameter: Organism Value: A. thaliana
  misc_feature: MA Experiment 20001904 PARAMETER Experiment Name: At_Drought_Reproduction_P Parameter: Plant Line Value: WS
  misc_feature: MA Experiment 20001904 PARAMETER Experiment Name: At_Drought_Reproduction_P Parameter: Timepoint (day) Value: 7
  misc_feature: MA Experiment 20001904 PARAMETER Experiment Name: At_Drought_Reproduction_P Parameter: Tissue Value: Rosettes
  misc_feature: MA Experiment 20001904 PARAMETER Experiment Name: At_Drought_Reproduction_P Parameter: Treatment Value: Drought vs. No Drought
  misc_feature: MA Experiment ID: 20001905 Result: Up-regulated in Transcription
  misc_feature: MA Experiment 20001905 PARAMETER Experiment Name: At_Drought_Reproduction_P Parameter: Age (day) Value: 40
  misc_feature: MA Experiment 20001905 PARAMETER Experiment Name: At_Drought_Reproduction_P Parameter: Organism Value: A. thaliana
  misc_feature: MA Experiment 20001905 PARAMETER Experiment Name: At_Drought_Reproduction_P Parameter: Plant Line Value: WS
  misc_feature: MA Experiment 20001905 PARAMETER Experiment Name: At_Drought_Reproduction_P Parameter: Timepoint (day) Value: 10
  misc_feature: MA Experiment 20001905 PARAMETER Experiment Name: At_Drought_Reproduction_P Parameter: Tissue Value: Rosettes
  misc_feature: MA Experiment 20001905 PARAMETER Experiment Name: At_Drought_Reproduction_P Parameter: Treatment Value: Drought vs. No Drought
attttatagaacagcaaaaccctagatttcctgttcaagctcaagaccgtacaaaactttggaactcatatataaagatctcgagaatagcattatgaatatcgtctcttggaaagatgcaaacgacgaagttgcaggcggcgctacgacaagacgtgaaagagaagtaaaagaggatcaagaagaaaccgaagtcagagccaccagtggcaaaaccgtaattaaaaagcagcctacatcgatctcttcttcttcttcttcgtggatgaaatccaaggatccgaggattgttagggtttcacgcgcctttggaggcaaagaccgtcacagcaaagtgtgtacgttacgtggactacgtgacagacgcgtgagattatcagtcccaacggctattcagctctacgatcttcaagaacggctcggtgttgaccagcctagcaaagccgttgactggttgcttgatgcagctaaagaggagatcgacgagctacctccgttacctatctcgccggaaaatttcagcatcttcaaccatcatcagtccttcttgaatcttggtcaacggcccggtcaagatccgacccaactcgggtttaaaatcaatggatgtgtacaaaagtctactactactagccgcgaagaaaacgatagagagaaaggagaaaacgatgtcgtttacacaaacaatcatcatgttgggtcttatggaacttatcacaacctggaacatcatcatcatcatcaccaacatttgagtttacaggcagattatcatagtcatcaactacatagtcttgtcccatttccatcacaaattttggtatgtccaatgacgacatcaccaacaactacaactatacaatctttgtttccatcatcatcgtcagctggttcagggactatggagacattagatccgaggcaaatgtagcaacaatggtggtagagacattgataatcggatgtcgtcggtccaattcaaccgaactaatagcactacaacggctaacatgtcgaggcatctaggctcggagcgttgtacaagtagaggaagtgatcaccatatgtgaagttagattattgaaacgatataattgttgtttgatgtgttcagaaataaggggacacaaaacaaaatataaggtaattactattgtactatgttttgctgatatattttttaatagacaaattaatgttataaattgatttattaatttactattagcatgtgttttg

SEQ ID NO: 29835 - protein, 278 aa, Arabidopsis thaliana
  peptide (1)..(278): Ceres Seq. ID no. 6443803
  misc_feature (58)..(278): Pfam Name: TCP family transcription factor Pfam Description: TCP family transcription factor
  misc_feature (70)..(187): Homolog of NCBI NO: 20975255 NR Description: transcription factor PCF6 [Oryza sativa (japonica
  misc_feature (64)..(135): Homolog of NCBI NO: 25369264 NR Description: probable basic helix-loop-helix DNA binding
  misc_feature (50)..(135): Homolog of NCBI NO: 18415079 NR Description: teosinte branched1 - like protein
  misc_feature (50)..(135): Homolog of NCBI NO: 7486304 NR Description: hypothetical protein F28J12.50 - Arabidopsis
  misc_feature (56)..(150): Homolog of NCBI NO: 18397402 NR Description: expressed protein
  misc_feature (43)..(271): Homolog of NCBI NO: 15241512 NR Description: putative helix-loop-helix DNA binding protein
  misc_feature (43)..(148): Homolog of NCBI NO: 34909780 NR Description: P0512C01.32 [Oryza sativa (japonica
  misc_feature (16)..(185): Homolog of NCBI NO: 15239489 NR Description: DNA binding protein - like; protein id:
  misc_feature (1)..(278): Homolog of NCBI NO: 18396089 NR Description: expressed protein
  misc_feature (1)..(278): Homolog of NCBI NO: 30678498 NR Description: TCP family transcription factor TFPD [Arabidopsis
MNIVSWKDANDEVAGGATTRREREVKEDQEETEVRATSGKTVIKKQPTSISSSSSSWMKSKDPRIVRVSRAFGGKDRHSKVCTLRGLRDRRVRLSVPTAIQLYDLQERLGVDQPSKAVDWLLDAAKEEIDELPPLPISPENFSIFNHHQSFLNLGQRPGQDPTQLGFKINGCVQKSTTTSREENDREKGENDVVYTNNHHVGSYGTYHNLEHHHHHHQHLSLQADYHSHQLHSLVPFPSQILVCPMTTSPTTTTIQSLFPSSSSAGSGTMETLDPRQM

SEQ ID NO: 29836 - protein, 221 aa, Arabidopsis thaliana
  peptide (1)..(221): Ceres Seq. ID no. 6443804
  misc_feature (1)..(221): Pfam Name: TCP family transcription factor Pfam Description: TCP family transcription factor
  misc_feature (13)..(130): Homolog of NCBI NO: 20975255 NR Description: transcription factor PCF6 [Oryza sativa (japonica
  misc_feature (7)..(78): Homolog of NCBI NO: 25369264 NR Description: probable basic helix-loop-helix DNA binding
  misc_feature (1)..(78): Homolog of NCBI NO: 18415079 NR Description: teosinte branched1 - like protein
  misc_feature (1)..(78): Homolog of NCBI NO: 7486304 NR Description: hypothetical protein F28J12.50 - Arabidopsis
  misc_feature (1)..(93): Homolog of NCBI NO: 18397402 NR Description: expressed protein
  misc_feature (1)..(214): Homolog of NCBI NO: 15241512 NR Description: putative helix-loop-helix DNA binding protein
  misc_feature (1)..(91): Homolog of NCBI NO: 34909780 NR Description: P0512C01.32 [Oryza sativa (japonica
  misc_feature (1)..(128): Homolog of NCBI NO: 15239489 NR Description: DNA binding protein - like; protein id:
  misc_feature (1)..(221): Homolog of NCBI NO: 18396089 NR Description: expressed protein
  misc_feature (1)..(221): Homolog of NCBI NO: 30678498 NR Description: TCP family transcription factor TFPD [Arabidopsis
MKSKDPRIVRVSRAFGGKDRHSKVCTLRGLRDRRVRLSVPTAIQLYDLQERLGVDQPSKAVDWLLDAAKEEIDELPPLPISPENFSIFNHHQSFLNLGQRPGQDPTQLGFKINGCVQKSTTTSREENDREKGENDVVYTNNHHVGSYGTYHNLEHHHHHHQHLSLQADYHSHQLHSLVPFPSQILVCPMTTSPTTTTIQSLFPSSSSAGSGTMETLDPRQM

SEQ ID NO: 29837 - DNA, 1580 bp, Arabidopsis thaliana
  misc_feature (1)..(1580): Ceres Seq. ID no. 12385358
  misc_feature: MA Experiment ID: 108435 Result: Up-regulated in Transcription
  misc_feature: MA Experiment 108435 PARAMETER Experiment Name: At_stm_Mutants_cDNA_P Parameter: Plant Line Value: wt Landsburg vs stm
  misc_feature: MA Experiment 108435 PARAMETER Experiment Name: At_stm_Mutants_cDNA_P Parameter: Tissue Value: Shoot Apical Meristem Region
  misc_feature: MA Experiment ID: 108461 Result: Up-regulated in Transcription
  misc_feature: MA Experiment 108461 PARAMETER Experiment Name: At_Germinating_Seeds_cDNA_P Parameter: Age (day) Value: 1 vs. 0
  misc_feature: MA Experiment 108461 PARAMETER Experiment Name: At_Germinating_Seeds_cDNA_P Parameter: Tissue Value: Germinating Seeds
  misc_feature: MA Experiment ID: 108462 Result: Up-regulated in Transcription
  misc_feature: MA Experiment 108462 PARAMETER Experiment Name: At_Germinating_Seeds_cDNA_P Parameter: Age (day) Value: 2 vs. 0
  misc_feature: MA Experiment 108462 PARAMETER Experiment Name: At_Germinating_Seeds_cDNA_P Parameter: Tissue Value: Germinating Seeds
  misc_feature: MA Experiment ID: 108463 Result: Up-regulated in Transcription
  misc_feature: MA Experiment 108463 PARAMETER Experiment Name: At_Germinating_Seeds_cDNA_P Parameter: Age (day) Value: 3 vs. 0
  misc_feature: MA Experiment 108463 PARAMETER Experiment Name: At_Germinating_Seeds_cDNA_P Parameter: Tissue Value: Germinating Seeds
  misc_feature: MA Experiment ID: 108464 Result: Up-regulated in Transcription
  misc_feature: MA Experiment 108464 PARAMETER Experiment Name: At_Germinating_Seeds_cDNA_P Parameter: Age (day) Value: 4 vs. 0
  misc_feature: MA Experiment 108464 PARAMETER Experiment Name: At_Germinating_Seeds_cDNA_P Parameter: Tissue Value: Germinating Seeds
  misc_feature: MA Experiment ID: 108501 Result: Up-regulated in Transcription
  misc_feature: MA Experiment 108501 PARAMETER Experiment Name: At_ap2_floral_buds_cDNA_P Parameter: Plant Line Value: ap2 (Ler.)
  misc_feature: MA Experiment 108501 PARAMETER Experiment Name: At_ap2_floral_buds_cDNA_P Parameter: Tissue Value: Closed Flower
  misc_feature: MA Experiment ID: 108594 Result: Down-regulated in Transcription
  misc_feature: MA Experiment 108594 PARAMETER Experiment Name: At_Ler-rhl_Root_cDNA_P Parameter: Plant Line Value: null
  misc_feature: MA Experiment ID: 108595 Result: Up-regulated in Transcription
  misc_feature: MA Experiment 108595 PARAMETER Experiment Name: At_Ler-pi_Ovule_cDNA_P Parameter: Plant Line Value: null
  misc_feature: MA Experiment ID: 108668 Result: Down-regulated in Transcription
  misc_feature: MA Experiment 108668 PARAMETER Experiment Name: At_2mM_SA_cDNA_P Parameter: Plant Line Value: WS
  misc_feature: MA Experiment 108668 PARAMETER Experiment Name: At_2mM_SA_cDNA_P Parameter: Timepoint (hr) Value: 6
  misc_feature: MA Experiment 108668 PARAMETER Experiment Name: At_2mM_SA_cDNA_P Parameter: Treatment Value: 2mM SA vs. No Treatment
  misc_feature: MA Experiment ID: 20000069 Result: Down-regulated in Transcription
  misc_feature: MA Experiment 20000069 PARAMETER Experiment Name: At_100uM_ABA_Mutants_cDNA_P Parameter: Plant Line Value: CS23
  misc_feature: MA Experiment 20000069 PARAMETER Experiment Name: At_100uM_ABA_Mutants_cDNA_P Parameter: Timepoint (hr) Value: 6
  misc_feature: MA Experiment 20000069 PARAMETER Experiment Name: At_100uM_ABA_Mutants_cDNA_P Parameter: Tissue Value: Aerial
  misc_feature: MA Experiment 20000069 PARAMETER Experiment Name: At_100uM_ABA_Mutants_cDNA_P Parameter: Treatment Value: 100uM ABA vs. No Treatment
  misc_feature: MA Experiment ID: 20000093 Result: Down-regulated in Transcription
  misc_feature: MA Experiment 20000093 PARAMETER Experiment Name: At_42deg_Heat_cDNA_P Parameter: Temperature (deg C) Value: 42 vs. 22
  misc_feature: MA Experiment 20000093 PARAMETER Experiment Name: At_42deg_Heat_cDNA_P Parameter: Timepoint (hr) Value: 0.5
  misc_feature: MA Experiment 20000093 PARAMETER Experiment Name: At_42deg_Heat_cDNA_P Parameter: Tissue Value: Aerial
  misc_feature: MA Experiment ID: 20000113 Result: Down-regulated in Transcription
  misc_feature: MA Experiment 20000113 PARAMETER Experiment Name: At_42deg_Heat_cDNA_P Parameter: Temperature (deg C) Value: 42 vs. 22
  misc_feature: MA Experiment 20000113 PARAMETER Experiment Name: At_42deg_Heat_cDNA_P Parameter: Timepoint (hr) Value: 8
  misc_feature: MA Experiment 20000113 PARAMETER Experiment Name: At_42deg_Heat_cDNA_P Parameter: Tissue Value: Aerial
  misc_feature: MA Experiment ID: 20000144 Result: Down-regulated in Transcription
  misc_feature: MA Experiment 20000144 PARAMETER Experiment Name: At_42deg_Heat_cDNA_P Parameter: Temperature (deg C) Value: 42 vs. 22
  misc_feature: MA Experiment 20000144 PARAMETER Experiment Name: At_42deg_Heat_cDNA_P Parameter: Timepoint (hr) Value: 1
  misc_feature: MA Experiment 20000144 PARAMETER Experiment Name: At_42deg_Heat_cDNA_P Parameter: Tissue Value: Aerial
  misc_feature: MA Experiment ID: 20000180 Result: Up-regulated in Transcription
  misc_feature: MA Experiment 20000180 PARAMETER Experiment Name: At_Germinating_Seeds_P Parameter: Age (hr) Value: 24 vs. 0
  misc_feature: MA Experiment 20000180 PARAMETER Experiment Name: At_Germinating_Seeds_P Parameter: Tissue Value: Germinating Seeds
  misc_feature: MA Experiment ID: 20000227 Result: Down-regulated in Transcription
  misc_feature: MA Experiment 20000227 PARAMETER Experiment Name: At_Root-Tips-vs-Tops_P Parameter: Tissue Value: Root Tips vs. Root Tops
  misc_feature: MA Experiment ID: 20000234 Result: Up-regulated in Transcription
  misc_feature: MA Experiment 20000234 PARAMETER Experiment Name: At_Siliques_P Parameter: Age (day) Value: 21
  misc_feature: MA Experiment 20000234 PARAMETER Experiment Name: At_Siliques_P Parameter: Organism Value: A. thaliana
  misc_feature: MA Experiment 20000234 PARAMETER Experiment Name: At_Siliques_P Parameter: Plant Line Value: WS
  misc_feature: MA Experiment 20000234 PARAMETER Experiment Name: At_Siliques_P Parameter: Tissue Value: Less Than 5mm Siliques vs. Whole Plant
  misc_feature: MA Experiment ID: 20000235 Result: Up-regulated in Transcription
  misc_feature: MA Experiment 20000235 PARAMETER Experiment Name: At_Siliques_P Parameter: Age (day) Value: 21
  misc_feature: MA Experiment 20000235 PARAMETER Experiment Name: At_Siliques_P Parameter: Organism Value: A. thaliana
  misc_feature: MA Experiment 20000235 PARAMETER Experiment Name: At_Siliques_P Parameter: Plant Line Value: WS
  misc_feature: MA Experiment 20000235 PARAMETER Experiment Name: At_Siliques_P Parameter: Tissue Value: 5-10mm Siliques vs. Whole Plant
  misc_feature: MA Experiment ID: 20000264 Result: Up-regulated in Transcription
  misc_feature: MA Experiment 20000264 PARAMETER Experiment Name: At_Open_Flower_P Parameter: Age (day) Value: 21
  misc_feature: MA Experiment 20000264 PARAMETER Experiment Name: At_Open_Flower_P Parameter: Plant Line Value: WS
  misc_feature: MA Experiment 20000264 PARAMETER Experiment Name: At_Open_Flower_P Parameter: Tissue Value: Open Flower vs. Whole Plant
  misc_feature: MA Experiment ID: 20000265 Result: Up-regulated in Transcription
  misc_feature: MA Experiment 20000265 PARAMETER Experiment Name: At_Open_Flower_P Parameter: Age (day) Value: 21
  misc_feature: MA Experiment 20000265 PARAMETER Experiment Name: At_Open_Flower_P Parameter: Plant Line Value: WS
  misc_feature: MA Experiment 20000265 PARAMETER Experiment Name: At_Open_Flower_P Parameter: Tissue Value: Closed Flower vs. Whole Plant
  misc_feature: MA Experiment ID: 20000286 Result: Up-regulated in Transcription
  misc_feature: MA Experiment 20000286 PARAMETER Experiment Name: At_Open_Flower_P Parameter: Age (day) Value: 21
  misc_feature: MA Experiment 20000286 PARAMETER Experiment Name: At_Open_Flower_P Parameter: Plant Line Value: WS
  misc_feature: MA Experiment 20000286 PARAMETER Experiment Name: At_Open_Flower_P Parameter: Tissue Value: Half Open vs. Whole Plant
  misc_feature: MA Experiment ID: 20000495 Result: Up-regulated in Transcription
  misc_feature: MA Experiment 20000495 PARAMETER Experiment Name: At_Guard_Cells_P Parameter: Harvest Date Value: 8/2/2002
  misc_feature: MA Experiment 20000495 PARAMETER Experiment Name: At_Guard_Cells_P Parameter: Organism Value: A. thaliana
  misc_feature: MA Experiment 20000495 PARAMETER Experiment Name: At_Guard_Cells_P Parameter: Tissue Value: Guard Cells vs. Leaves
  misc_feature: MA Experiment ID: 20000794 Result: Down-regulated in Transcription
  misc_feature: MA Experiment 20000794 PARAMETER Experiment Name: At_Petals_P Parameter: Age (day) Value: 23-25 days
  misc_feature: MA Experiment 20000794 PARAMETER Experiment Name: At_Petals_P Parameter: Plant Line Value: WS
  misc_feature: MA Experiment 20000794 PARAMETER Experiment Name: At_Petals_P Parameter: Tissue Value: Petals vs. Whole plant
  misc_feature: MA Experiment ID: 20001451 Result: Down-regulated in Transcription
  misc_feature: MA Experiment 20001451 PARAMETER Experiment Name: At_Far-red-induction_P Parameter: Age (day) Value: 7
  misc_feature: MA Experiment 20001451 PARAMETER Experiment Name: At_Far-red-induction_P Parameter: Light Value: Far-red vs. White
  misc_feature: MA Experiment 20001451 PARAMETER Experiment Name: At_Far-red-induction_P Parameter: Organism Value: A. thaliana
  misc_feature: MA Experiment 20001451 PARAMETER Experiment Name: At_Far-red-induction_P Parameter: Plant Line Value: Columbia
  misc_feature: MA Experiment 20001451 PARAMETER Experiment Name: At_Far-red-induction_P Parameter: Timepoint (hr) Value: 24
  misc_feature: MA Experiment 20001451 PARAMETER Experiment Name: At_Far-red-induction_P Parameter: Tissue Value: Whole Plant
  misc_feature: MA Experiment ID: 20001555 Result: Down-regulated in Transcription
  misc_feature: MA Experiment 20001555 PARAMETER Experiment Name: At_Drought_Soil_Dry_P Parameter: Age (day) Value: 24
  misc_feature: MA Experiment 20001555 PARAMETER Experiment Name: At_Drought_Soil_Dry_P Parameter: Organism Value: A. thaliana
  misc_feature: MA Experiment 20001555 PARAMETER Experiment Name: At_Drought_Soil_Dry_P Parameter: Plant Line Value: WS
  misc_feature: MA Experiment 20001555 PARAMETER Experiment Name: At_Drought_Soil_Dry_P Parameter: Post Timepoint (hr) Value: None
  misc_feature: MA Experiment 20001555 PARAMETER Experiment Name: At_Drought_Soil_Dry_P Parameter: Post-Treatment Value: None
  misc_feature: MA Experiment 20001555 PARAMETER Experiment Name: At_Drought_Soil_Dry_P Parameter: Timepoint (day) Value: 10
  misc_feature: MA Experiment 20001555 PARAMETER Experiment Name: At_Drought_Soil_Dry_P Parameter: Treatment Value: Drought vs. No Drought
  misc_feature: MA Experiment ID: 20001556 Result: Down-regulated in Transcription
  misc_feature: MA Experiment 20001556 PARAMETER Experiment Name: At_Drought_Soil_Dry_P Parameter: Age (day) Value: 26
  misc_feature: MA Experiment 20001556 PARAMETER Experiment Name: At_Drought_Soil_Dry_P Parameter: Organism Value: A. thaliana
  misc_feature: MA Experiment 20001556 PARAMETER Experiment Name: At_Drought_Soil_Dry_P Parameter: Plant Line Value: WS
  misc_feature: MA Experiment 20001556 PARAMETER Experiment Name: At_Drought_Soil_Dry_P Parameter: Post Timepoint (hr) Value: None
  misc_feature: MA Experiment 20001556 PARAMETER Experiment Name: At_Drought_Soil_Dry_P Parameter: Post-Treatment Value: None
  misc_feature: MA Experiment 20001556 PARAMETER Experiment Name: At_Drought_Soil_Dry_P Parameter: Timepoint (day) Value: 12
  misc_feature: MA Experiment 20001556 PARAMETER Experiment Name: At_Drought_Soil_Dry_P Parameter: Treatment Value: Drought vs. No Drought
  misc_feature: MA Experiment ID: 20001560 Result: Up-regulated in Transcription
  misc_feature: MA Experiment 20001560 PARAMETER Experiment Name: At_Drought_Soil_Dry_P Parameter: Age (day) Value: 28
  misc_feature: MA Experiment 20001560 PARAMETER Experiment Name: At_Drought_Soil_Dry_P Parameter: Organism Value: A. thaliana
  misc_feature: MA Experiment 20001560 PARAMETER Experiment Name: At_Drought_Soil_Dry_P Parameter: Plant Line Value: WS
  misc_feature: MA Experiment 20001560 PARAMETER Experiment Name: At_Drought_Soil_Dry_P Parameter: Post Timepoint (hr) Value: None
  misc_feature: MA Experiment 20001560 PARAMETER Experiment Name: At_Drought_Soil_Dry_P Parameter: Post-Treatment Value: None
  misc_feature: MA Experiment 20001560 PARAMETER Experiment Name: At_Drought_Soil_Dry_P Parameter: Timepoint (day) Value: 14
  misc_feature: MA Experiment 20001560 PARAMETER Experiment Name: At_Drought_Soil_Dry_P Parameter: Treatment Value: Drought vs. No Drought
  misc_feature: MA Experiment ID: 20001911 Result: Down-regulated in Transcription
  misc_feature: MA Experiment 20001911 PARAMETER Experiment Name: At_Drought_Reproduction_P Parameter: Age (day) Value: 40
  misc_feature: MA Experiment 20001911 PARAMETER Experiment Name: At_Drought_Reproduction_P Parameter: Organism Value: A. thaliana
  misc_feature: MA Experiment 20001911 PARAMETER Experiment Name: At_Drought_Reproduction_P Parameter: Plant Line Value: WS
  misc_feature: MA Experiment 20001911 PARAMETER Experiment Name: At_Drought_Reproduction_P Parameter: Timepoint (day) Value: 10
  misc_feature: MA Experiment 20001911 PARAMETER Experiment Name: At_Drought_Reproduction_P Parameter: Tissue Value: Flowers
  misc_feature: MA Experiment 20001911 PARAMETER Experiment Name: At_Drought_Reproduction_P Parameter: Treatment Value: Drought vs. No Drought
aaacccatccaacccaaaagcatacaatacaatgtctactcttgttttattcctccaacttttttccatcctaccattagcacttgggttgaaccacccaaattgtgacctgaccaagactcaagaccaaggctctaccctaagaatcttccacatagacagcccttgctcccccttcaaatcatcatccccactctcatgggaagcgcgtgtgctccagactctggctcaagaccaggcccgtctccagtacctgagcagcctcgtcgccgggagatctgtagtccccattgcctcagggcgtcaaatgttgcaaagcactacatacattgtcaaggctttgatcggtactccggctcagccactgctcctagccatggacacgagcagtgacgtggcttggattccttgctccggttgcgttggctgtccttctaacaccgccttttcccctgccaagtctacctccttcaagaatgttagctgcagcgctcctcagtgtaagcaggtaccaaaccccacgtgtggagcacgcgcgtgctctttcaacctcacctatggaagctcctccattgcggctaacctctctcaagacacgatccgtcttgccgccgatccgatcaaagcctttacatttggatgcgtcaacaaagtcgccggtggaggaaccatcccaccacctcaaggcttgttgggcttgggacgaggcccactttcactcatgtcacaggctcagtctatttacaagtccactttctcttactgtttgccaagtttcaggtctctgaccttctctggttctctcagactcggccctacctcccagccccagcgcgtgaagtacactcaacttctcagaaaccctagaaggtcttctctgtactacgtcaacctcgttgcgatccgcgttggtcggaaagtcgtcgatttaccgccggcagctattgcttttaatccttcaaccggcgctggaaccatcttcgactccgggactgtgtacacgcggctggctaaaccggtttacgaggcagtgaggaacgagttcaggaagcgcgtgaagccaaccacagccgtggtgacgtcactcgggggtttcgacacgtgctactcagggcaagtcaaggtgccgacgataacattcatgttcaagggagtgaacatgacgatgccagctgataacctgatgttacacagtaccgccggaagcacgtcgtgcctcgccatggctgcagcgccggaaaacgtaaactctgtcgtcaatgtgatcgcaagcatgcagcagcagaaccaccgtgtcctcatcgacgtccccaatggacggctcggtttggcacgtgaacgatgctcttagaaagatgaatgagacaataagagcctactcatatttatgcagagacttgtttgtttgtgttatttgtgtgtttcatttttgtcttgtcttgtgtcgtttgcttcaccagtcttagagggcggaggtgtgtagcatttgtgctatctagtaatttatgtttttaattgttcttcaattatctagagatttggatctaaactaatcaaataatgaaactatattatatttc

SEQ ID NO: 29838 - protein, 449 aa, Arabidopsis thaliana
  peptide (1)..(449): Ceres Seq. ID no. 12385359
  misc_feature (52)..(446): Pfam Name: Eukaryotic aspartyl protease Pfam Description: Eukaryotic aspartyl protease
  misc_feature (46)..(449): Homolog of NCBI NO: 15223368 NR Description: chloroplast nucleoid DNA binding protein, putative
  misc_feature (96)..(448): Homolog of NCBI NO: 34895664 NR Description: nucleoid DNA-binding protein cnd41-like protein
  misc_feature (11)..(449): Homolog of NCBI NO: 34910676 NR Description: P0690B02.2 [Oryza sativa (japonica
  misc_feature (82)..(449): Homolog of NCBI NO: 21450872 NR Description: unknown protein [Arabidopsis thaliana]
  misc_feature (12)..(449): Homolog of NCBI NO: 18391062 NR Description: expressed protein
  misc_feature (22)..(449): Homolog of NCBI NO: 20161865 NR Description: putative nucleoid DNA-binding-like protein
  misc_feature (34)..(449): Homolog of NCBI NO: 34899068 NR Description: similar to nucleoid DNA-binding-like protein
  misc_feature (16)..(449): Homolog of NCBI NO: 15232503 NR Description: nucleoid DNA-binding - like protein
  misc_feature (16)..(449): Homolog of NCBI NO: 21617933 NR Description: nucleoid DNA-binding-like protein [Arabidopsis
  misc_feature (11)..(449): Homolog of NCBI NO: 15240680 NR Description: nucleoid DNA-binding-like protein
NPSNPKAYNTMSTLVLFLQLFSILPLALGLNHPNCDLTKTQDQGSTLRIFHIDSPCSPFKSSSPLSWEARVLQTLAQDQARLQYLSSLVAGRSVVPIASGRQMLQSTTYIVKALIGTPAQPLLLAMDTSSDVAWIPCSGCVGCPSNTAFSPAKSTSFKNVSCSAPQCKQVPNPTCGARACSFNLTYGSSSIAANLSQDTIRLAADPIKAFTFGCVNKVAGGGTIPPPQGLLGLGRGPLSLMSQAQSIYKSTFSYCLPSFRSLTFSGSLRLGPTSQPQRVKYTQLLRNPRRSSLYYVNLVAIRVGRKVVDLPPAAIAFNPSTGAGTIFDSGTVYTRLAKPVYEAVRNEFRKRVKPTTAVVTSLGGFDTCYSGQVKVPTITFMFKGVNMTMPADNLMLHSTAGSTSCLAMAAAPENVNSVVNVIASMQQQNHRVLIDVPNGRLGLARERCS

SEQ ID NO: 29839 - protein, 439 aa, Arabidopsis thaliana
  peptide (1)..(439): Ceres Seq. ID no. 12385360
  misc_feature (42)..(436): Pfam Name: Eukaryotic aspartyl protease Pfam Description: Eukaryotic aspartyl protease
  misc_feature (36)..(439): Homolog of NCBI NO: 15223368 NR Description: chloroplast nucleoid DNA binding protein, putative
  misc_feature (86)..(438): Homolog of NCBI NO: 34895664 NR Description: nucleoid DNA-binding protein cnd41-like protein
  misc_feature (1)..(439): Homolog of NCBI NO: 34910676 NR Description: P0690B02.2 [Oryza sativa (japonica
  misc_feature (72)..(439): Homolog of NCBI NO: 21450872 NR Description: unknown protein [Arabidopsis thaliana]
  misc_feature (2)..(439): Homolog of NCBI NO: 18391062 NR Description: expressed protein
  misc_feature (12)..(439): Homolog of NCBI NO: 20161865 NR Description: putative nucleoid DNA-binding-like protein
  misc_feature (24)..(439): Homolog of NCBI NO: 34899068 NR Description: similar to nucleoid DNA-binding-like protein
  misc_feature (6)..(439): Homolog of NCBI NO: 15232503 NR Description: nucleoid DNA-binding - like protein
  misc_feature (6)..(439): Homolog of NCBI NO: 21617933 NR Description: nucleoid DNA-binding-like protein [Arabidopsis
  misc_feature (1)..(439): Homolog of NCBI NO: 15240680 NR Description: nucleoid DNA-binding-like protein
MSTLVLFLQLFSILPLALGLNHPNCDLTKTQDQGSTLRIFHIDSPCSPFKSSSPLSWEARVLQTLAQDQARLQYLSSLVAGRSVVPIASGRQMLQSTTYIVKALIGTPAQPLLLAMDTSSDVAWIPCSGCVGCPSNTAFSPAKSTSFKNVSCSAPQCKQVPNPTCGARACSFNLTYGSSSIAANLSQDTIRLAADPIKAFTFGCVNKVAGGGTIPPPQGLLGLGRGPLSLMSQAQSIYKSTFSYCLPSFRSLTFSGSLRLGPTSQPQRVKYTQLLRNPRRSSLYYVNLVAIRVGRKVVDLPPAAIAFNPSTGAGTIFDSGTVYTRLAKPVYEAVRNEFRKRVKPTTAVVTSLGGFDTCYSGQVKVPTITFMFKGVNMTMPADNLMLHSTAGSTSCLAMAAAPENVNSVVNVIASMQQQNHRVLIDVPNGRLGLARERCS

SEQ ID NO: 29840 - protein, 347 aa, Arabidopsis thaliana
  peptide (1)..(347): Ceres Seq. ID no. 12385361
  misc_feature (1)..(344): Pfam Name: Eukaryotic aspartyl protease Pfam Description: Eukaryotic aspartyl protease
  misc_feature (1)..(347): Homolog of NCBI NO: 15223368 NR Description: chloroplast nucleoid DNA binding protein, putative
  misc_feature (1)..(346): Homolog of NCBI NO: 34895664 NR Description: nucleoid DNA-binding protein cnd41-like protein
  misc_feature (1)..(347): Homolog of NCBI NO: 34910676 NR Description: P0690B02.2 [Oryza sativa (japonica
  misc_feature (1)..(347): Homolog of NCBI NO: 21450872 NR Description: unknown protein [Arabidopsis thaliana]
  misc_feature (1)..(347): Homolog of NCBI NO: 18391062 NR Description: expressed protein
  misc_feature (1)..(347): Homolog of NCBI NO: 20161865 NR Description: putative nucleoid DNA-binding-like protein
  misc_feature (1)..(347): Homolog of NCBI NO: 34899068 NR Description: similar to nucleoid DNA-binding-like protein
  misc_feature (1)..(347): Homolog of NCBI NO: 15232503 NR Description: nucleoid DNA-binding - like protein
  misc_feature (1)..(347): Homolog of NCBI NO: 21617933 NR Description: nucleoid DNA-binding-like protein [Arabidopsis
  misc_feature (1)..(347): Homolog of NCBI NO: 15240680 NR Description: nucleoid DNA-binding-like protein
MLQSTTYIVKALIGTPAQPLLLAMDTSSDVAWIPCSGCVGCPSNTAFSPAKSTSFKNVSCSAPQCKQVPNPTCGARACSFNLTYGSSSIAANLSQDTIRLAADPIKAFTFGCVNKVAGGGTIPPPQGLLGLGRGPLSLMSQAQSIYKSTFSYCLPSFRSLTFSGSLRLGPTSQPQRVKYTQLLRNPRRSSLYYVNLVAIRVGRKVVDLPPAAIAFNPSTGAGTIFDSGTVYTRLAKPVYEAVRNEFRKRVKPTTAVVTSLGGFDTCYSGQVKVPTITFMFKGVNMTMPADNLMLHSTAGSTSCLAMAAAPENVNSVVNVIASMQQQNHRVLIDVPNGRLGLARERCS

SEQ ID NO: 29841 - DNA, 2141 bp, Arabidopsis thaliana
  misc_feature (1)..(2141): Ceres Seq. ID no. 12333959
  misc_feature: MA Experiment ID: 108569 Result: Up-regulated in Transcription
  misc_feature: MA Experiment 108569 PARAMETER Experiment Name: At_0.001%_MeJA__cDNA_P Parameter: Timepoint (hr) Value: 6
  misc_feature: MA Experiment 108569 PARAMETER Experiment Name: At_0.001%_MeJA__cDNA_P Parameter: Tissue Value: Aerial
  misc_feature: MA Experiment 108569 PARAMETER Experiment Name: At_0.001%_MeJA__cDNA_P Parameter: Treatment Value: 0.001% MeJA vs. No Treatment
  misc_feature: MA Experiment ID: 108573 Result: Up-regulated in Transcription
  misc_feature: MA Experiment 108573 PARAMETER Experiment Name: At_Drought_cDNA_P Parameter: Timepoint (hr) Value: 6
  misc_feature: MA Experiment 108573 PARAMETER Experiment Name: At_Drought_cDNA_P Parameter: Tissue Value: Aerial
  misc_feature: MA Experiment 108573 PARAMETER Experiment Name: At_Drought_cDNA_P Parameter: Treatment Value: Drought vs. No Drought
  misc_feature: MA Experiment ID: 108576 Result: Up-regulated in Transcription
  misc_feature: MA Experiment 108576 PARAMETER Experiment Name: At_42deg_Heat_cDNA_P Parameter: Temperature (deg C) Value: 42 vs. 22
  misc_feature: MA Experiment 108576 PARAMETER Experiment Name: At_42deg_Heat_cDNA_P Parameter: Timepoint (hr) Value: 1
  misc_feature: MA Experiment 108576 PARAMETER Experiment Name: At_42deg_Heat_cDNA_P Parameter: Tissue Value: Aerial
  misc_feature: MA Experiment ID: 108577 Result: Up-regulated in Transcription
  misc_feature: MA Experiment 108577 PARAMETER Experiment Name: At_42deg_Heat_cDNA_P Parameter: Temperature (deg C) Value: 42 vs. 22
  misc_feature: MA Experiment 108577 PARAMETER Experiment Name: At_42deg_Heat_cDNA_P Parameter: Timepoint (hr) Value: 6
  misc_feature: MA Experiment 108577 PARAMETER Experiment Name: At_42deg_Heat_cDNA_P Parameter: Tissue Value: Aerial
  misc_feature: MA Experiment ID: 108585 Result: Up-regulated in Transcription
  misc_feature: MA Experiment 108585 PARAMETER Experiment Name: At_5mM_NaNP_cDNA_P Parameter: Timepoint (hr) Value: 6
  misc_feature: MA Experiment 108585 PARAMETER Experiment Name: At_5mM_NaNP_cDNA_P Parameter: Tissue Value: Aerial
  misc_feature: MA Experiment 108585 PARAMETER Experiment Name: At_5mM_NaNP_cDNA_P Parameter: Treatment Value: null
  misc_feature: MA Experiment ID: 108594 Result: Down-regulated in Transcription
  misc_feature: MA Experiment 108594 PARAMETER Experiment Name: At_Ler-rhl_Root_cDNA_P Parameter: Plant Line Value: null
  misc_feature: MA Experiment ID: 108595 Result: Down-regulated in Transcription
  misc_feature: MA Experiment 108595 PARAMETER Experiment Name: At_Ler-pi_Ovule_cDNA_P Parameter: Plant Line Value: null
  misc_feature: MA Experiment ID: 20000087 Result: Down-regulated in Transcription
  misc_feature: MA Experiment 20000087 PARAMETER Experiment Name: At_100uM_ABA_Mutants_cDNA_P Parameter: Plant Line Value: WS
  misc_feature: MA Experiment 20000087 PARAMETER Experiment Name: At_100uM_ABA_Mutants_cDNA_P Parameter: Timepoint (hr) Value: 6
  misc_feature: MA Experiment 20000087 PARAMETER Experiment Name: At_100uM_ABA_Mutants_cDNA_P Parameter: Tissue Value: Aerial
  misc_feature: MA Experiment 20000087 PARAMETER Experiment Name: At_100uM_ABA_Mutants_cDNA_P Parameter: Treatment Value: 100uM ABA vs. No Treatment
  misc_feature: MA Experiment ID: 20000093 Result: Up-regulated in Transcription
  misc_feature: MA Experiment 20000093 PARAMETER Experiment Name: At_42deg_Heat_cDNA_P Parameter: Temperature (deg C) Value: 42 vs. 22
  misc_feature: MA Experiment 20000093 PARAMETER Experiment Name: At_42deg_Heat_cDNA_P Parameter: Timepoint (hr) Value: 0.5
  misc_feature: MA Experiment 20000093 PARAMETER Experiment Name: At_42deg_Heat_cDNA_P Parameter: Tissue Value: Aerial
  misc_feature: MA Experiment ID: 20000112 Result: Up-regulated in Transcription
  misc_feature: MA Experiment 20000112 PARAMETER Experiment Name: At_42deg_Heat_cDNA_P Parameter: Temperature (deg C) Value: 42 vs. 22
  misc_feature: MA Experiment 20000112 PARAMETER Experiment Name: At_42deg_Heat_cDNA_P Parameter: Timepoint (hr) Value: 2
  misc_feature: MA Experiment 20000112 PARAMETER Experiment Name: At_42deg_Heat_cDNA_P Parameter: Tissue Value: Aerial
  misc_feature: MA Experiment ID: 20000113 Result: Up-regulated in Transcription
  misc_feature: MA Experiment 20000113 PARAMETER Experiment Name: At_42deg_Heat_cDNA_P Parameter: Temperature (deg C) Value: 42 vs. 22
  misc_feature: MA Experiment 20000113 PARAMETER Experiment Name: At_42deg_Heat_cDNA_P Parameter: Timepoint (hr) Value: 8
  misc_feature: MA Experiment 20000113 PARAMETER Experiment Name: At_42deg_Heat_cDNA_P Parameter: Tissue Value: Aerial
  misc_feature: MA Experiment ID: 20000144 Result: Up-regulated in Transcription
  misc_feature: MA Experiment 20000144 PARAMETER Experiment Name: At_42deg_Heat_cDNA_P Parameter: Temperature (deg C) Value: 42 vs. 22
  misc_feature: MA Experiment 20000144 PARAMETER Experiment Name: At_42deg_Heat_cDNA_P Parameter: Timepoint (hr) Value: 1
  misc_feature: MA Experiment 20000144 PARAMETER Experiment Name: At_42deg_Heat_cDNA_P Parameter: Tissue Value: Aerial
  misc_feature: MA Experiment ID: 20000171 Result: Up-regulated in Transcription
  misc_feature: MA Experiment 20000171 PARAMETER Experiment Name: At_42deg_Heat_P Parameter: Age (day) Value: 14
  misc_feature: MA Experiment 20000171 PARAMETER Experiment Name: At_42deg_Heat_P Parameter: Organism Value: A. thaliana
  misc_feature: MA Experiment 20000171 PARAMETER Experiment Name: At_42deg_Heat_P Parameter: Plant Line Value: WS
  misc_feature: MA Experiment 20000171 PARAMETER Experiment Name: At_42deg_Heat_P Parameter: Temperature (deg C) Value: 42 vs. 22
  misc_feature: MA Experiment 20000171 PARAMETER Experiment Name: At_42deg_Heat_P Parameter: Timepoint (hr) Value: 1
  misc_feature: MA Experiment 20000171 PARAMETER Experiment Name: At_42deg_Heat_P Parameter: Tissue Value: Aerial
  misc_feature: MA Experiment ID: 20000173 Result: Up-regulated in Transcription
  misc_feature: MA Experiment 20000173 PARAMETER Experiment Name: At_42deg_Heat_P Parameter: Age (day) Value: 14
  misc_feature: MA Experiment 20000173 PARAMETER Experiment Name: At_42deg_Heat_P Parameter: Organism Value: A. thaliana
  misc_feature: MA Experiment 20000173 PARAMETER Experiment Name: At_42deg_Heat_P Parameter: Plant Line Value: WS
  misc_feature: MA Experiment 20000173 PARAMETER Experiment Name: At_42deg_Heat_P Parameter: Temperature (deg C) Value: 42 vs. 22
  misc_feature: MA Experiment 20000173 PARAMETER Experiment Name: At_42deg_Heat_P Parameter: Timepoint (hr) Value: 6
  misc_feature: MA Experiment 20000173 PARAMETER Experiment Name: At_42deg_Heat_P Parameter: Tissue Value: Aerial
  misc_feature: MA Experiment ID: 20000184 Result: Down-regulated in Transcription
  misc_feature: MA Experiment 20000184 PARAMETER Experiment Name: At_Shoots__P Parameter: Age (day) Value: 7
  misc_feature: MA Experiment 20000184 PARAMETER Experiment Name: At_Shoots__P Parameter: Tissue Value: Shoots vs. Whole Plant
  misc_feature: MA Experiment ID: 20000234 Result: Down-regulated in Transcription
  misc_feature: MA Experiment 20000234 PARAMETER Experiment Name: At_Siliques_P Parameter: Age (day) Value: 21
  misc_feature: MA Experiment 20000234 PARAMETER Experiment Name: At_Siliques_P Parameter: Organism Value: A. thaliana
  misc_feature: MA Experiment 20000234 PARAMETER Experiment Name: At_Siliques_P Parameter: Plant Line Value: WS
  misc_feature: MA Experiment 20000234 PARAMETER Experiment Name: At_Siliques_P Parameter: Tissue Value: Less Than 5mm Siliques vs. Whole Plant
  misc_feature: MA Experiment ID: 20000455 Result: Up-regulated in Transcription
  misc_feature: MA Experiment 20000455 PARAMETER Experiment Name: At_100uM_ABA_P Parameter: Age (day) Value: 16
  misc_feature: MA Experiment 20000455 PARAMETER Experiment Name: At_100uM_ABA_P Parameter: Organism Value: A. thaliana
  misc_feature: MA Experiment 20000455 PARAMETER Experiment Name: At_100uM_ABA_P Parameter: Plant Line Value: WS
  misc_feature: MA Experiment 20000455 PARAMETER Experiment Name: At_100uM_ABA_P Parameter: Timepoint (hr) Value: 48
  misc_feature: MA Experiment 20000455 PARAMETER Experiment Name: At_100uM_ABA_P Parameter: Tissue Value: Aerial
  misc_feature: MA Experiment 20000455 PARAMETER Experiment Name: At_100uM_ABA_P Parameter: Treatment Value: 100uM ABA vs. No Treatment
  misc_feature: MA Experiment ID: 20000495 Result: Down-regulated in Transcription
  misc_feature: MA Experiment 20000495 PARAMETER Experiment Name: At_Guard_Cells_P Parameter: Harvest Date Value: 8/2/2002
  misc_feature: MA Experiment 20000495 PARAMETER Experiment Name: At_Guard_Cells_P Parameter: Organism Value: A. thaliana
  misc_feature: MA Experiment 20000495 PARAMETER Experiment Name: At_Guard_Cells_P Parameter: Tissue Value: Guard Cells vs. Leaves
  misc_feature: MA Experiment ID: 20000496 Result: Down-regulated in Transcription
  misc_feature: MA Experiment 20000496 PARAMETER Experiment Name: At_Guard_Cells_P Parameter: Harvest Date Value: 7/19/2002
  misc_feature: MA Experiment 20000496 PARAMETER Experiment Name: At_Guard_Cells_P Parameter: Organism Value: Canola
  misc_feature: MA Experiment 20000496 PARAMETER Experiment Name: At_Guard_Cells_P Parameter: Tissue Value: Guard Cells vs. Leaves
  misc_feature: MA Experiment ID: 20001451 Result: Down-regulated in Transcription
  misc_feature: MA Experiment 20001451 PARAMETER Experiment Name: At_Far-red-induction_P Parameter: Age (day) Value: 7
  misc_feature: MA Experiment 20001451 PARAMETER Experiment Name: At_Far-red-induction_P Parameter: Light Value: Far-red vs. White
  misc_feature: MA Experiment 20001451 PARAMETER Experiment Name: At_Far-red-induction_P Parameter: Organism Value: A. thaliana
  misc_feature: MA Experiment 20001451 PARAMETER Experiment Name: At_Far-red-induction_P Parameter: Plant Line Value: Columbia
  misc_feature: MA Experiment 20001451 PARAMETER Experiment Name: At_Far-red-induction_P Parameter: Timepoint (hr) Value: 24
  misc_feature: MA Experiment 20001451 PARAMETER Experiment Name: At_Far-red-induction_P Parameter: Tissue Value: Whole Plant
  misc_feature: MA Experiment ID: 20001560 Result: Down-regulated in Transcription
  misc_feature: MA Experiment 20001560 PARAMETER Experiment Name: At_Drought_Soil_Dry_P Parameter: Age (day) Value: 28
  misc_feature: MA Experiment 20001560 PARAMETER Experiment Name: At_Drought_Soil_Dry_P Parameter: Organism Value: A. thaliana
  misc_feature: MA Experiment 20001560 PARAMETER Experiment Name: At_Drought_Soil_Dry_P Parameter: Plant Line Value: WS
  misc_feature: MA Experiment 20001560 PARAMETER Experiment Name: At_Drought_Soil_Dry_P Parameter: Post Timepoint (hr) Value: None
  misc_feature: MA Experiment 20001560 PARAMETER Experiment Name: At_Drought_Soil_Dry_P Parameter: Post-Treatment Value: None
  misc_feature: MA Experiment 20001560 PARAMETER Experiment Name: At_Drought_Soil_Dry_P Parameter: Timepoint (day) Value: 14
  misc_feature: MA Experiment 20001560 PARAMETER Experiment Name: At_Drought_Soil_Dry_P Parameter: Treatment Value: Drought vs. No Drought
  misc_feature: MA Experiment ID: 20001905 Result: Up-regulated in Transcription
  misc_feature: MA Experiment 20001905 PARAMETER Experiment Name: At_Drought_Reproduction_P Parameter: Age (day) Value: 40
  misc_feature: MA Experiment 20001905 PARAMETER Experiment Name: At_Drought_Reproduction_P Parameter: Organism Value: A. thaliana
  misc_feature: MA Experiment 20001905 PARAMETER Experiment Name: At_Drought_Reproduction_P Parameter: Plant Line Value: WS
  misc_feature: MA Experiment 20001905 PARAMETER Experiment Name: At_Drought_Reproduction_P Parameter: Timepoint (day) Value: 10
  misc_feature: MA Experiment 20001905 PARAMETER Experiment Name: At_Drought_Reproduction_P Parameter: Tissue Value: Rosettes
  misc_feature: MA Experiment 20001905 PARAMETER Experiment Name: At_Drought_Reproduction_P Parameter: Treatment Value: Drought vs. No Drought
aattccaatgccatcgtgatcgattcatctctctctctctcttccaattttcccaattcttttttaaaaccctaatttttcagatatctgattatctcttgtatttcttctactcgatttgctcccataaaaacccttactttcttcaagttctggttttcaccgattgatgggtcgtggctcagtgacgtcgcttgctcctgggttccgttttcacccgacggatgaggaacttgttcgctactaccttaagcgtaaggtctgcaacaaaccctttaagttcgatgctatttccgtcaccgacatatacaagtctgagccttgggatctaccagataagtcgaagctgaaaagtagagacttggaatggtacttctttagtatgctggataagaagtacagtaatggttccaagacgaatcgtgctacggagaaagggtattggaagacgactgggaaagatcgggagattcgtaatggttcaagagtcgttgggatgaagaagacacttgtttatcacaagggtcgagctcctcgtggtgaaaggaccaattgggttatgcatgagtatcggctttctgatgaggacttgaagaaagctggtgtgccacaagaagcatatgtgttatgtaggatattccagaaaagtggtacgggtcctaagaatggggagcagtatggtgctccttatcttgaggaggagtgggaagaagatggaatgacttatgtacctgctcaagatgctttcagtgaaggattggctttgaatgatgatgtttatgtcgatattgatgacattgacgagaagcccgaaaatctggtggtctatgatgccgttcctattctacctaactattgtcatggggaatcaagtaacaatgttgaatcaggcaattactcagactctggaaattacattcaaccaggaaacaatgttgtcgactctggtgggtactttgaacaaccaattgaaacttttgaggaagatcggaagcctattatacgggagggtagcattcagccttgttctctgtttccagaggaacaaattggctgtggtgtgcaagacgaaaatgtggtgaatctggaatcttccaacaataatgtgtttgtagctgatacatgctacagtgacattcctattgatcataactatttacccgatgagccattcatggatcctaataacaatcttccactcaacgatggtctgtacctggaaacgaatgatctcagctgtgctcaacaagatgattttaacttcgaagattatctcagcttctttgatgatgagggtttgacttttgacgattctctattaatgggacctgaagattttcttcccaaccaagaagcccttgaccagaaacctgcccctaaagaattggagaaggaggtcgcaggaggcaaagaggcagtggaggaaaaggaaagtggcgaaggatcttcttcaaaacaagatacagatttcaaggactttgattcagctccgaagtacccatttctcaaaaagacgagccacatgcttggagccattcctactccatcttcatttgcttcacagttccaaacaaaggacgcaatgcgtctacacgcagcacaatcttctggttcagttcacgtgactgcaggtatgatgagaatatcaaacatgactctagcagcggacagcggtatgggctggtcatatgacaagaacggtaacctcaacgtagtcctttcattcggggtagtccaacaggatgatgcgatgactgcctcgggaagcaagacaggaattacggcgacaagagctatgttagtcttcatgtgtttatgggttctcctactctctgttagcttcaaaatagtaaccatggtgtctgctcggtaataggatcaaagttgaatcgtctcaaagactttttttggtgtttgtacctctccaatcatatagcctttaactttggcagtgctttgctgctcaatatttaaatttttattcgaagggtttggtgtagcttgaattctctatatggtttctagtttgagtttctagaaataagaacataaacaactttcttatgacaattattatttgatcccgttattgttggaatcattggtctaaacatgttacattgtgaaatgatatttcgttg

SEQ ID NO: 29842 - protein, 567 aa, Arabidopsis thaliana
  peptide (1)..(567): Ceres Seq. ID no. 12333960
  misc_feature (9)..(137): Pfam Name: No apical meristem (NAM) protein Pfam Description: No apical meristem (NAM) protein
  misc_feature (178)..(535): Homolog of NCBI NO: 28188651 NR Description: unknown protein [Arabidopsis lyrata]
  misc_feature (178)..(535): Homolog of NCBI NO: 28188649 NR Description: unknown protein [Arabidopsis lyrata]
  misc_feature (178)..(535): Homolog of NCBI NO: 28188643 NR Description: unknown protein [Arabidopsis lyrata]
  misc_feature (1)..(560): Homolog of NCBI NO: 21593389 NR Description: NAC, putative [Arabidopsis thaliana]
  misc_feature (1)..(560): Homolog of NCBI NO: 18398895 NR Description: expressed protein; protein id: At3g10500.1
  misc_feature (178)..(535): Homolog of NCBI NO: 28188627 NR Description: unknown protein [Arabidopsis thaliana]
  misc_feature (178)..(535): Homolog of NCBI NO: 28188625 NR Description: unknown protein [Arabidopsis thaliana]
  misc_feature (1)..(567): Homolog of NCBI NO: 8567779 NR Description: NAC, putative [Arabidopsis thaliana]
  misc_feature (1)..(567): Homolog of NCBI NO: 6456751 NR Description: NAC2 [Arabidopsis thaliana]
  misc_feature (1)..(567): Homolog of NCBI NO: 15237699 NR Description: putative protein
MGRGSVTSLAPGFRFHPTDEELVRYYLKRKVCNKPFKFDAISVTDIYKSEPWDLPDKSKLKSRDLEWYFFSMLDKKYSNGSKTNRATEKGYWKTTGKDREIRNGSRVVGMKKTLVYHKGRAPRGERTNWVMHEYRLSDEDLKKAGVPQEAYVLCRIFQKSGTGPKNGEQYGAPYLEEEWEEDGMTYVPAQDAFSEGLALNDDVYVDIDDIDEKPENLVVYDAVPILPNYCHGESSNNVESGNYSDSGNYIQPGNNVVDSGGYFEQPIETFEEDRKPIIREGSIQPCSLFPEEQIGCGVQDENVVNLESSNNNVFVADTCYSDIPIDHNYLPDEPFMDPNNNLPLNDGLYLETNDLSCAQQDDFNFEDYLSFFDDEGLTFDDSLLMGPEDFLPNQEALDQKPAPKELEKEVAGGKEAVEEKESGEGSSSKQDTDFKDFDSAPKYPFLKKTSHMLGAIPTPSSFASQFQTKDAMRLHAAQSSGSVHVTAGMMRISNMTLAADSGMGWSYDKNGNLNVVLSFGVVQQDDAMTASGSKTGITATRAMLVFMCLWVLLLSVSFKIVTMVSAR

SEQ ID NO: 29843 - protein, 496 aa, Arabidopsis thaliana
  peptide (1)..(496): Ceres Seq. ID no. 12333961
  misc_feature (1)..(66): Pfam Name: No apical meristem (NAM) protein Pfam Description: No apical meristem (NAM) protein
  misc_feature (107)..(464): Homolog of NCBI NO: 28188651 NR Description: unknown protein [Arabidopsis lyrata]
  misc_feature (107)..(464): Homolog of NCBI NO: 28188649 NR Description: unknown protein [Arabidopsis lyrata]
  misc_feature (107)..(464): Homolog of NCBI NO: 28188643 NR Description: unknown protein [Arabidopsis lyrata]
  misc_feature (1)..(489): Homolog of NCBI NO: 21593389 NR Description: NAC, putative [Arabidopsis thaliana]
  misc_feature (1)..(489): Homolog of NCBI NO: 18398895 NR Description: expressed protein; protein id: At3g10500.1
  misc_feature (107)..(464): Homolog of NCBI NO: 28188627 NR Description: unknown protein [Arabidopsis thaliana]
  misc_feature (107)..(464): Homolog of NCBI NO: 28188625 NR Description: unknown protein [Arabidopsis thaliana]
  misc_feature (1)..(496): Homolog of NCBI NO: 8567779 NR Description: NAC, putative [Arabidopsis thaliana]
  misc_feature (1)..(496): Homolog of NCBI NO: 6456751 NR Description: NAC2 [Arabidopsis thaliana]
  misc_feature (1)..(496): Homolog of NCBI NO: 15237699 NR Description: putative protein
MLDKKYSNGSKTNRATEKGYWKTTGKDREIRNGSRVVGMKKTLVYHKGRAPRGERTNWVMHEYRLSDEDLKKAGVPQEAYVLCRIFQKSGTGPKNGEQYGAPYLEEEWEEDGMTYVPAQDAFSEGLALNDDVYVDIDDIDEKPENLVVYDAVPILPNYCHGESSNNVESGNYSDSGNYIQPGNNVVDSGGYFEQPIETFEEDRKPIIREGSIQPCSLFPEEQIGCGVQDENVVNLESSNNNVFVADTCYSDIPIDHNYLPDEPFMDPNNNLPLNDGLYLETNDLSCAQQDDFNFEDYLSFFDDEGLTFDDSLLMGPEDFLPNQEALDQKPAPKELEKEVAGGKEAVEEKESGEGSSSKQDTDFKDFDSAPKYPFLKKTSHMLGAIPTPSSFASQFQTKDAMRLHAAQSSGSVHVTAGMMRISNMTLAADSGMGWSYDKNGNLNVVLSFGVVQQDDAMTASGSKTGITATRAMLVFMCLWVLLLSVSFKIVTMVSAR

SEQ ID NO: 29844 - protein, 458 aa, Arabidopsis thaliana
  peptide (1)..(458): Ceres Seq. ID no. 12333962
  misc_feature (69)..(426): Homolog of NCBI NO: 28188651 NR Description: unknown protein [Arabidopsis lyrata]
  misc_feature (69)..(426): Homolog of NCBI NO: 28188649 NR Description: unknown protein [Arabidopsis lyrata]
  misc_feature (69)..(426): Homolog of NCBI NO: 28188643 NR Description: unknown protein [Arabidopsis lyrata]
  misc_feature (1)..(451): Homolog of NCBI NO: 21593389 NR Description: NAC, putative [Arabidopsis thaliana]
  misc_feature (1)..(451): Homolog of NCBI NO: 18398895 NR Description: expressed protein; protein id: At3g10500.1
  misc_feature (69)..(426): Homolog of NCBI NO: 28188627 NR Description: unknown protein [Arabidopsis thaliana]
  misc_feature (69)..(426): Homolog of NCBI NO: 28188625 NR Description: unknown protein [Arabidopsis thaliana]
  misc_feature (1)..(458): Homolog of NCBI NO: 8567779 NR Description: NAC, putative [Arabidopsis thaliana]
  misc_feature (1)..(458): Homolog of NCBI NO: 6456751 NR Description: NAC2 [Arabidopsis thaliana]
  misc_feature (1)..(458): Homolog of NCBI NO: 15237699 NR Description: putative protein
MKKTLVYHKGRAPRGERTNWVMHEYRLSDEDLKKAGVPQEAYVLCRIFQKSGTGPKNGEQYGAPYLEEEWEEDGMTYVPAQDAFSEGLALNDDVYVDIDDIDEKPENLVVYDAVPILPNYCHGESSNNVESGNYSDSGNYIQPGNNVVDSGGYFEQPIETFEEDRKPIIREGSIQPCSLFPEEQIGCGVQDENVVNLESSNNNVFVADTCYSDIPIDHNYLPDEPFMDPNNNLPLNDGLYLETNDLSCAQQDDFNFEDYLSFFDDEGLTFDDSLLMGPEDFLPNQEALDQKPAPKELEKEVAGGKEAVEEKESGEGSSSKQDTDFKDFDSAPKYPFLKKTSHMLGAIPTPSSFASQFQTKDAMRLHAAQSSGSVHVTAGMMRISNMTLAADSGMGWSYDKNGNLNVVLSFGVVQQDDAMTASGSKTGITATRAMLVFMCLWVLLLSVSFKIVTMVSAR

SEQ ID NO: 29845 - DNA, 1538 bp, Arabidopsis thaliana
  misc_feature (1)..(1538): Ceres Seq. ID no. 12580443
  misc_feature: MA Experiment ID: 108462 Result: Up-regulated in Transcription
  misc_feature: MA Experiment 108462 PARAMETER Experiment Name: At_Germinating_Seeds_cDNA_P Parameter: Age (day) Value: 2 vs. 0
  misc_feature: MA Experiment 108462 PARAMETER Experiment Name: At_Germinating_Seeds_cDNA_P Parameter: Tissue Value: Germinating Seeds
  misc_feature: MA Experiment ID: 108463 Result: Up-regulated in Transcription
  misc_feature: MA Experiment 108463 PARAMETER Experiment Name: At_Germinating_Seeds_cDNA_P Parameter: Age (day) Value: 3 vs. 0
  misc_feature: MA Experiment 108463 PARAMETER Experiment Name: At_Germinating_Seeds_cDNA_P Parameter: Tissue Value: Germinating Seeds
  misc_feature: MA Experiment ID: 108464 Result: Up-regulated in Transcription
  misc_feature: MA Experiment 108464 PARAMETER Experiment Name: At_Germinating_Seeds_cDNA_P Parameter: Age (day) Value: 4 vs. 0
  misc_feature: MA Experiment 108464 PARAMETER Experiment Name: At_Germinating_Seeds_cDNA_P Parameter: Tissue Value: Germinating Seeds
  misc_feature: MA Experiment ID: 108488 Result: Down-regulated in Transcription
  misc_feature: MA Experiment ID: 108572 Result: Down-regulated in Transcription
  misc_feature: MA Experiment 108572 PARAMETER Experiment Name: At_Drought_cDNA_P Parameter: Timepoint (hr) Value: 1
  misc_feature: MA Experiment 108572 PARAMETER Experiment Name: At_Drought_cDNA_P Parameter: Tissue Value: Aerial
  misc_feature: MA Experiment 108572 PARAMETER Experiment Name: At_Drought_cDNA_P Parameter: Treatment Value: Drought vs. No Drought
  misc_feature: MA Experiment ID: 108573 Result: Down-regulated in Transcription
  misc_feature: MA Experiment 108573 PARAMETER Experiment Name: At_Drought_cDNA_P Parameter: Timepoint (hr) Value: 6
  misc_feature: MA Experiment 108573 PARAMETER Experiment Name: At_Drought_cDNA_P Parameter: Tissue Value: Aerial
  misc_feature: MA Experiment 108573 PARAMETER Experiment Name: At_Drought_cDNA_P Parameter: Treatment Value: Drought vs. No Drought
  misc_feature: MA Experiment ID: 20000087 Result: Up-regulated in Transcription
  misc_feature: MA Experiment 20000087 PARAMETER Experiment Name: At_100uM_ABA_Mutants_cDNA_P Parameter: Plant Line Value: WS
  misc_feature: MA Experiment 20000087 PARAMETER Experiment Name: At_100uM_ABA_Mutants_cDNA_P Parameter: Timepoint (hr) Value: 6
  misc_feature: MA Experiment 20000087 PARAMETER Experiment Name: At_100uM_ABA_Mutants_cDNA_P Parameter: Tissue Value: Aerial
  misc_feature: MA Experiment 20000087 PARAMETER Experiment Name: At_100uM_ABA_Mutants_cDNA_P Parameter: Treatment Value: 100uM ABA vs. No Treatment
  misc_feature: MA Experiment ID: 20000117 Result: Up-regulated in Transcription
  misc_feature: MA Experiment 20000117 PARAMETER Experiment Name: At_100uM_ABA_Mutants_cDNA_P Parameter: Plant Line Value: Columbia
  misc_feature: MA Experiment 20000117 PARAMETER Experiment Name: At_100uM_ABA_Mutants_cDNA_P Parameter: Timepoint (hr) Value: 6
  misc_feature: MA Experiment 20000117 PARAMETER Experiment Name: At_100uM_ABA_Mutants_cDNA_P Parameter: Tissue Value: Aerial
  misc_feature: MA Experiment 20000117 PARAMETER Experiment Name: At_100uM_ABA_Mutants_cDNA_P Parameter: Treatment Value: 100uM ABA vs. No Treatment
  misc_feature: MA Experiment ID: 20000179 Result: Up-regulated in Transcription
  misc_feature: MA Experiment 20000179 PARAMETER Experiment Name: At_Germinating_Seeds_P Parameter: Age (hr) Value: 6 vs. 0
  misc_feature: MA Experiment 20000179 PARAMETER Experiment Name: At_Germinating_Seeds_P Parameter: Tissue Value: Germinating Seeds
  misc_feature: MA Experiment ID: 20000180 Result: Up-regulated in Transcription
  misc_feature: MA Experiment 20000180 PARAMETER Experiment Name: At_Germinating_Seeds_P Parameter: Age (hr) Value: 24 vs. 0
  misc_feature: MA Experiment 20000180 PARAMETER Experiment Name: At_Germinating_Seeds_P Parameter: Tissue Value: Germinating Seeds
  misc_feature: MA Experiment ID: 20000185 Result: Up-regulated in Transcription
  misc_feature: MA Experiment 20000185 PARAMETER Experiment Name: At_Roots__P Parameter: Age (day) Value: 7 vs. 21
  misc_feature: MA Experiment 20000185 PARAMETER Experiment Name: At_Roots__P Parameter: Organism Value: A. thaliana
  misc_feature: MA Experiment 20000185 PARAMETER Experiment Name: At_Roots__P Parameter: Tissue Value: Roots vs. Whole Plant
  misc_feature: MA Experiment ID: 20000234 Result: Down-regulated in Transcription
  misc_feature: MA Experiment 20000234 PARAMETER Experiment Name: At_Siliques_P Parameter: Age (day) Value: 21
  misc_feature: MA Experiment 20000234 PARAMETER Experiment Name: At_Siliques_P Parameter: Organism Value: A. thaliana
  misc_feature: MA Experiment 20000234 PARAMETER Experiment Name: At_Siliques_P Parameter: Plant Line Value: WS
  misc_feature: MA Experiment 20000234 PARAMETER Experiment Name: At_Siliques_P Parameter: Tissue Value: Less Than 5mm Siliques vs. Whole Plant
  misc_feature: MA Experiment ID: 20000235 Result: Down-regulated in Transcription
  misc_feature: MA Experiment 20000235 PARAMETER Experiment Name: At_Siliques_P Parameter: Age (day) Value: 21
  misc_feature: MA Experiment 20000235 PARAMETER Experiment Name: At_Siliques_P Parameter: Organism Value: A. thaliana
  misc_feature: MA Experiment 20000235 PARAMETER Experiment Name: At_Siliques_P Parameter: Plant Line Value: WS
  misc_feature: MA Experiment 20000235 PARAMETER Experiment Name: At_Siliques_P Parameter: Tissue Value: 5-10mm Siliques vs. Whole Plant
  misc_feature: MA Experiment ID: 20000264 Result: Down-regulated in Transcription
  misc_feature: MA Experiment 20000264 PARAMETER Experiment Name: At_Open_Flower_P Parameter: Age (day) Value: 21
  misc_feature: MA Experiment 20000264 PARAMETER Experiment Name: At_Open_Flower_P Parameter: Plant Line Value: WS
  misc_feature: MA Experiment 20000264 PARAMETER Experiment Name: At_Open_Flower_P Parameter: Tissue Value: Open Flower vs. Whole Plant
  misc_feature: MA Experiment ID: 20000265 Result: Down-regulated in Transcription
  misc_feature: MA Experiment 20000265 PARAMETER Experiment Name: At_Open_Flower_P Parameter: Age (day) Value: 21
  misc_feature: MA Experiment 20000265 PARAMETER Experiment Name: At_Open_Flower_P Parameter: Plant Line Value: WS
  misc_feature: MA Experiment 20000265 PARAMETER Experiment Name: At_Open_Flower_P Parameter: Tissue Value: Closed Flower vs. Whole Plant
  misc_feature: MA Experiment ID: 20000286 Result: Down-regulated in Transcription
  misc_feature: MA Experiment 20000286 PARAMETER Experiment Name: At_Open_Flower_P Parameter: Age (day) Value: 21
  misc_feature: MA Experiment 20000286 PARAMETER Experiment Name: At_Open_Flower_P Parameter: Plant Line Value: WS
  misc_feature: MA Experiment 20000286 PARAMETER Experiment Name: At_Open_Flower_P Parameter: Tissue Value: Half Open vs. Whole Plant
  misc_feature: MA Experiment ID: 20000439 Result: Up-regulated in Transcription
  misc_feature: MA Experiment 20000439 PARAMETER Experiment Name: At_Roots__P Parameter: Age (day) Value: 14 vs. 21
  misc_feature: MA Experiment 20000439 PARAMETER Experiment Name: At_Roots__P Parameter: Organism Value: A. thaliana
  misc_feature: MA Experiment 20000439 PARAMETER Experiment Name: At_Roots__P Parameter: Tissue Value: Roots vs. Whole Plant
  misc_feature: MA Experiment ID: 20001905 Result: Up-regulated in Transcription
  misc_feature: MA Experiment 20001905 PARAMETER Experiment Name: At_Drought_Reproduction_P Parameter: Age (day) Value: 40
  misc_feature: MA Experiment 20001905 PARAMETER Experiment Name: At_Drought_Reproduction_P Parameter: Organism Value: A. thaliana
  misc_feature: MA Experiment 20001905 PARAMETER Experiment Name: At_Drought_Reproduction_P Parameter: Plant Line Value: WS
  misc_feature: MA Experiment 20001905 PARAMETER Experiment Name: At_Drought_Reproduction_P Parameter: Timepoint (day) Value: 10
  misc_feature: MA Experiment 20001905 PARAMETER Experiment Name: At_Drought_Reproduction_P Parameter: Tissue Value: Rosettes
  misc_feature: MA Experiment 20001905 PARAMETER Experiment Name: At_Drought_Reproduction_P Parameter: Treatment Value: Drought vs. No Drought
aacattttcttattttccttcctaatttccaacctctgttcttagcaatatattttttctccaaaaataattctcagtttgattttcttcttctagctcttaagtatatttctttgttgttatttatcttttaatcctttaatctcatctttgtttatctttaatcaaaacccaaaatttacatgggttcttgaaaatctagaagaaataaaggaaacataacaaaaatagaaagaaaaagaagctaatggtcttaaatatggagtctaccggagaagctgttagatcaaccaccggtaacgacggtggtattacggtggttagatccgacgcgccgtcagatttccacgtagctcaaagatcagaaagctcaaaccaatctcccacctctgtcactcctcctccaccacagccatcgtctcatcacacagctcctccgccgctgcaaatttcgacggtgacgactacgactacgacggccgcgatggaaggtatctccggtggactgatgaagaagaagcgtggacggccaaggaagtatggaccggacgggactgttgtagcgttatctcctaaaccgatttcatcagcgccggcgccgtcgcatcttccgccgccgagttcacacgtcatcgatttctccgcttctgagaaacgtagcaaagtgaaaccaacgaactcgtttaacagaacaaagtatcatcaccaagttgagaatttgggtgaatgggctccttgctccgtcggtggtaatttcacacctcatataatcacagtcaacaccggcgaggatgtaacaatgaagataatctcgttttcgcaacaaggacctcgctctatttgtgttctgtcagcaaacggtgttatttcaagcgttacacttcgtcagccagattcctctggcggcacattgacatacgaaggtcggtttgagatattatcattatccgggtcattcatgcctaatgattcaggcggaacacgaagtagaacgggaggaatgagtgtatcgttagcaagtcccgatggacgtgtagtaggcggtggcctcgccggtttactagtagccgcgagtccggttcaggtggttgtaggaagttttttagcgggcactgaccatcaagatcagaaaccgaaaaagaacaaacatgatttcatgttgtcgagtcctaccgctgcaattcctatctctagtgcagctgatcaccggacaatccattcggtctcgtctcttccggtcaataataatacatggcagacttctttagcttccgatccaagaaacaagcataccgatattaatgtcaatgtaacttgaaatccaatctttctctgtattttctgttaacaagtttgatttggttgtttatctacattaggattttactaaaatggtagtattatttatagggttttagggtctttattttggttccactgttgtcacttgtaggataatttctatctttttattaggattgaatcatcttgtttccttaattttttgctaacgagtcatggtcctggttttgcatgtc

SEQ ID NO: 29846 - protein, 356 aa, Arabidopsis thaliana
  peptide (1)..(356): Ceres Seq. ID no. 12580444
  misc_feature (45)..(339): Homolog of NCBI NO: 38346715 NR Description: OSJNBa0086O06.13 [Oryza sativa (japonica
  misc_feature (53)..(308): Homolog of NCBI NO: 14326504 NR Description: At2g33620/F4P9.39 [Arabidopsis thaliana]
  misc_feature (53)..(308): Homolog of NCBI NO: 37537056 NR Description: putative AT-Hook DNA-binding protein
  misc_feature (5)..(300): Homolog of NCBI NO: 8809639 NR Description: contains similarity to DNA-binding
  misc_feature (38)..(115): Homolog of NCBI NO: 15242131 NR Description: putative protein; protein id: At5g51590.1
  misc_feature (150)..(331): Homolog of NCBI NO: 15242131 NR Description: putative protein; protein id: At5g51590.1
  misc_feature (23)..(321): Homolog of NCBI NO: 15235023 NR Description: putative protein
  misc_feature (5)..(356): Homolog of NCBI NO: 15235790 NR Description: putative DNA binding protein
  misc_feature (5)..(356): Homolog of NCBI NO: 7485570 NR Description: hypothetical protein F16J13.150 - Arabidopsis
  misc_feature (1)..(356): Homolog of NCBI NO: 22328578 NR Description: putative DNA-binding protein
  misc_feature (45)..(339): Homolog of NCBI NO: 38346715 NR Description: OSJNBa0086O06.13 [Oryza sativa (japonica
  misc_feature (53)..(308): Homolog of NCBI NO: 14326504 NR Description: At2g33620/F4P9.39 [Arabidopsis thaliana]
  misc_feature (53)..(308): Homolog of NCBI NO: 37537056 NR Description: putative AT-Hook DNA-binding protein
  misc_feature (5)..(300): Homolog of NCBI NO: 8809639 NR Description: contains similarity to DNA-binding
  misc_feature (38)..(115): Homolog of NCBI NO: 15242131 NR Description: putative protein; protein id: At5g51590.1
  misc_feature (150)..(331): Homolog of NCBI NO: 15242131 NR Description: putative protein; protein id: At5g51590.1
  misc_feature (23)..(321): Homolog of NCBI NO: 15235023 NR Description: putative protein
  misc_feature (5)..(356): Homolog of NCBI NO: 15235790 NR Description: putative DNA binding protein
  misc_feature (5)..(356): Homolog of NCBI NO: 7485570 NR Description: hypothetical protein F16J13.150 - Arabidopsis
  misc_feature (1)..(356): Homolog of NCBI NO: 22328578 NR Description: putative DNA-binding protein
MVLNMESTGEAVRSTTGNDGGITVVRSDAPSDFHVAQRSESSNQSPTSVTPPPPQPSSHHTAPPPLQISTVTTTTTTAAMEGISGGLMKKKRGRPRKYGPDGTVVALSPKPISSAPAPSHLPPPSSHVIDFSASEKRSKVKPTNSFNRTKYHHQVENLGEWAPCSVGGNFTPHIITVNTGEDVTMKIISFSQQGPRSICVLSANGVISSVTLRQPDSSGGTLTYEGRFEILSLSGSFMPNDSGGTRSRTGGMSVSLASPDGRVVGGGLAGLLVAASPVQVVVGSFLAGTDHQDQKPKKNKHDFMLSSPTAAIPISSAADHRTIHSVSSLPVNNNTWQTSLASDPRNKHTDINVNVT

SEQ ID NO: 29847 - protein, 352 aa, Arabidopsis thaliana
  peptide (1)..(352): Ceres Seq. ID no. 12580445
  misc_feature (41)..(335): Homolog of NCBI NO: 38346715 NR Description: OSJNBa0086O06.13 [Oryza sativa (japonica
  misc_feature (49)..(304): Homolog of NCBI NO: 14326504 NR Description: At2g33620/F4P9.39 [Arabidopsis thaliana]
  misc_feature (49)..(304): Homolog of NCBI NO: 37537056 NR Description: putative AT-Hook DNA-binding protein
  misc_feature (1)..(296): Homolog of NCBI NO: 8809639 NR Description: contains similarity to DNA-binding
  misc_feature (34)..(111): Homolog of NCBI NO: 15242131 NR Description: putative protein; protein id: At5g51590.1
  misc_feature (146)..(327): Homolog of NCBI NO: 15242131 NR Description: putative protein; protein id: At5g51590.1
  misc_feature (19)..(317): Homolog of NCBI NO: 15235023 NR Description: putative protein
  misc_feature (1)..(352): Homolog of NCBI NO: 15235790 NR Description: putative DNA binding protein
  misc_feature (1)..(352): Homolog of NCBI NO: 7485570 NR Description: hypothetical protein F16J13.150 - Arabidopsis
  misc_feature (1)..(352): Homolog of NCBI NO: 22328578 NR Description: putative DNA-binding protein
  misc_feature (41)..(335): Homolog of NCBI NO: 38346715 NR Description: OSJNBa0086O06.13 [Oryza sativa (japonica
  misc_feature (49)..(304): Homolog of NCBI NO: 14326504 NR Description: At2g33620/F4P9.39 [Arabidopsis thaliana]
  misc_feature (49)..(304): Homolog of NCBI NO: 37537056 NR Description: putative AT-Hook DNA-binding protein
  misc_feature (1)..(296): Homolog of NCBI NO: 8809639 NR Description: contains similarity to DNA-binding
  misc_feature (34)..(111): Homolog of NCBI NO: 15242131 NR Description: putative protein; protein id: At5g51590.1
  misc_feature (146)..(327): Homolog of NCBI NO: 15242131 NR Description: putative protein; protein id: At5g51590.1
  misc_feature (19)..(317): Homolog of NCBI NO: 15235023 NR Description: putative protein
  misc_feature (1)..(352): Homolog of NCBI NO: 15235790 NR Description: putative DNA binding protein
  misc_feature (1)..(352): Homolog of NCBI NO: 7485570 NR Description: hypothetical protein F16J13.150 - Arabidopsis
  misc_feature (1)..(352): Homolog of NCBI NO: 22328578 NR Description: putative DNA-binding protein
MESTGEAVRSTTGNDGGITVVRSDAPSDFHVAQRSESSNQSPTSVTPPPPQPSSHHTAPPPLQISTVTTTTTTAAMEGISGGLMKKKRGRPRKYGPDGTVVALSPKPISSAPAPSHLPPPSSHVIDFSASEKRSKVKPTNSFNRTKYHHQVENLGEWAPCSVGGNFTPHIITVNTGEDVTMKIISFSQQGPRSICVLSANGVISSVTLRQPDSSGGTLTYEGRFEILSLSGSFMPNDSGGTRSRTGGMSVSLASPDGRVVGGGLAGLLVAASPVQVVVGSFLAGTDHQDQKPKKNKHDFMLSSPTAAIPISSAADHRTIHSVSSLPVNNNTWQTSLASDPRNKHTDINVNVT

SEQ ID NO: 29848 - protein, 277 aa, Arabidopsis thaliana
  peptide (1)..(277): Ceres Seq. ID no. 12580446
  misc_feature (1)..(260): Homolog of NCBI NO: 38346715 NR Description: OSJNBa0086O06.13 [Oryza sativa (japonica
  misc_feature (1)..(229): Homolog of NCBI NO: 14326504 NR Description: At2g33620/F4P9.39 [Arabidopsis thaliana]
  misc_feature (1)..(229): Homolog of NCBI NO: 37537056 NR Description: putative AT-Hook DNA-binding protein
  misc_feature (1)..(221): Homolog of NCBI NO: 8809639 NR Description: contains similarity to DNA-binding
  misc_feature (1)..(36): Homolog of NCBI NO: 15242131 NR Description: putative protein; protein id: At5g51590.1
  misc_feature (71)..(252): Homolog of NCBI NO: 15242131 NR Description: putative protein; protein id: At5g51590.1
  misc_feature (1)..(242): Homolog of NCBI NO: 15235023 NR Description: putative protein
  misc_feature (1)..(277): Homolog of NCBI NO: 15235790 NR Description: putative DNA binding protein
  misc_feature (1)..(277): Homolog of NCBI NO: 7485570 NR Description: hypothetical protein F16J13.150 - Arabidopsis
  misc_feature (1)..(277): Homolog of NCBI NO: 22328578 NR Description: putative DNA-binding protein
  misc_feature (1)..(260): Homolog of NCBI NO: 38346715 NR Description: OSJNBa0086O06.13 [Oryza sativa (japonica
  misc_feature (1)..(229): Homolog of NCBI NO: 14326504 NR Description: At2g33620/F4P9.39 [Arabidopsis thaliana]
  misc_feature (1)..(229): Homolog of NCBI NO: 37537056 NR Description: putative AT-Hook DNA-binding protein
  misc_feature (1)..(221): Homolog of NCBI NO: 8809639 NR Description: contains similarity to DNA-binding
  misc_feature (1)..(36): Homolog of NCBI NO: 15242131 NR Description: putative protein; protein id: At5g51590.1
  misc_feature (71)..(252): Homolog of NCBI NO: 15242131 NR Description: putative protein; protein id: At5g51590.1
  misc_feature (1)..(242): Homolog of NCBI NO: 15235023 NR Description: putative protein
  misc_feature (1)..(277): Homolog of NCBI NO: 15235790 NR Description: putative DNA binding protein
  misc_feature (1)..(277): Homolog of NCBI NO: 7485570 NR Description: hypothetical protein F16J13.150 - Arabidopsis
  misc_feature (1)..(277): Homolog of NCBI NO: 22328578 NR Description: putative DNA-binding protein
MEGISGGLMKKKRGRPRKYGPDGTVVALSPKPISSAPAPSHLPPPSSHVIDFSASEKRSKVKPTNSFNRTKYHHQVENLGEWAPCSVGGNFTPHIITVNTGEDVTMKIISFSQQGPRSICVLSANGVISSVTLRQPDSSGGTLTYEGRFEILSLSGSFMPNDSGGTRSRTGGMSVSLASPDGRVVGGGLAGLLVAASPVQVVVGSFLAGTDHQDQKPKKNKHDFMLSSPTAAIPISSAADHRTIHSVSSLPVNNNTWQTSLASDPRNKHTDINVNVT

SEQ ID NO: 29849 - DNA, 1543 bp, Arabidopsis thaliana
  misc_feature (1)..(1543): Ceres Seq. ID no. 12579838
  misc_feature: MA Experiment ID: 20000171 Result: Up-regulated in Transcription
  misc_feature: MA Experiment 20000171 PARAMETER Experiment Name: At_42deg_Heat_P Parameter: Age (day) Value: 14
  misc_feature: MA Experiment 20000171 PARAMETER Experiment Name: At_42deg_Heat_P Parameter: Organism Value: A. thaliana
  misc_feature: MA Experiment 20000171 PARAMETER Experiment Name: At_42deg_Heat_P Parameter: Plant Line Value: WS
  misc_feature: MA Experiment 20000171 PARAMETER Experiment Name: At_42deg_Heat_P Parameter: Temperature (deg C) Value: 42 vs. 22
  misc_feature: MA Experiment 20000171 PARAMETER Experiment Name: At_42deg_Heat_P Parameter: Timepoint (hr) Value: 1
  misc_feature: MA Experiment 20000171 PARAMETER Experiment Name: At_42deg_Heat_P Parameter: Tissue Value: Aerial
  misc_feature: MA Experiment ID: 20000234 Result: Down-regulated in Transcription
  misc_feature: MA Experiment 20000234 PARAMETER Experiment Name: At_Siliques_P Parameter: Age (day) Value: 21
  misc_feature: MA Experiment 20000234 PARAMETER Experiment Name: At_Siliques_P Parameter: Organism Value: A. thaliana
  misc_feature: MA Experiment 20000234 PARAMETER Experiment Name: At_Siliques_P Parameter: Plant Line Value: WS
  misc_feature: MA Experiment 20000234 PARAMETER Experiment Name: At_Siliques_P Parameter: Tissue Value: Less Than 5mm Siliques vs. Whole Plant
  misc_feature: MA Experiment ID: 20000436 Result: Up-regulated in Transcription
  misc_feature: MA Experiment 20000436 PARAMETER Experiment Name: At_Drought_P Parameter: Age (day) Value: 7
  misc_feature: MA Experiment 20000436 PARAMETER Experiment Name: At_Drought_P Parameter: Organism Value: A. thaliana
  misc_feature: MA Experiment 20000436 PARAMETER Experiment Name: At_Drought_P Parameter: Plant Line Value: WS
  misc_feature: MA Experiment 20000436 PARAMETER Experiment Name: At_Drought_P Parameter: Timepoint (hr) Value: 12
  misc_feature: MA Experiment 20000436 PARAMETER Experiment Name: At_Drought_P Parameter: Tissue Value: Whole Plant
  misc_feature: MA Experiment 20000436 PARAMETER Experiment Name: At_Drought_P Parameter: Treatment Value: Drought vs. No Drought
  misc_feature: MA Experiment ID: 20000495 Result: Down-regulated in Transcription
  misc_feature: MA Experiment 20000495 PARAMETER Experiment Name: At_Guard_Cells_P Parameter: Harvest Date Value: 8/2/2002
  misc_feature: MA Experiment 20000495 PARAMETER Experiment Name: At_Guard_Cells_P Parameter: Organism Value: A. thaliana
  misc_feature: MA Experiment 20000495 PARAMETER Experiment Name: At_Guard_Cells_P Parameter: Tissue Value: Guard Cells vs. Leaves
  misc_feature: MA Experiment ID: 20001247 Result: Up-regulated in Transcription
  misc_feature: MA Experiment 20001247 PARAMETER Experiment Name: At_Far-red-induction_P Parameter: Age (day) Value: 7
  misc_feature: MA Experiment 20001247 PARAMETER Experiment Name: At_Far-red-induction_P Parameter: Light Value: Far-red vs. White
  misc_feature: MA Experiment 20001247 PARAMETER Experiment Name: At_Far-red-induction_P Parameter: Organism Value: A. thaliana
  misc_feature: MA Experiment 20001247 PARAMETER Experiment Name: At_Far-red-induction_P Parameter: Plant Line Value: Columbia
  misc_feature: MA Experiment 20001247 PARAMETER Experiment Name: At_Far-red-induction_P Parameter: Timepoint (hr) Value: 1
  misc_feature: MA Experiment 20001247 PARAMETER Experiment Name: At_Far-red-induction_P Parameter: Tissue Value: Whole Plant
  misc_feature: MA Experiment ID: 20001248 Result: Down-regulated in Transcription
  misc_feature: MA Experiment 20001248 PARAMETER Experiment Name: At_Far-red-induction_P Parameter: Age (day) Value: 7
  misc_feature: MA Experiment 20001248 PARAMETER Experiment Name: At_Far-red-induction_P Parameter: Light Value: Far-red vs. White
  misc_feature: MA Experiment 20001248 PARAMETER Experiment Name: At_Far-red-induction_P Parameter: Organism Value: A. thaliana
  misc_feature: MA Experiment 20001248 PARAMETER Experiment Name: At_Far-red-induction_P Parameter: Plant Line Value: Columbia
  misc_feature: MA Experiment 20001248 PARAMETER Experiment Name: At_Far-red-induction_P Parameter: Timepoint (hr) Value: 4
  misc_feature: MA Experiment 20001248 PARAMETER Experiment Name: At_Far-red-induction_P Parameter: Tissue Value: Whole Plant
  misc_feature: MA Experiment ID: 20001450 Result: Up-regulated in Transcription
  misc_feature: MA Experiment 20001450 PARAMETER Experiment Name: At_Far-red-induction_P Parameter: Age (day) Value: 7
  misc_feature: MA Experiment 20001450 PARAMETER Experiment Name: At_Far-red-induction_P Parameter: Light Value: Far-red vs. White
  misc_feature: MA Experiment 20001450 PARAMETER Experiment Name: At_Far-red-induction_P Parameter: Organism Value: A. thaliana
  misc_feature: MA Experiment 20001450 PARAMETER Experiment Name: At_Far-red-induction_P Parameter: Plant Line Value: Columbia
  misc_feature: MA Experiment 20001450 PARAMETER Experiment Name: At_Far-red-induction_P Parameter: Timepoint (hr) Value: 8
  misc_feature: MA Experiment 20001450 PARAMETER Experiment Name: At_Far-red-induction_P Parameter: Tissue Value: Whole Plant
  misc_feature: MA Experiment ID: 20001558 Result: Down-regulated in Transcription
  misc_feature: MA Experiment 20001558 PARAMETER Experiment Name: At_Drought_Soil_Dry_P Parameter: Age (day) Value: 27
  misc_feature: MA Experiment 20001558 PARAMETER Experiment Name: At_Drought_Soil_Dry_P Parameter: Organism Value: A. thaliana
  misc_feature: MA Experiment 20001558 PARAMETER Experiment Name: At_Drought_Soil_Dry_P Parameter: Plant Line Value: WS
  misc_feature: MA Experiment 20001558 PARAMETER Experiment Name: At_Drought_Soil_Dry_P Parameter: Post Timepoint (hr) Value: 6
  misc_feature: MA Experiment 20001558 PARAMETER Experiment Name: At_Drought_Soil_Dry_P Parameter: Post-Treatment Value: Re-Water vs. No Drought
  misc_feature: MA Experiment 20001558 PARAMETER Experiment Name: At_Drought_Soil_Dry_P Parameter: Timepoint (day) Value: 13
  misc_feature: MA Experiment 20001558 PARAMETER Experiment Name: At_Drought_Soil_Dry_P Parameter: Treatment Value: Drought vs. No Drought
  misc_feature: MA Experiment ID: 20001560 Result: Down-regulated in Transcription
  misc_feature: MA Experiment 20001560 PARAMETER Experiment Name: At_Drought_Soil_Dry_P Parameter: Age (day) Value: 28
  misc_feature: MA Experiment 20001560 PARAMETER Experiment Name: At_Drought_Soil_Dry_P Parameter: Organism Value: A. thaliana
  misc_feature: MA Experiment 20001560 PARAMETER Experiment Name: At_Drought_Soil_Dry_P Parameter: Plant Line Value: WS
  misc_feature: MA Experiment 20001560 PARAMETER Experiment Name: At_Drought_Soil_Dry_P Parameter: Post Timepoint (hr) Value: None
  misc_feature: MA Experiment 20001560 PARAMETER Experiment Name: At_Drought_Soil_Dry_P Parameter: Post-Treatment Value: None
  misc_feature: MA Experiment 20001560 PARAMETER Experiment Name: At_Drought_Soil_Dry_P Parameter: Timepoint (day) Value: 14
  misc_feature: MA Experiment 20001560 PARAMETER Experiment Name: At_Drought_Soil_Dry_P Parameter: Treatment Value: Drought vs. No Drought
  misc_feature: MA Experiment ID: 20001757 Result: Down-regulated in Transcription
  misc_feature: MA Experiment 20001757 PARAMETER Experiment Name: At_50mM_NH4NO3_L-to-H_P Parameter: Timepoint (hr) Value: 6
  misc_feature: MA Experiment 20001757 PARAMETER Experiment Name: At_50mM_NH4NO3_L-to-H_P Parameter: Tissue Value: Leaf
  misc_feature: MA Experiment 20001757 PARAMETER Experiment Name: At_50mM_NH4NO3_L-to-H_P Parameter: Treatment Value: 50mM NH4NO3 vs 100mM Mannitol
aggaaaactaaaccaaagtctgtttaccagtaatatcaatcgatcgccattctcgacatttctctctctcaagctagtctaaagtttcttcttatctccttcctccgaccaaaacttcgacttctctcttattttcaccctcagagagtaaccatggatgccttgacctcgagtttggttcgatctcccatcgtaccatcgagaacttccgacaacggttctggatctatgttccttaccgccagtggccctggattcacgcgttctggttcttcaagacttcaacttcgtttaaggcaaaacgcgtctgctagatcctcaagatcattacagagcttaacaacgactgctaaaactcggagaagttttgtggttagagcttcttcagcgtctaatgatgcttcatctggttcttcccccaaaccgatcgctccgctccagctgcaatccctgctggtcagtttctgtctcagattttggtgagccatcctcatcttgtgcctgcagctgttgaacagcagcttgagcagcttcaaactgatcgggactctcagggacagaacaaagattcagcgtctgtacctggaaccgacatcgtcctctacaggagaattgcggagttgaaggaaaacgagagaagaagaacattggaagagattttgtatgcattggtggttcaaaagttcatggaagctaacgtatcacttgtaccttcagtaagcccatcttcagatccgtctggtcgggttgatacttggccgaccaaagtggagaaactcgagcggcttcactcgcccgagatgtacgagatgattcacaaccatcttgccttgattcttggaagcagaatgggtgatctgaactctgttgcacagataagcaagctcagagttggccaagtttacgctgcttctgtgatgtatggatatttcttgaagagggtggaccaaaggtttcagcttgagaagacgatgaagattcttccgggtgggtcggatgaaagtcaaacaagcgttgagcaagccgaggggacggcaacatatcaggcggctgtatcgtctcacccagaggttggtgcatttgcgggcggagttagtgctaagggcttcggcagcgagattaaaccatcccgattaaggtcatatgtgatgtcatttgatgcggagacgctgcagagatacgccactataagatcaagagaagcagttggaatcatcgagaagcacacagaggcattgtttggtaagcctgagattgtaataacaccggagggcacagtcgattcatcgaaggacgaacagataaagatcagcttcggtggaatgaagaggctcgtcttggaggcagttactttcgggtcgttcctttgggatgttgagagccatgtagatgcgaggtaccactttgtattgaactaaaaacatggtctgtaatgcagttgactaacttatgtagcattaagaagatacccattaagggtatcattacacttgtatcaaaaatttgaggaaaagatcgtacattttatatgttattgtgatgg

SEQ ID NO: 29850 - protein, 243 aa, Arabidopsis thaliana
  peptide (1)..(243): Ceres Seq. ID no. 12579839
  misc_feature (1)..(243): Pfam Name: Protein of unknown function (DUF760) Pfam Description: Protein of unknown function (DUF760)
  misc_feature (1)..(93): Homolog of NCBI NO: 15239021 NR Description: putative protein
  misc_feature (149)..(238): Homolog of NCBI NO: 18397912 NR Description: expressed protein
  misc_feature (1)..(101): Homolog of NCBI NO: 18397912 NR Description: expressed protein
  misc_feature (1)..(241): Homolog of NCBI NO: 18398302 NR Description: expressed protein
  misc_feature (1)..(241): Homolog of NCBI NO: 32489097 NR Description: OSJNBa0093F12.3 [Oryza sativa (japonica
  misc_feature (1)..(243): Homolog of NCBI NO: 28301943 NR Description: unknown protein [Oryza sativa (japonica
  misc_feature (1)..(243): Homolog of NCBI NO: 13561930 NR Description: unknown [Brassica napus]
  misc_feature (1)..(243): Homolog of NCBI NO: 15221185 NR Description: unknown protein
  misc_feature (1)..(243): Homolog of NCBI NO: 17064820 NR Description: Unknown protein [Arabidopsis thaliana]
  misc_feature (1)..(243): Homolog of NCBI NO: 18401645 NR Description: expressed protein
MEANVSLVPSVSPSSDPSGRVDTWPTKVEKLERLHSPEMYEMIHNHLALILGSRMGDLNSVAQISKLRVGQVYAASVMYGYFLKRVDQRFQLEKTMKILPGGSDESQTSVEQAEGTATYQAAVSSHPEVGAFAGGVSAKGFGSEIKPSRLRSYVMSFDAETLQRYATIRSREAVGIIEKHTEALFGKPEIVITPEGTVDSSKDEQIKISFGGMKRLVLEAVTFGSFLWDVESHVDARYHFVLN

SEQ ID NO: 29851 - protein, 205 aa, Arabidopsis thaliana
  peptide (1)..(205): Ceres Seq. ID no. 12579840
  misc_feature (1)..(205): Pfam Name: Protein of unknown function (DUF760) Pfam Description: Protein of unknown function (DUF760)
  misc_feature (1)..(55): Homolog of NCBI NO: 15239021 NR Description: putative protein
  misc_feature (111)..(200): Homolog of NCBI NO: 18397912 NR Description: expressed protein
  misc_feature (1)..(63): Homolog of NCBI NO: 18397912 NR Description: expressed protein
  misc_feature (1)..(203): Homolog of NCBI NO: 18398302 NR Description: expressed protein
  misc_feature (1)..(203): Homolog of NCBI NO: 32489097 NR Description: OSJNBa0093F12.3 [Oryza sativa (japonica
  misc_feature (1)..(205): Homolog of NCBI NO: 28301943 NR Description: unknown protein [Oryza sativa (japonica
  misc_feature (1)..(205): Homolog of NCBI NO: 13561930 NR Description: unknown [Brassica napus]
  misc_feature (1)..(205): Homolog of NCBI NO: 15221185 NR Description: unknown protein
  misc_feature (1)..(205): Homolog of NCBI NO: 17064820 NR Description: Unknown protein [Arabidopsis thaliana]
  misc_feature (1)..(205): Homolog of NCBI NO: 18401645 NR Description: expressed protein
MYEMIHNHLALILGSRMGDLNSVAQISKLRVGQVYAASVMYGYFLKRVDQRFQLEKTMKILPGGSDESQTSVEQAEGTATYQAAVSSHPEVGAFAGGVSAKGFGSEIKPSRLRSYVMSFDAETLQRYATIRSREAVGIIEKHTEALFGKPEIVITPEGTVDSSKDEQIKISFGGMKRLVLEAVTFGSFLWDVESHVDARYHFVLN

SEQ ID NO: 29852 - protein, 202 aa, Arabidopsis thaliana
  peptide (1)..(202): Ceres Seq. ID no. 12579841
  misc_feature (1)..(202): Pfam Name: Protein of unknown function (DUF760) Pfam Description: Protein of unknown function (DUF760)
  misc_feature (1)..(52): Homolog of NCBI NO: 15239021 NR Description: putative protein
  misc_feature (108)..(197): Homolog of NCBI NO: 18397912 NR Description: expressed protein
  misc_feature (1)..(60): Homolog of NCBI NO: 18397912 NR Description: expressed protein
  misc_feature (1)..(200): Homolog of NCBI NO: 18398302 NR Description: expressed protein
  misc_feature (1)..(200): Homolog of NCBI NO: 32489097 NR Description: OSJNBa0093F12.3 [Oryza sativa (japonica
  misc_feature (1)..(202): Homolog of NCBI NO: 28301943 NR Description: unknown protein [Oryza sativa (japonica
  misc_feature (1)..(202): Homolog of NCBI NO: 13561930 NR Description: unknown [Brassica napus]
  misc_feature (1)..(202): Homolog of NCBI NO: 15221185 NR Description: unknown protein
  misc_feature (1)..(202): Homolog of NCBI NO: 17064820 NR Description: Unknown protein [Arabidopsis thaliana]
  misc_feature (1)..(202): Homolog of NCBI NO: 18401645 NR Description: expressed protein
MIHNHLALILGSRMGDLNSVAQISKLRVGQVYAASVMYGYFLKRVDQRFQLEKTMKILPGGSDESQTSVEQAEGTATYQAAVSSHPEVGAFAGGVSAKGFGSEIKPSRLRSYVMSFDAETLQRYATIRSREAVGIIEKHTEALFGKPEIVITPEGTVDSSKDEQIKISFGGMKRLVLEAVTFGSFLWDVESHVDARYHFVLN

SEQ ID NO: 29853 - DNA, 1859 bp, Arabidopsis thaliana; identical to SEQ ID NO: 21171
  misc_feature (1)..(1859): Ceres Seq. ID no. 13646168
  misc_feature: MA Experiment ID: 108434 Result: Up-regulated in Transcription
  misc_feature: MA Experiment 108434 PARAMETER Experiment Name: At_Root_Tips_cDNA_P Parameter: Tissue Value: Root Tips
  misc_feature: MA Experiment ID: 108462 Result: Down-regulated in Transcription
  misc_feature: MA Experiment 108462 PARAMETER Experiment Name: At_Germinating_Seeds_cDNA_P Parameter: Age (day) Value: 2 vs. 0
  misc_feature: MA Experiment 108462 PARAMETER Experiment Name: At_Germinating_Seeds_cDNA_P Parameter: Tissue Value: Germinating Seeds
  misc_feature: MA Experiment ID: 108463 Result: Down-regulated in Transcription
  misc_feature: MA Experiment 108463 PARAMETER Experiment Name: At_Germinating_Seeds_cDNA_P Parameter: Age (day) Value: 3 vs. 0
  misc_feature: MA Experiment 108463 PARAMETER Experiment Name: At_Germinating_Seeds_cDNA_P Parameter: Tissue Value: Germinating Seeds
  misc_feature: MA Experiment ID: 108573 Result: Down-regulated in Transcription
  misc_feature: MA Experiment 108573 PARAMETER Experiment Name: At_Drought_cDNA_P Parameter: Timepoint (hr) Value: 6
  misc_feature: MA Experiment 108573 PARAMETER Experiment Name: At_Drought_cDNA_P Parameter: Tissue Value: Aerial
  misc_feature: MA Experiment 108573 PARAMETER Experiment Name: At_Drought_cDNA_P Parameter: Treatment Value: Drought vs. No Drought
  misc_feature: MA Experiment ID: 20001905 Result: Down-regulated in Transcription
  misc_feature: MA Experiment 20001905 PARAMETER Experiment Name: At_Drought_Reproduction_P Parameter: Age (day) Value: 40
  misc_feature: MA Experiment 20001905 PARAMETER Experiment Name: At_Drought_Reproduction_P Parameter: Organism Value: A. thaliana
  misc_feature: MA Experiment 20001905 PARAMETER Experiment Name: At_Drought_Reproduction_P Parameter: Plant Line Value: WS
  misc_feature: MA Experiment 20001905 PARAMETER Experiment Name: At_Drought_Reproduction_P Parameter: Timepoint (day) Value: 10
  misc_feature: MA Experiment 20001905 PARAMETER Experiment Name: At_Drought_Reproduction_P Parameter: Tissue Value: Rosettes
  misc_feature: MA Experiment 20001905 PARAMETER Experiment Name: At_Drought_Reproduction_P Parameter: Treatment Value: Drought vs. No Drought

SEQ ID NO: 29854 - protein, 180 aa, Arabidopsis thaliana; identical to SEQ ID NO: 21172
  peptide (1)..(180): Ceres Seq. ID no. 13646169
  misc_feature (50)..(173): Pfam Name: Spermine/spermidine synthase Pfam Description: Spermine/spermidine synthase
  misc_feature (50)..(173): Pfam Name: Spermine/spermidine synthase Pfam Description: Spermine/spermidine synthase
  misc_feature (1)..(173): Homolog of NCBI NO: 23495352 NR Description: spermidine synthase [Malus x domestica]
  misc_feature (40)..(173): Homolog of NCBI NO: 6094330 NR Description: Spermidine synthase 2 (Putrescine
  misc_feature (39)..(173): Homolog of NCBI NO: 6094327 NR Description: Spermidine synthase 1 (Putrescine
  misc_feature (10)..(175): Homolog of NCBI NO: 12229958 NR Description: Spermidine synthase 1 (Putrescine
  misc_feature (10)..(173): Homolog of NCBI NO: 15150055 NR Description: spermidine synthase [Solanum tuberosum]
  misc_feature (39)..(173): Homolog of NCBI NO: 6094327 NR Description: Spermidine synthase 1 (Putrescine
  misc_feature (10)..(173): Homolog of NCBI NO: 15150055 NR Description: spermidine synthase [Solanum tuberosum]
  misc_feature (11)..(173): Homolog of NCBI NO: 23495354 NR Description: spermidine synthase [Malus x domestica]
  misc_feature (40)..(173): Homolog of NCBI NO: 6094330 NR Description: Spermidine synthase 2 (Putrescine
  misc_feature (1)..(173): Homolog of NCBI NO: 23495352 NR Description: spermidine synthase [Malus x domestica]
  misc_feature (1)..(173): Homolog of NCBI NO: 15223115 NR Description: spermidine synthase -related [Arabidopsis
  misc_feature (51)..(173): Homolog of NCBI NO: 2821961 NR Description: spermidine synthase [Arabidopsis thaliana]
  misc_feature (5)..(173): Homolog of NCBI NO: 15220885 NR Description: spermidine synthase -related [Arabidopsis
  misc_feature (10)..(173): Homolog of NCBI NO: 12230013 NR Description: Spermidine synthase (Putrescine
  misc_feature (10)..(175): Homolog of NCBI NO: 12229958 NR Description: Spermidine synthase 1 (Putrescine
  misc_feature (10)..(173): Homolog of NCBI NO: 12230013 NR Description: Spermidine synthase (Putrescine
  misc_feature (11)..(173): Homolog of NCBI NO: 23495354 NR Description: spermidine synthase [Malus x domestica]
  misc_feature (5)..(173): Homolog of NCBI NO: 15220885 NR Description: spermidine synthase -related [Arabidopsis
  misc_feature (51)..(173): Homolog of NCBI NO: 2821961 NR Description: spermidine synthase [Arabidopsis thaliana]
  misc_feature (1)..(173): Homolog of NCBI NO: 15223115 NR Description: spermidine synthase -related [Arabidopsis

SEQ ID NO: 29855 - protein, 168 aa, Arabidopsis thaliana; identical to SEQ ID NO: 21173
  peptide (1)..(168): Ceres Seq. ID no. 13646170
  misc_feature (18)..(123): Pfam Name: Spermine/spermidine synthase Pfam Description: Spermine/spermidine synthase
  misc_feature (18)..(123): Pfam Name: Spermine/spermidine synthase Pfam Description: Spermine/spermidine synthase
  misc_feature (18)..(167): Homolog of NCBI NO: 23495352 NR Description: spermidine synthase [Malus x domestica]
  misc_feature (18)..(167): Homolog of NCBI NO: 6094330 NR Description: Spermidine synthase 2 (Putrescine
  misc_feature (18)..(166): Homolog of NCBI NO: 6094327 NR Description: Spermidine synthase 1 (Putrescine
  misc_feature (18)..(168): Homolog of NCBI NO: 12229958 NR Description: Spermidine synthase 1 (Putrescine
  misc_feature (18)..(166): Homolog of NCBI NO: 15150055 NR Description: spermidine synthase [Solanum tuberosum]
  misc_feature (18)..(167): Homolog of NCBI NO: 23495352 NR Description: spermidine synthase [Malus x domestica]
  misc_feature (18)..(166): Homolog of NCBI NO: 6094327 NR Description: Spermidine synthase 1 (Putrescine
  misc_feature (18)..(166): Homolog of NCBI NO: 15150055 NR Description: spermidine synthase [Solanum tuberosum]
  misc_feature (18)..(168): Homolog of NCBI NO: 15223115 NR Description: spermidine synthase -related [Arabidopsis
  misc_feature (18)..(168): Homolog of NCBI NO: 2821961 NR Description: spermidine synthase [Arabidopsis thaliana]
  misc_feature (18)..(168): Homolog of NCBI NO: 15220885 NR Description: spermidine synthase -related [Arabidopsis
  misc_feature (18)..(167): Homolog of NCBI NO: 23495354 NR Description: spermidine synthase [Malus x domestica]
  misc_feature (18)..(166): Homolog of NCBI NO: 12230013 NR Description: Spermidine synthase (Putrescine
  misc_feature (18)..(168): Homolog of NCBI NO: 12229958 NR Description: Spermidine synthase 1 (Putrescine
  misc_feature (18)..(167): Homolog of NCBI NO: 6094330 NR Description: Spermidine synthase 2 (Putrescine
  misc_feature (18)..(166): Homolog of NCBI NO: 12230013 NR Description: Spermidine synthase (Putrescine
  misc_feature (18)..(167): Homolog of NCBI NO: 23495354 NR Description: spermidine synthase [Malus x domestica]
  misc_feature (18)..(168): Homolog of NCBI NO: 15220885 NR Description: spermidine synthase -related [Arabidopsis
  misc_feature (18)..(168): Homolog of NCBI NO: 2821961 NR Description: spermidine synthase [Arabidopsis thaliana]
  misc_feature (18)..(168): Homolog of NCBI NO: 15223115 NR Description: spermidine synthase -related [Arabidopsis

SEQ ID NO: 29856 - protein, 158 aa, Arabidopsis thaliana; identical to SEQ ID NO: 21174
  peptide (1)..(158): Ceres Seq. ID no. 13646171
  misc_feature (8)..(113): Pfam Name: Spermine/spermidine synthase Pfam Description: Spermine/spermidine synthase
  misc_feature (8)..(113): Pfam Name: Spermine/spermidine synthase Pfam Description: Spermine/spermidine synthase
  misc_feature (8)..(157): Homolog of NCBI NO: 23495352 NR Description: spermidine synthase [Malus x domestica]
  misc_feature (8)..(157): Homolog of NCBI NO: 6094330 NR Description: Spermidine synthase 2 (Putrescine
  misc_feature (8)..(156): Homolog of NCBI NO: 6094327 NR Description: Spermidine synthase 1 (Putrescine
  misc_feature (8)..(158): Homolog of NCBI NO: 12229958 NR Description: Spermidine synthase 1 (Putrescine
  misc_feature (8)..(156): Homolog of NCBI NO: 15150055 NR Description: spermidine synthase [Solanum tuberosum]
  misc_feature (8)..(157): Homolog of NCBI NO: 23495352 NR Description: spermidine synthase [Malus x domestica]
  misc_feature (8)..(156): Homolog of NCBI NO: 6094327 NR Description: Spermidine synthase 1 (Putrescine
  misc_feature (8)..(156): Homolog of NCBI NO: 15150055 NR Description: spermidine synthase [Solanum tuberosum]
  misc_feature (8)..(158): Homolog of NCBI NO: 15223115 NR Description: spermidine synthase -related [Arabidopsis
  misc_feature (8)..(158): Homolog of NCBI NO: 2821961 NR Description: spermidine synthase [Arabidopsis thaliana]
  misc_feature (8)..(158): Homolog of NCBI NO: 15220885 NR Description: spermidine synthase -related [Arabidopsis
  misc_feature (8)..(157): Homolog of NCBI NO: 23495354 NR Description: spermidine synthase [Malus x domestica]
  misc_feature (8)..(156): Homolog of NCBI NO: 12230013 NR Description: Spermidine synthase (Putrescine
  misc_feature (8)..(158): Homolog of NCBI NO: 12229958 NR Description: Spermidine synthase 1 (Putrescine
  misc_feature (8)..(157): Homolog of NCBI NO: 6094330 NR Description: Spermidine synthase 2 (Putrescine
  misc_feature (8)..(156): Homolog of NCBI NO: 12230013 NR Description: Spermidine synthase (Putrescine
  misc_feature (8)..(157): Homolog of NCBI NO: 23495354 NR Description: spermidine synthase [Malus x domestica]
  misc_feature (8)..(158): Homolog of NCBI NO: 15220885 NR Description: spermidine synthase -related [Arabidopsis
  misc_feature (8)..(158): Homolog of NCBI NO: 2821961 NR Description: spermidine synthase [Arabidopsis thaliana]
  misc_feature (8)..(158): Homolog of NCBI NO: 15223115 NR Description: spermidine synthase -related [Arabidopsis

SEQ ID NO: 29857 - DNA, 1430 bp, Arabidopsis thaliana; identical to SEQ ID NO: 22042
  misc_feature (1)..(1430): Ceres Seq. ID no. 12482890
  misc_feature: MA Experiment ID: 20000173 Result: Down-regulated in Transcription
  misc_feature: MA Experiment 20000173 PARAMETER Experiment Name: At_42deg_Heat_P Parameter: Age (day) Value: 14
  misc_feature: MA Experiment 20000173 PARAMETER Experiment Name: At_42deg_Heat_P Parameter: Organism Value: A. thaliana
  misc_feature: MA Experiment 20000173 PARAMETER Experiment Name: At_42deg_Heat_P Parameter: Plant Line Value: WS
  misc_feature: MA Experiment 20000173 PARAMETER Experiment Name: At_42deg_Heat_P Parameter: Temperature (deg C) Value: 42 vs. 22
  misc_feature: MA Experiment 20000173 PARAMETER Experiment Name: At_42deg_Heat_P Parameter: Timepoint (hr) Value: 6
  misc_feature: MA Experiment 20000173 PARAMETER Experiment Name: At_42deg_Heat_P Parameter: Tissue Value: Aerial
  misc_feature: MA Experiment ID: 20000182 Result: Up-regulated in Transcription
  misc_feature: MA Experiment 20000182 PARAMETER Experiment Name: At_2mM_SA_P Parameter: Age (day) Value: 14
  misc_feature: MA Experiment 20000182 PARAMETER Experiment Name: At_2mM_SA_P Parameter: Organism Value: A. thaliana
  misc_feature: MA Experiment 20000182 PARAMETER Experiment Name: At_2mM_SA_P Parameter: Plant Line Value: WS
  misc_feature: MA Experiment 20000182 PARAMETER Experiment Name: At_2mM_SA_P Parameter: Timepoint (hr) Value: 6
  misc_feature: MA Experiment 20000182 PARAMETER Experiment Name: At_2mM_SA_P Parameter: Tissue Value: Aerial
  misc_feature: MA Experiment 20000182 PARAMETER Experiment Name: At_2mM_SA_P Parameter: Treatment Value: 2mM SA vs. No Treatment
  misc_feature: MA Experiment ID: 20000184 Result: Down-regulated in Transcription
  misc_feature: MA Experiment 20000184 PARAMETER Experiment Name: At_Shoots__P Parameter: Age (day) Value: 7
  misc_feature: MA Experiment 20000184 PARAMETER Experiment Name: At_Shoots__P Parameter: Tissue Value: Shoots vs. Whole Plant
  misc_feature: MA Experiment ID: 20000185 Result: Down-regulated in Transcription
  misc_feature: MA Experiment 20000185 PARAMETER Experiment Name: At_Roots__P Parameter: Age (day) Value: 7 vs. 21
  misc_feature: MA Experiment 20000185 PARAMETER Experiment Name: At_Roots__P Parameter: Organism Value: A. thaliana
  misc_feature: MA Experiment 20000185 PARAMETER Experiment Name: At_Roots__P Parameter: Tissue Value: Roots vs. Whole Plant
  misc_feature: MA Experiment ID: 20000213 Result: Up-regulated in Transcription
  misc_feature: MA Experiment 20000213 PARAMETER Experiment Name: At_4deg_Cold_P Parameter: Timepoint (hr) Value: 2
  misc_feature: MA Experiment ID: 20000234 Result: Down-regulated in Transcription
  misc_feature: MA Experiment 20000234 PARAMETER Experiment Name: At_Siliques_P Parameter: Age (day) Value: 21
  misc_feature: MA Experiment 20000234 PARAMETER Experiment Name: At_Siliques_P Parameter: Organism Value: A. thaliana
  misc_feature: MA Experiment 20000234 PARAMETER Experiment Name: At_Siliques_P Parameter: Plant Line Value: WS
  misc_feature: MA Experiment 20000234 PARAMETER Experiment Name: At_Siliques_P Parameter: Tissue Value: Less Than 5mm Siliques vs. Whole Plant
  misc_feature: MA Experiment ID: 20000264 Result: Down-regulated in Transcription
  misc_feature: MA Experiment 20000264 PARAMETER Experiment Name: At_Open_Flower_P Parameter: Age (day) Value: 21
  misc_feature: MA Experiment 20000264 PARAMETER Experiment Name: At_Open_Flower_P Parameter: Plant Line Value: WS
  misc_feature: MA Experiment 20000264 PARAMETER Experiment Name: At_Open_Flower_P Parameter: Tissue Value: Open Flower vs. Whole Plant
  misc_feature: MA Experiment ID: 20000265 Result: Down-regulated in Transcription
  misc_feature: MA Experiment 20000265 PARAMETER Experiment Name: At_Open_Flower_P Parameter: Age (day) Value: 21
  misc_feature: MA Experiment 20000265 PARAMETER Experiment Name: At_Open_Flower_P Parameter: Plant Line Value: WS
  misc_feature: MA Experiment 20000265 PARAMETER Experiment Name: At_Open_Flower_P Parameter: Tissue Value: Closed Flower vs. Whole Plant
  misc_feature: MA Experiment ID: 20000286 Result: Down-regulated in Transcription
  misc_feature: MA Experiment 20000286 PARAMETER Experiment Name: At_Open_Flower_P Parameter: Age (day) Value: 21
  misc_feature: MA Experiment 20000286 PARAMETER Experiment Name: At_Open_Flower_P Parameter: Plant Line Value: WS
  misc_feature: MA Experiment 20000286 PARAMETER Experiment Name: At_Open_Flower_P Parameter: Tissue Value: Half Open vs. Whole Plant
  misc_feature: MA Experiment ID: 20000438 Result: Down-regulated in Transcription
  misc_feature: MA Experiment 20000438 PARAMETER Experiment Name: At_Shoots__P Parameter: Age (day) Value: 14
  misc_feature: MA Experiment 20000438 PARAMETER Experiment Name: At_Shoots__P Parameter: Tissue Value: Shoots vs. Whole Plant
  misc_feature: MA Experiment ID: 20000439 Result: Down-regulated in Transcription
  misc_feature: MA Experiment 20000439 PARAMETER Experiment Name: At_Roots__P Parameter: Age (day) Value: 14 vs. 21
  misc_feature: MA Experiment 20000439 PARAMETER Experiment Name: At_Roots__P Parameter: Organism Value: A. thaliana
  misc_feature: MA Experiment 20000439 PARAMETER Experiment Name: At_Roots__P Parameter: Tissue Value: Roots vs. Whole Plant
  misc_feature: MA Experiment ID: 20000495 Result: Down-regulated in Transcription
  misc_feature: MA Experiment 20000495 PARAMETER Experiment Name: At_Guard_Cells_P Parameter: Harvest Date Value: 8/2/2002
  misc_feature: MA Experiment 20000495 PARAMETER Experiment Name: At_Guard_Cells_P Parameter: Organism Value: A. thaliana
  misc_feature: MA Experiment 20000495 PARAMETER Experiment Name: At_Guard_Cells_P Parameter: Tissue Value: Guard Cells vs. Leaves
  misc_feature: MA Experiment ID: 20000576 Result: Down-regulated in Transcription
  misc_feature: MA Experiment 20000576 PARAMETER Experiment Name: At_100uM_ABA_Mutants__P Parameter: Organism Value: A. thaliana
  misc_feature: MA Experiment 20000576 PARAMETER Experiment Name: At_100uM_ABA_Mutants__P Parameter: Plant Line Value: CS23
  misc_feature: MA Experiment 20000576 PARAMETER Experiment Name: At_100uM_ABA_Mutants__P Parameter: Timepoint (hr) Value: 6
  misc_feature: MA Experiment 20000576 PARAMETER Experiment Name: At_100uM_ABA_Mutants__P Parameter: Tissue Value: Whole Plant
  misc_feature: MA Experiment 20000576 PARAMETER Experiment Name: At_100uM_ABA_Mutants__P Parameter: Treatment Value: 1uM ABA vs. No Treatment
  misc_feature: MA Experiment ID: 20000709 Result: Up-regulated in Transcription
  misc_feature: MA Experiment 20000709 PARAMETER Experiment Name: At_15mM_NH4NO3_L-to-H_P Parameter: Age (hr) Value: 14
  misc_feature: MA Experiment 20000709 PARAMETER Experiment Name: At_15mM_NH4NO3_L-to-H_P Parameter: Organism Value: A. thaliana
  misc_feature: MA Experiment 20000709 PARAMETER Experiment Name: At_15mM_NH4NO3_L-to-H_P Parameter: Plant Line Value: WS
  misc_feature: MA Experiment 20000709 PARAMETER Experiment Name: At_15mM_NH4NO3_L-to-H_P Parameter: Timepoint (hr) Value: 4
  misc_feature: MA Experiment 20000709 PARAMETER Experiment Name: At_15mM_NH4NO3_L-to-H_P Parameter: Tissue Value: Aerial
  misc_feature: MA Experiment 20000709 PARAMETER Experiment Name: At_15mM_NH4NO3_L-to-H_P Parameter: Treatment Value: 15mM NH4NO3 vs. 30mM Mannitol
  misc_feature: MA Experiment ID: 20000794 Result: Down-regulated in Transcription
  misc_feature: MA Experiment 20000794 PARAMETER Experiment Name: At_Petals_P Parameter: Age (day) Value: 23-25 days
  misc_feature: MA Experiment 20000794 PARAMETER Experiment Name: At_Petals_P Parameter: Plant Line Value: WS
  misc_feature: MA Experiment 20000794 PARAMETER Experiment Name: At_Petals_P Parameter: Tissue Value: Petals vs. Whole plant
  misc_feature: MA Experiment ID: 20001247 Result: Down-regulated in Transcription
  misc_feature: MA Experiment 20001247 PARAMETER Experiment Name: At_Far-red-induction_P Parameter: Age (day) Value: 7
  misc_feature: MA Experiment 20001247 PARAMETER Experiment Name: At_Far-red-induction_P Parameter: Light Value: Far-red vs. White
  misc_feature: MA Experiment 20001247 PARAMETER Experiment Name: At_Far-red-induction_P Parameter: Organism Value: A. thaliana
  misc_feature: MA Experiment 20001247 PARAMETER Experiment Name: At_Far-red-induction_P Parameter: Plant Line Value: Columbia
  misc_feature: MA Experiment 20001247 PARAMETER Experiment Name: At_Far-red-induction_P Parameter: Timepoint (hr) Value: 1
  misc_feature: MA Experiment 20001247 PARAMETER Experiment Name: At_Far-red-induction_P Parameter: Tissue Value: Whole Plant
  misc_feature: MA Experiment ID: 20001450 Result: Down-regulated in Transcription
  misc_feature: MA Experiment 20001450 PARAMETER Experiment Name: At_Far-red-induction_P Parameter: Age (day) Value: 7
  misc_feature: MA Experiment 20001450 PARAMETER Experiment Name: At_Far-red-induction_P Parameter: Light Value: Far-red vs. White
  misc_feature: MA Experiment 20001450 PARAMETER Experiment Name: At_Far-red-induction_P Parameter: Organism Value: A. thaliana
  misc_feature: MA Experiment 20001450 PARAMETER Experiment Name: At_Far-red-induction_P Parameter: Plant Line Value: Columbia
  misc_feature: MA Experiment 20001450 PARAMETER Experiment Name: At_Far-red-induction_P Parameter: Timepoint (hr) Value: 8
  misc_feature: MA Experiment 20001450 PARAMETER Experiment Name: At_Far-red-induction_P Parameter: Tissue Value: Whole Plant
  misc_feature: MA Experiment ID: 20001451 Result: Down-regulated in Transcription
  misc_feature: MA Experiment 20001451 PARAMETER Experiment Name: At_Far-red-induction_P Parameter: Age (day) Value: 7
  misc_feature: MA Experiment 20001451 PARAMETER Experiment Name: At_Far-red-induction_P Parameter: Light Value: Far-red vs. White
  misc_feature: MA Experiment 20001451 PARAMETER Experiment Name: At_Far-red-induction_P Parameter: Organism Value: A. thaliana
  misc_feature: MA Experiment 20001451 PARAMETER Experiment Name: At_Far-red-induction_P Parameter: Plant Line Value: Columbia
  misc_feature: MA Experiment 20001451 PARAMETER Experiment Name: At_Far-red-induction_P Parameter: Timepoint (hr) Value: 24
  misc_feature: MA Experiment 20001451 PARAMETER Experiment Name: At_Far-red-induction_P Parameter: Tissue Value: Whole Plant
  misc_feature: MA Experiment ID: 20001555 Result: Down-regulated in Transcription
  misc_feature: MA Experiment 20001555 PARAMETER Experiment Name: At_Drought_Soil_Dry_P Parameter: Age (day) Value: 24
  misc_feature: MA Experiment 20001555 PARAMETER Experiment Name: At_Drought_Soil_Dry_P Parameter: Organism Value: A. thaliana
  misc_feature: MA Experiment 20001555 PARAMETER Experiment Name: At_Drought_Soil_Dry_P Parameter: Plant Line Value: WS
  misc_feature: MA Experiment 20001555 PARAMETER Experiment Name: At_Drought_Soil_Dry_P Parameter: Post Timepoint (hr) Value: None
  misc_feature: MA Experiment 20001555 PARAMETER Experiment Name: At_Drought_Soil_Dry_P Parameter: Post-Treatment Value: None
  misc_feature: MA Experiment 20001555 PARAMETER Experiment Name: At_Drought_Soil_Dry_P Parameter: Timepoint (day) Value: 10
  misc_feature: MA Experiment 20001555 PARAMETER Experiment Name: At_Drought_Soil_Dry_P Parameter: Treatment Value: Drought vs. No Drought
  misc_feature: MA Experiment ID: 20001907 Result: Down-regulated in Transcription
  misc_feature: MA Experiment 20001907 PARAMETER Experiment Name: At_Drought_Reproduction_P Parameter: Age (day) Value: 37
  misc_feature: MA Experiment 20001907 PARAMETER Experiment Name: At_Drought_Reproduction_P Parameter: Organism Value: A. thaliana
  misc_feature: MA Experiment 20001907 PARAMETER Experiment Name: At_Drought_Reproduction_P Parameter: Plant Line Value: WS
  misc_feature: MA Experiment 20001907 PARAMETER Experiment Name: At_Drought_Reproduction_P Parameter: Timepoint (day) Value: 7
  misc_feature: MA Experiment 20001907 PARAMETER Experiment Name: At_Drought_Reproduction_P Parameter: Tissue Value: Siliques
  misc_feature: MA Experiment 20001907 PARAMETER Experiment Name: At_Drought_Reproduction_P Parameter: Treatment Value: Drought vs. No Drought

SEQ ID NO: 29858 - protein, 425 aa, Arabidopsis thaliana; identical to SEQ ID NO: 22043
  peptide (1)..(425): Ceres Seq. ID no. 12482891
  misc_feature (111)..(239): Pfam Name: Protein of unknown function (DUF568) Pfam Description: Protein of unknown function (DUF568)
  misc_feature (111)..(239): Pfam Name: Protein of unknown function (DUF568) Pfam Description: Protein of unknown function (DUF568)
  misc_feature (22)..(394): Homolog of NCBI NO: 15235545 NR Description: putative protein
  misc_feature (32)..(411): Homolog of NCBI NO: 24414270 NR Description: Putative membrane protein [Oryza sativa (japonica
  misc_feature (50)..(410): Homolog of NCBI NO: 15238124 NR Description: putative protein; protein id: At5g47530.1
  misc_feature (34)..(399): Homolog of NCBI NO: 18086563 NR Description: AT4g17280/dl4675c [Arabidopsis thaliana]
  misc_feature (30)..(423): Homolog of NCBI NO: 13785213 NR Description: putative membrane protein [Solanum tuberosum]
  misc_feature (22)..(394): Homolog of NCBI NO: 15235545 NR Description: putative protein
  misc_feature (50)..(410): Homolog of NCBI NO: 15238124 NR Description: putative protein; protein id: At5g47530.1
  misc_feature (30)..(423): Homolog of NCBI NO: 13785213 NR Description: putative membrane protein [Solanum tuberosum]
  misc_feature (22)..(425): Homolog of NCBI NO: 18421491 NR Description: Expressed protein
  misc_feature (22)..(425): Homolog of NCBI NO: 21592781 NR Description: putative membrane protein [Arabidopsis thaliana]
  misc_feature (32)..(425): Homolog of NCBI NO: 13785209 NR Description: putative membrane protein [Solanum tuberosum]
  misc_feature (30)..(423): Homolog of NCBI NO: 13785211 NR Description: putative membrane protein [Solanum tuberosum]
  misc_feature (30)..(423): Homolog of NCBI NO: 13785207 NR Description: putative membrane protein [Solanum tuberosum]
  misc_feature (34)..(399): Homolog of NCBI NO: 18086563 NR Description: AT4g17280/dl4675c [Arabidopsis thaliana]
  misc_feature (32)..(411): Homolog of NCBI NO: 24414270 NR Description: Putative membrane protein [Oryza sativa (japonica
  misc_feature (30)..(423): Homolog of NCBI NO: 13785207 NR Description: putative membrane protein [Solanum tuberosum]
  misc_feature (30)..(423): Homolog of NCBI NO: 13785211 NR Description: putative membrane protein [Solanum tuberosum]
  misc_feature (32)..(425): Homolog of NCBI NO: 13785209 NR Description: putative membrane protein [Solanum tuberosum]
  misc_feature (22)..(425): Homolog of NCBI NO: 21592781 NR Description: putative membrane protein [Arabidopsis thaliana]
  misc_feature (22)..(425): Homolog of NCBI NO: 18421491 NR Description: Expressed protein

SEQ ID NO: 29859 - protein, 404 aa, Arabidopsis thaliana; identical to SEQ ID NO: 22044
  peptide (1)..(404): Ceres Seq. ID no. 12482892
  misc_feature (90)..(218): Pfam Name: Protein of unknown function (DUF568) Pfam Description: Protein of unknown function (DUF568)
  misc_feature (90)..(218): Pfam Name: Protein of unknown function (DUF568) Pfam Description: Protein of unknown function (DUF568)
  misc_feature (1)..(373): Homolog of NCBI NO: 15235545 NR Description: putative protein
  misc_feature (11)..(390): Homolog of NCBI NO: 24414270 NR Description: Putative membrane protein [Oryza sativa (japonica
  misc_feature (29)..(389): Homolog of NCBI NO: 15238124 NR Description: putative protein; protein id: At5g47530.1
  misc_feature (13)..(378): Homolog of NCBI NO: 18086563 NR Description: AT4g17280/dl4675c [Arabidopsis thaliana]
  misc_feature (9)..(402): Homolog of NCBI NO: 13785213 NR Description: putative membrane protein [Solanum tuberosum]
  misc_feature (1)..(373): Homolog of NCBI NO: 15235545 NR Description: putative protein
  misc_feature (29)..(389): Homolog of NCBI NO: 15238124 NR Description: putative protein; protein id: At5g47530.1
  misc_feature (9)..(402): Homolog of NCBI NO: 13785213 NR Description: putative membrane protein [Solanum tuberosum]
  misc_feature (1)..(404): Homolog of NCBI NO: 18421491 NR Description: Expressed protein
  misc_feature (1)..(404): Homolog of NCBI NO: 21592781 NR Description: putative membrane protein [Arabidopsis thaliana]
  misc_feature (11)..(404): Homolog of NCBI NO: 13785209 NR Description: putative membrane protein [Solanum tuberosum]
  misc_feature (9)..(402): Homolog of NCBI NO: 13785211 NR Description: putative membrane protein [Solanum tuberosum]
  misc_feature (9)..(402): Homolog of NCBI NO: 13785207 NR Description: putative membrane protein [Solanum tuberosum]
  misc_feature (13)..(378): Homolog of NCBI NO: 18086563 NR Description: AT4g17280/dl4675c [Arabidopsis thaliana]
  misc_feature (11)..(390): Homolog of NCBI NO: 24414270 NR Description: Putative membrane protein [Oryza sativa (japonica
  misc_feature (9)..(402): Homolog of NCBI NO: 13785207 NR Description: putative membrane protein [Solanum tuberosum]
  misc_feature (9)..(402): Homolog of NCBI NO: 13785211 NR Description: putative membrane protein [Solanum tuberosum]
  misc_feature (11)..(404): Homolog of NCBI NO: 13785209 NR Description: putative membrane protein [Solanum tuberosum]
  misc_feature (1)..(404): Homolog of NCBI NO: 21592781 NR Description: putative membrane protein [Arabidopsis thaliana]
  misc_feature (1)..(404): Homolog of NCBI NO: 18421491 NR Description: Expressed protein

SEQ ID NO: 29860 - protein, 315 aa, Arabidopsis thaliana; identical to SEQ ID NO: 22045
  peptide (1)..(315): Ceres Seq. ID no. 12482893
  misc_feature (1)..(129): Pfam Name: Protein of unknown function (DUF568) Pfam Description: Protein of unknown function (DUF568)
  misc_feature (1)..(129): Pfam Name: Protein of unknown function (DUF568) Pfam Description: Protein of unknown function (DUF568)
  misc_feature (1)..(284): Homolog of NCBI NO: 15235545 NR Description: putative protein
  misc_feature (1)..(301): Homolog of NCBI NO: 24414270 NR Description: Putative membrane protein [Oryza sativa (japonica
  misc_feature (1)..(300): Homolog of NCBI NO: 15238124 NR Description: putative protein; protein id: At5g47530.1
  misc_feature (1)..(289): Homolog of NCBI NO: 18086563 NR Description: AT4g17280/dl4675c [Arabidopsis thaliana]
  misc_feature (1)..(313): Homolog of NCBI NO: 13785213 NR Description: putative membrane protein [Solanum tuberosum]
  misc_feature (1)..(284): Homolog of NCBI NO: 15235545 NR Description: putative protein
  misc_feature (1)..(300): Homolog of NCBI NO: 15238124 NR Description: putative protein; protein id: At5g47530.1
  misc_feature (1)..(313): Homolog of NCBI NO: 13785213 NR Description: putative membrane protein [Solanum tuberosum]
  misc_feature (1)..(315): Homolog of NCBI NO: 18421491 NR Description: Expressed protein
  misc_feature (1)..(315): Homolog of NCBI NO: 21592781 NR Description: putative membrane protein [Arabidopsis thaliana]
  misc_feature (1)..(315): Homolog of NCBI NO: 13785209 NR Description: putative membrane protein [Solanum tuberosum]
  misc_feature (1)..(313): Homolog of NCBI NO: 13785211 NR Description: putative membrane protein [Solanum tuberosum]
  misc_feature (1)..(313): Homolog of NCBI NO: 13785207 NR Description: putative membrane protein [Solanum tuberosum]
  misc_feature (1)..(289): Homolog of NCBI NO: 18086563 NR Description: AT4g17280/dl4675c [Arabidopsis thaliana]
  misc_feature (1)..(301): Homolog of NCBI NO: 24414270 NR Description: Putative membrane protein [Oryza sativa (japonica
  misc_feature (1)..(313): Homolog of NCBI NO: 13785207 NR Description: putative membrane protein [Solanum tuberosum]
  misc_feature (1)..(313): Homolog of NCBI NO: 13785211 NR Description: putative membrane protein [Solanum tuberosum]
  misc_feature (1)..(315): Homolog of NCBI NO: 13785209 NR Description: putative membrane protein [Solanum tuberosum]
  misc_feature (1)..(315): Homolog of NCBI NO: 21592781 NR Description: putative membrane protein [Arabidopsis thaliana]
  misc_feature (1)..(315): Homolog of NCBI NO: 18421491 NR Description: Expressed protein

SEQ ID NO: 29861 - DNA, 665 bp, Arabidopsis thaliana
  misc_feature (1)..(665): Ceres Seq. ID no. 13491980
  misc_feature: MA Experiment ID: 108434 Result: Up-regulated in Transcription
  misc_feature: MA Experiment 108434 PARAMETER Experiment Name: At_Root_Tips_cDNA_P Parameter: Tissue Value: Root Tips
  misc_feature: MA Experiment ID: 108462 Result: Up-regulated in Transcription
  misc_feature: MA Experiment 108462 PARAMETER Experiment Name: At_Germinating_Seeds_cDNA_P Parameter: Age (day) Value: 2 vs. 0
  misc_feature: MA Experiment 108462 PARAMETER Experiment Name: At_Germinating_Seeds_cDNA_P Parameter: Tissue Value: Germinating Seeds
  misc_feature: MA Experiment ID: 108488 Result: Down-regulated in Transcription
  misc_feature: MA Experiment ID: 108573 Result: Down-regulated in Transcription
  misc_feature: MA Experiment 108573 PARAMETER Experiment Name: At_Drought_cDNA_P Parameter: Timepoint (hr) Value: 6
  misc_feature: MA Experiment 108573 PARAMETER Experiment Name: At_Drought_cDNA_P Parameter: Tissue Value: Aerial
  misc_feature: MA Experiment 108573 PARAMETER Experiment Name: At_Drought_cDNA_P Parameter: Treatment Value: Drought vs. No Drought
  misc_feature: MA Experiment ID: 108576 Result: Down-regulated in Transcription
  misc_feature: MA Experiment 108576 PARAMETER Experiment Name: At_42deg_Heat_cDNA_P Parameter: Temperature (deg C) Value: 42 vs. 22
  misc_feature: MA Experiment 108576 PARAMETER Experiment Name: At_42deg_Heat_cDNA_P Parameter: Timepoint (hr) Value: 1
  misc_feature: MA Experiment 108576 PARAMETER Experiment Name: At_42deg_Heat_cDNA_P Parameter: Tissue Value: Aerial
  misc_feature: MA Experiment ID: 108577 Result: Down-regulated in Transcription
  misc_feature: MA Experiment 108577 PARAMETER Experiment Name: At_42deg_Heat_cDNA_P Parameter: Temperature (deg C) Value: 42 vs. 22
  misc_feature: MA Experiment 108577 PARAMETER Experiment Name: At_42deg_Heat_cDNA_P Parameter: Timepoint (hr) Value: 6
  misc_feature: MA Experiment 108577 PARAMETER Experiment Name: At_42deg_Heat_cDNA_P Parameter: Tissue Value: Aerial
  misc_feature: MA Experiment ID: 20000093 Result: Down-regulated in Transcription
  misc_feature: MA Experiment 20000093 PARAMETER Experiment Name: At_42deg_Heat_cDNA_P Parameter: Temperature (deg C) Value: 42 vs. 22
  misc_feature: MA Experiment 20000093 PARAMETER Experiment Name: At_42deg_Heat_cDNA_P Parameter: Timepoint (hr) Value: 0.5
  misc_feature: MA Experiment 20000093 PARAMETER Experiment Name: At_42deg_Heat_cDNA_P Parameter: Tissue Value: Aerial
  misc_feature: MA Experiment ID: 20000112 Result: Down-regulated in Transcription
  misc_feature: MA Experiment 20000112 PARAMETER Experiment Name: At_42deg_Heat_cDNA_P Parameter: Temperature (deg C) Value: 42 vs. 22
  misc_feature: MA Experiment 20000112 PARAMETER Experiment Name: At_42deg_Heat_cDNA_P Parameter: Timepoint (hr) Value: 2
  misc_feature: MA Experiment 20000112 PARAMETER Experiment Name: At_42deg_Heat_cDNA_P Parameter: Tissue Value: Aerial
  misc_feature: MA Experiment ID: 20000113 Result: Down-regulated in Transcription
  misc_feature: MA Experiment 20000113 PARAMETER Experiment Name: At_42deg_Heat_cDNA_P Parameter: Temperature (deg C) Value: 42 vs. 22
  misc_feature: MA Experiment 20000113 PARAMETER Experiment Name: At_42deg_Heat_cDNA_P Parameter: Timepoint (hr) Value: 8
  misc_feature: MA Experiment 20000113 PARAMETER Experiment Name: At_42deg_Heat_cDNA_P Parameter: Tissue Value: Aerial
  misc_feature: MA Experiment ID: 20000144 Result: Down-regulated in Transcription
  misc_feature: MA Experiment 20000144 PARAMETER Experiment Name: At_42deg_Heat_cDNA_P Parameter: Temperature (deg C) Value: 42 vs. 22
  misc_feature: MA Experiment 20000144 PARAMETER Experiment Name: At_42deg_Heat_cDNA_P Parameter: Timepoint (hr) Value: 1
  misc_feature: MA Experiment 20000144 PARAMETER Experiment Name: At_42deg_Heat_cDNA_P Parameter: Tissue Value: Aerial
  misc_feature: MA Experiment ID: 20000173 Result: Down-regulated in Transcription
  misc_feature: MA Experiment 20000173 PARAMETER Experiment Name: At_42deg_Heat_P Parameter: Age (day) Value: 14
  misc_feature: MA Experiment 20000173 PARAMETER Experiment Name: At_42deg_Heat_P Parameter: Organism Value: A. thaliana
  misc_feature: MA Experiment 20000173 PARAMETER Experiment Name: At_42deg_Heat_P Parameter: Plant Line Value: WS
  misc_feature: MA Experiment 20000173 PARAMETER Experiment Name: At_42deg_Heat_P Parameter: Temperature (deg C) Value: 42 vs. 22
  misc_feature: MA Experiment 20000173 PARAMETER Experiment Name: At_42deg_Heat_P Parameter: Timepoint (hr) Value: 6
  misc_feature: MA Experiment 20000173 PARAMETER Experiment Name: At_42deg_Heat_P Parameter: Tissue Value: Aerial
  misc_feature: MA Experiment ID: 20000184 Result: Up-regulated in Transcription
  misc_feature: MA Experiment 20000184 PARAMETER Experiment Name: At_Shoots__P Parameter: Age (day) Value: 7
  misc_feature: MA Experiment 20000184 PARAMETER Experiment Name: At_Shoots__P Parameter: Tissue Value: Shoots vs. Whole Plant
  misc_feature: MA Experiment ID: 20000437 Result: Down-regulated in Transcription
  misc_feature: MA Experiment 20000437 PARAMETER Experiment Name: At_Drought_P Parameter: Age (day) Value: 8
  misc_feature: MA Experiment 20000437 PARAMETER Experiment Name: At_Drought_P Parameter: Organism Value: A. thaliana
  misc_feature: MA Experiment 20000437 PARAMETER Experiment Name: At_Drought_P Parameter: Plant Line Value: WS
  misc_feature: MA Experiment 20000437 PARAMETER Experiment Name: At_Drought_P Parameter: Timepoint (hr) Value: 24
  misc_feature: MA Experiment 20000437 PARAMETER Experiment Name: At_Drought_P Parameter: Tissue Value: Whole Plant
  misc_feature: MA Experiment 20000437 PARAMETER Experiment Name: At_Drought_P Parameter: Treatment Value: Drought vs. No Drought
  misc_feature: MA Experiment ID: 20000794 Result: Up-regulated in Transcription
  misc_feature: MA Experiment 20000794 PARAMETER Experiment Name: At_Petals_P Parameter: Age (day) Value: 23-25 days
  misc_feature: MA Experiment 20000794 PARAMETER Experiment Name: At_Petals_P Parameter: Plant Line Value: WS
  misc_feature: MA Experiment 20000794 PARAMETER Experiment Name: At_Petals_P Parameter: Tissue Value: Petals vs. Whole plant
  misc_feature: MA Experiment ID: 20001555 Result: Down-regulated in Transcription
  misc_feature: MA Experiment 20001555 PARAMETER Experiment Name: At_Drought_Soil_Dry_P Parameter: Age (day) Value: 24
  misc_feature: MA Experiment 20001555 PARAMETER Experiment Name: At_Drought_Soil_Dry_P Parameter: Organism Value: A. thaliana
  misc_feature: MA Experiment 20001555 PARAMETER Experiment Name: At_Drought_Soil_Dry_P Parameter: Plant Line Value: WS
  misc_feature: MA Experiment 20001555 PARAMETER Experiment Name: At_Drought_Soil_Dry_P Parameter: Post Timepoint (hr) Value: None
  misc_feature: MA Experiment 20001555 PARAMETER Experiment Name: At_Drought_Soil_Dry_P Parameter: Post-Treatment Value: None
  misc_feature: MA Experiment 20001555 PARAMETER Experiment Name: At_Drought_Soil_Dry_P Parameter: Timepoint (day) Value: 10
  misc_feature: MA Experiment 20001555 PARAMETER Experiment Name: At_Drought_Soil_Dry_P Parameter: Treatment Value: Drought vs. No Drought
  misc_feature: MA Experiment ID: 20001556 Result: Down-regulated in Transcription
  misc_feature: MA Experiment 20001556 PARAMETER Experiment Name: At_Drought_Soil_Dry_P Parameter: Age (day) Value: 26
  misc_feature: MA Experiment 20001556 PARAMETER Experiment Name: At_Drought_Soil_Dry_P Parameter: Organism Value: A. thaliana
  misc_feature: MA Experiment 20001556 PARAMETER Experiment Name: At_Drought_Soil_Dry_P Parameter: Plant Line Value: WS
  misc_feature: MA Experiment 20001556 PARAMETER Experiment Name: At_Drought_Soil_Dry_P Parameter: Post Timepoint (hr) Value: None
  misc_feature: MA Experiment 20001556 PARAMETER Experiment Name: At_Drought_Soil_Dry_P Parameter: Post-Treatment Value: None
  misc_feature: MA Experiment 20001556 PARAMETER Experiment Name: At_Drought_Soil_Dry_P Parameter: Timepoint (day) Value: 12
  misc_feature: MA Experiment 20001556 PARAMETER Experiment Name: At_Drought_Soil_Dry_P Parameter: Treatment Value: Drought vs. No Drought
  misc_feature: MA Experiment ID: 20001559 Result: Down-regulated in Transcription
  misc_feature: MA Experiment 20001559 PARAMETER Experiment Name: At_Drought_Soil_Dry_P Parameter: Age (day) Value: 28
  misc_feature: MA Experiment 20001559 PARAMETER Experiment Name: At_Drought_Soil_Dry_P Parameter: Organism Value: A. thaliana
  misc_feature: MA Experiment 20001559 PARAMETER Experiment Name: At_Drought_Soil_Dry_P Parameter: Plant Line Value: WS
  misc_feature: MA Experiment 20001559 PARAMETER Experiment Name: At_Drought_Soil_Dry_P Parameter: Post Timepoint (hr) Value: 29
  misc_feature: MA Experiment 20001559 PARAMETER Experiment Name: At_Drought_Soil_Dry_P Parameter: Post-Treatment Value: Re-Water vs. No Drought
  misc_feature: MA Experiment 20001559 PARAMETER Experiment Name: At_Drought_Soil_Dry_P Parameter: Timepoint (day) Value: 14
  misc_feature: MA Experiment 20001559 PARAMETER Experiment Name: At_Drought_Soil_Dry_P Parameter: Treatment Value: Drought vs. No Drought
  misc_feature: MA Experiment ID: 20001905 Result: Down-regulated in Transcription
  misc_feature: MA Experiment 20001905 PARAMETER Experiment Name: At_Drought_Reproduction_P Parameter: Age (day) Value: 40
  misc_feature: MA Experiment 20001905 PARAMETER Experiment Name: At_Drought_Reproduction_P Parameter: Organism Value: A. thaliana
  misc_feature: MA Experiment 20001905 PARAMETER Experiment Name: At_Drought_Reproduction_P Parameter: Plant Line Value: WS
  misc_feature: MA Experiment 20001905 PARAMETER Experiment Name: At_Drought_Reproduction_P Parameter: Timepoint (day) Value: 10
  misc_feature: MA Experiment 20001905 PARAMETER Experiment Name: At_Drought_Reproduction_P Parameter: Tissue Value: Rosettes
  misc_feature: MA Experiment 20001905 PARAMETER Experiment Name: At_Drought_Reproduction_P Parameter: Treatment Value: Drought vs. No Drought
  misc_feature: MA Experiment ID: 20001911 Result: Down-regulated in Transcription
  misc_feature: MA Experiment 20001911 PARAMETER Experiment Name: At_Drought_Reproduction_P Parameter: Age (day) Value: 40
  misc_feature: MA Experiment 20001911 PARAMETER Experiment Name: At_Drought_Reproduction_P Parameter: Organism Value: A. thaliana
  misc_feature: MA Experiment 20001911 PARAMETER Experiment Name: At_Drought_Reproduction_P Parameter: Plant Line Value: WS
  misc_feature: MA Experiment 20001911 PARAMETER Experiment Name: At_Drought_Reproduction_P Parameter: Timepoint (day) Value: 10
  misc_feature: MA Experiment 20001911 PARAMETER Experiment Name: At_Drought_Reproduction_P Parameter: Tissue Value: Flowers
  misc_feature: MA Experiment 20001911 PARAMETER Experiment Name: At_Drought_Reproduction_P Parameter: Treatment Value: Drought vs. No Drought
attattgttatttttgacagagagaaatttctcagttacgcttcatcctcctctaagagatcttttttctatcttgggtagtagagagaaatggcgggtcggggaaaacaacttggatctggtgcagcgaagaagtctacttctcgtagtagcaaggctgggcttcaattccctgttggtcgtatcgctcgatttttgaaagccggtaagtacgccgagcgtgttggtgccggagctccggtctatctcgccgccgttcttgaatacctcgccgctgaggtacttgagcttgctgggaacgcagcgagagacaacaagaagacccgtatagttccacgacacattcagcttgctgtgaggaatgatgaggagctaagcaagttgcttggagatgtgacaattgctaatggaggagtgatgcctaacatccacaatctccttctccccaagaaggctggttcatctaagcctactgaagaagattaggttcattacgaagatagggaaagctggaaactggttgatatcagataatgcttaggattgtttgttttttttgtcatttgcttttcctctgcagcaatggaagctgtgtggttgtactagttgttaaggttacccttgtttcactttatgtgaatatatgaagaaattgttctatttcg

SEQ ID NO: 29862 - protein, 131 aa, Arabidopsis thaliana
  peptide (1)..(131): Ceres Seq. ID no. 13491981
  misc_feature (4)..(121): Pfam Name: Core histone H2A/H2B/H3/H4 Pfam Description: Core histone H2A/H2B/H3/H4
  misc_feature (1)..(131): Homolog of NCBI NO: 7439702 NR Description: histone H2A (clone TH254) - wheat
  misc_feature (1)..(131): Homolog of NCBI NO: 34393263 NR Description: histone H2A [Oryza sativa (japonica
  misc_feature (1)..(125): Homolog of NCBI NO: 34393264 NR Description: putative histone H2A [Oryza sativa (japonica
  misc_feature (1)..(131): Homolog of NCBI NO: 2130105 NR Description: histone H2A.4 - wheat
  misc_feature (1)..(125): Homolog of NCBI NO: 29837243 NR Description: putative histone H2A [Oryza sativa (japonica
  misc_feature (1)..(131): Homolog of NCBI NO: 15232330 NR Description: histone H2A, putative [Arabidopsis thaliana]
  misc_feature (1)..(131): Homolog of NCBI NO: 15223708 NR Description: histone H2A, putative [Arabidopsis thaliana]
  misc_feature (1)..(130): Homolog of NCBI NO: 15239697 NR Description: histone H2A [Arabidopsis thaliana]
  misc_feature (1)..(131): Homolog of NCBI NO: 21617982 NR Description: histone H2A-like protein [Arabidopsis thaliana]
  misc_feature (1)..(131): Homolog of NCBI NO: 15237024 NR Description: histone H2A, putative [Arabidopsis thaliana]
MAGRGKQLGSGAAKKSTSRSSKAGLQFPVGRIARFLKAGKYAERVGAGAPVYLAAVLEYLAAEVLELAGNAARDNKKTRIVPRHIQLAVRNDEELSKLLGDVTIANGGVMPNIHNLLLPKKAGSSKPTEED

SEQ ID NO: 29863 - protein, 65 aa, Arabidopsis thaliana
  peptide (1)..(65): Ceres Seq. ID no. 13491982
LLLFLTERNFSVTLHPPLRDLFSILGSREKWRVGENNLDLVQRRSLLLVVARLGFNSLLVVSLDF

SEQ ID NO: 29864 - DNA, 2799 bp, Arabidopsis thaliana
  misc_feature (1)..(2799): Ceres Seq. ID no. 12329264
  misc_feature: MA Experiment ID: 108561 Result: Up-regulated in Transcription
  misc_feature: MA Experiment 108561 PARAMETER Experiment Name: At_100uM_ABA_cDNA_P Parameter: Timepoint (hr) Value: 6
  misc_feature: MA Experiment 108561 PARAMETER Experiment Name: At_100uM_ABA_cDNA_P Parameter: Tissue Value: Aerial
  misc_feature: MA Experiment 108561 PARAMETER Experiment Name: At_100uM_ABA_cDNA_P Parameter: Treatment Value: 100uM ABA vs. No Treatment
  misc_feature: MA Experiment ID: 108572 Result: Up-regulated in Transcription
  misc_feature: MA Experiment 108572 PARAMETER Experiment Name: At_Drought_cDNA_P Parameter: Timepoint (hr) Value: 1
  misc_feature: MA Experiment 108572 PARAMETER Experiment Name: At_Drought_cDNA_P Parameter: Tissue Value: Aerial
  misc_feature: MA Experiment 108572 PARAMETER Experiment Name: At_Drought_cDNA_P Parameter: Treatment Value: Drought vs. No Drought
  misc_feature: MA Experiment ID: 108573 Result: Up-regulated in Transcription
  misc_feature: MA Experiment 108573 PARAMETER Experiment Name: At_Drought_cDNA_P Parameter: Timepoint (hr) Value: 6
  misc_feature: MA Experiment 108573 PARAMETER Experiment Name: At_Drought_cDNA_P Parameter: Tissue Value: Aerial
  misc_feature: MA Experiment 108573 PARAMETER Experiment Name: At_Drought_cDNA_P Parameter: Treatment Value: Drought vs. No Drought
  misc_feature: MA Experiment ID: 108585 Result: Up-regulated in Transcription
  misc_feature: MA Experiment 108585 PARAMETER Experiment Name: At_5mM_NaNP_cDNA_P Parameter: Timepoint (hr) Value: 6
  misc_feature: MA Experiment 108585 PARAMETER Experiment Name: At_5mM_NaNP_cDNA_P Parameter: Tissue Value: Aerial
  misc_feature: MA Experiment 108585 PARAMETER Experiment Name: At_5mM_NaNP_cDNA_P Parameter: Treatment Value: null
  misc_feature: MA Experiment ID: 108595 Result: Up-regulated in Transcription
  misc_feature: MA Experiment 108595 PARAMETER Experiment Name: At_Ler-pi_Ovule_cDNA_P Parameter: Plant Line Value: null
  misc_feature: MA Experiment ID: 108668 Result: Up-regulated in Transcription
  misc_feature: MA Experiment 108668 PARAMETER Experiment Name: At_2mM_SA_cDNA_P Parameter: Plant Line Value: WS
  misc_feature: MA Experiment 108668 PARAMETER Experiment Name: At_2mM_SA_cDNA_P Parameter: Timepoint (hr) Value: 6
  misc_feature: MA Experiment 108668 PARAMETER Experiment Name: At_2mM_SA_cDNA_P Parameter: Treatment Value: 2mM SA vs. No Treatment
  misc_feature: MA Experiment ID: 20000166 Result: Up-regulated in Transcription
  misc_feature: MA Experiment 20000166 PARAMETER Experiment Name: At_100uM_ABA_P Parameter: Age (day) Value: 14
  misc_feature: MA Experiment 20000166 PARAMETER Experiment Name: At_100uM_ABA_P Parameter: Organism Value: A. thaliana
  misc_feature: MA Experiment 20000166 PARAMETER Experiment Name: At_100uM_ABA_P Parameter: Plant Line Value: WS
  misc_feature: MA Experiment 20000166 PARAMETER Experiment Name: At_100uM_ABA_P Parameter: Timepoint (hr) Value: 1
  misc_feature: MA Experiment 20000166 PARAMETER Experiment Name: At_100uM_ABA_P Parameter: Tissue Value: Aerial
  misc_feature: MA Experiment 20000166 PARAMETER Experiment Name: At_100uM_ABA_P Parameter: Treatment Value: 100uM ABA vs. No Treatment
  misc_feature: MA Experiment ID: 20000169 Result: Up-regulated in Transcription
  misc_feature: MA Experiment 20000169 PARAMETER Experiment Name: At_100uM_ABA_P Parameter: Age (day) Value: 14
  misc_feature: MA Experiment 20000169 PARAMETER Experiment Name: At_100uM_ABA_P Parameter: Organism Value: A. thaliana
  misc_feature: MA Experiment 20000169 PARAMETER Experiment Name: At_100uM_ABA_P Parameter: Plant Line Value: WS
  misc_feature: MA Experiment 20000169 PARAMETER Experiment Name: At_100uM_ABA_P Parameter: Timepoint (hr) Value: 6
  misc_feature: MA Experiment 20000169 PARAMETER Experiment Name: At_100uM_ABA_P Parameter: Tissue Value: Aerial
  misc_feature: MA Experiment 20000169 PARAMETER Experiment Name: At_100uM_ABA_P Parameter: Treatment Value: 100uM ABA vs. No Treatment
  misc_feature: MA Experiment ID: 20000182 Result: Up-regulated in Transcription
  misc_feature: MA Experiment 20000182 PARAMETER Experiment Name: At_2mM_SA_P Parameter: Age (day) Value: 14
  misc_feature: MA Experiment 20000182 PARAMETER Experiment Name: At_2mM_SA_P Parameter: Organism Value: A. thaliana
  misc_feature: MA Experiment 20000182 PARAMETER Experiment Name: At_2mM_SA_P Parameter: Plant Line Value: WS
  misc_feature: MA Experiment 20000182 PARAMETER Experiment Name: At_2mM_SA_P Parameter: Timepoint (hr) Value: 6
  misc_feature: MA Experiment 20000182 PARAMETER Experiment Name: At_2mM_SA_P Parameter: Tissue Value: Aerial
  misc_feature: MA Experiment 20000182 PARAMETER Experiment Name: At_2mM_SA_P Parameter: Treatment Value: 2mM SA vs. No Treatment
  misc_feature: MA Experiment ID: 20000184 Result: Down-regulated in Transcription
  misc_feature: MA Experiment 20000184 PARAMETER Experiment Name: At_Shoots__P Parameter: Age (day) Value: 7
  misc_feature: MA Experiment 20000184 PARAMETER Experiment Name: At_Shoots__P Parameter: Tissue Value: Shoots vs. Whole Plant
  misc_feature: MA Experiment ID: 20000185 Result: Up-regulated in Transcription
  misc_feature: MA Experiment 20000185 PARAMETER Experiment Name: At_Roots__P Parameter: Age (day) Value: 7 vs. 21
  misc_feature: MA Experiment 20000185 PARAMETER Experiment Name: At_Roots__P Parameter: Organism Value: A. thaliana
  misc_feature: MA Experiment 20000185 PARAMETER Experiment Name: At_Roots__P Parameter: Tissue Value: Roots vs. Whole Plant
  misc_feature: MA Experiment ID: 20000234 Result: Down-regulated in Transcription
  misc_feature: MA Experiment 20000234 PARAMETER Experiment Name: At_Siliques_P Parameter: Age (day) Value: 21
  misc_feature: MA Experiment 20000234 PARAMETER Experiment Name: At_Siliques_P Parameter: Organism Value: A. thaliana
  misc_feature: MA Experiment 20000234 PARAMETER Experiment Name: At_Siliques_P Parameter: Plant Line Value: WS
  misc_feature: MA Experiment 20000234 PARAMETER Experiment Name: At_Siliques_P Parameter: Tissue Value: Less Than 5mm Siliques vs. Whole Plant
  misc_feature: MA Experiment ID: 20000235 Result: Down-regulated in Transcription
  misc_feature: MA Experiment 20000235 PARAMETER Experiment Name: At_Siliques_P Parameter: Age (day) Value: 21
  misc_feature: MA Experiment 20000235 PARAMETER Experiment Name: At_Siliques_P Parameter: Organism Value: A. thaliana
  misc_feature: MA Experiment 20000235 PARAMETER Experiment Name: At_Siliques_P Parameter: Plant Line Value: WS
  misc_feature: MA Experiment 20000235 PARAMETER Experiment Name: At_Siliques_P Parameter: Tissue Value: 5-10mm Siliques vs. Whole Plant
  misc_feature: MA Experiment ID: 20000264 Result: Up-regulated in Transcription
  misc_feature: MA Experiment 20000264 PARAMETER Experiment Name: At_Open_Flower_P Parameter: Age (day) Value: 21
  misc_feature: MA Experiment 20000264 PARAMETER Experiment Name: At_Open_Flower_P Parameter: Plant Line Value: WS
  misc_feature: MA Experiment 20000264 PARAMETER Experiment Name: At_Open_Flower_P Parameter: Tissue Value: Open Flower vs. Whole Plant
  misc_feature: MA Experiment ID: 20000267 Result: Up-regulated in Transcription
  misc_feature: MA Experiment 20000267 PARAMETER Experiment Name: At_Drought_P Parameter: Age (day) Value: 7
  misc_feature: MA Experiment 20000267 PARAMETER Experiment Name: At_Drought_P Parameter: Organism Value: A. thaliana
  misc_feature: MA Experiment 20000267 PARAMETER Experiment Name: At_Drought_P Parameter: Plant Line Value: WS
  misc_feature: MA Experiment 20000267 PARAMETER Experiment Name: At_Drought_P Parameter: Timepoint (hr) Value: 6
  misc_feature: MA Experiment 20000267 PARAMETER Experiment Name: At_Drought_P Parameter: Tissue Value: Whole Plant
  misc_feature: MA Experiment 20000267 PARAMETER Experiment Name: At_Drought_P Parameter: Treatment Value: Drought vs. No Drought
  misc_feature: MA Experiment ID: 20000268 Result: Up-regulated in Transcription
  misc_feature: MA Experiment 20000268 PARAMETER Experiment Name: At_100mM_NaCl__P Parameter: Age (day) Value: 14
  misc_feature: MA Experiment 20000268 PARAMETER Experiment Name: At_100mM_NaCl__P Parameter: Organism Value: A. thaliana
  misc_feature: MA Experiment 20000268 PARAMETER Experiment Name: At_100mM_NaCl__P Parameter: Plant Line Value: WS
  misc_feature: MA Experiment 20000268 PARAMETER Experiment Name: At_100mM_NaCl__P Parameter: Timepoint (hr) Value: 6
  misc_feature: MA Experiment 20000268 PARAMETER Experiment Name: At_100mM_NaCl__P Parameter: Tissue Value: Whole Plant
  misc_feature: MA Experiment 20000268 PARAMETER Experiment Name: At_100mM_NaCl__P Parameter: Treatment Value: 100mM NaCl vs. No Treatment
  misc_feature: MA Experiment ID: 20000436 Result: Up-regulated in Transcription
  misc_feature: MA Experiment 20000436 PARAMETER Experiment Name: At_Drought_P Parameter: Age (day) Value: 7
  misc_feature: MA Experiment 20000436 PARAMETER Experiment Name: At_Drought_P Parameter: Organism Value: A. thaliana
  misc_feature: MA Experiment 20000436 PARAMETER Experiment Name: At_Drought_P Parameter: Plant Line Value: WS
  misc_feature: MA Experiment 20000436 PARAMETER Experiment Name: At_Drought_P Parameter: Timepoint (hr) Value: 12
  misc_feature: MA Experiment 20000436 PARAMETER Experiment Name: At_Drought_P Parameter: Tissue Value: Whole Plant
  misc_feature: MA Experiment 20000436 PARAMETER Experiment Name: At_Drought_P Parameter: Treatment Value: Drought vs. No Drought
  misc_feature: MA Experiment ID: 20000437 Result: Up-regulated in Transcription
  misc_feature: MA Experiment 20000437 PARAMETER Experiment Name: At_Drought_P Parameter: Age (day) Value: 8
  misc_feature: MA Experiment 20000437 PARAMETER Experiment Name: At_Drought_P Parameter: Organism Value: A. thaliana
  misc_feature: MA Experiment 20000437 PARAMETER Experiment Name: At_Drought_P Parameter: Plant Line Value: WS
  misc_feature: MA Experiment 20000437 PARAMETER Experiment Name: At_Drought_P Parameter: Timepoint (hr) Value: 24
  misc_feature: MA Experiment 20000437 PARAMETER Experiment Name: At_Drought_P Parameter: Tissue Value: Whole Plant
  misc_feature: MA Experiment 20000437 PARAMETER Experiment Name: At_Drought_P Parameter: Treatment Value: Drought vs. No Drought
  misc_feature: MA Experiment ID: 20000438 Result: Down-regulated in Transcription
  misc_feature: MA Experiment 20000438 PARAMETER Experiment Name: At_Shoots__P Parameter: Age (day) Value: 14
  misc_feature: MA Experiment 20000438 PARAMETER Experiment Name: At_Shoots__P Parameter: Tissue Value: Shoots vs. Whole Plant
  misc_feature: MA Experiment ID: 20000445 Result: Up-regulated in Transcription
  misc_feature: MA Experiment 20000445 PARAMETER Experiment Name: At_100uM_NAA__P Parameter: Age (day) Value: 14
  misc_feature: MA Experiment 20000445 PARAMETER Experiment Name: At_100uM_NAA__P Parameter: Organism Value: A. thaliana
  misc_feature: MA Experiment 20000445 PARAMETER Experiment Name: At_100uM_NAA__P Parameter: Plant Line Value: WS
  misc_feature: MA Experiment 20000445 PARAMETER Experiment Name: At_100uM_NAA__P Parameter: Timepoint (hr) Value: 6
  misc_feature: MA Experiment 20000445 PARAMETER Experiment Name: At_100uM_NAA__P Parameter: Tissue Value: Aerial
  misc_feature: MA Experiment 20000445 PARAMETER Experiment Name: At_100uM_NAA__P Parameter: Treatment Value: 100uM NAA vs. No Treatment
  misc_feature: MA Experiment ID: 20000453 Result: Up-regulated in Transcription
  misc_feature: MA Experiment 20000453 PARAMETER Experiment Name: At_100uM_ABA_P Parameter: Age (day) Value: 15
  misc_feature: MA Experiment 20000453 PARAMETER Experiment Name: At_100uM_ABA_P Parameter: Organism Value: A. thaliana
  misc_feature: MA Experiment 20000453 PARAMETER Experiment Name: At_100uM_ABA_P Parameter: Plant Line Value: WS
  misc_feature: MA Experiment 20000453 PARAMETER Experiment Name: At_100uM_ABA_P Parameter: Timepoint (hr) Value: 24
  misc_feature: MA Experiment 20000453 PARAMETER Experiment Name: At_100uM_ABA_P Parameter: Tissue Value: Aerial
  misc_feature: MA Experiment 20000453 PARAMETER Experiment Name: At_100uM_ABA_P Parameter: Treatment Value: 100uM ABA vs. No Treatment
  misc_feature: MA Experiment ID: 20000527 Result: Down-regulated in Transcription
  misc_feature: MA Experiment 20000527 PARAMETER Experiment Name: At_10percent_PEG_P Parameter: Age (day) Value: 20
  misc_feature: MA Experiment 20000527 PARAMETER Experiment Name: At_10percent_PEG_P Parameter: Organism Value: A. thaliana
  misc_feature: MA Experiment 20000527 PARAMETER Experiment Name: At_10percent_PEG_P Parameter: Plant Line Value: WS
  misc_feature: MA Experiment 20000527 PARAMETER Experiment Name: At_10percent_PEG_P Parameter: Timepoint (day) Value: 20
  misc_feature: MA Experiment 20000527 PARAMETER Experiment Name: At_10percent_PEG_P Parameter: Tissue Value: Whole Plant
  misc_feature: MA Experiment 20000527 PARAMETER Experiment Name: At_10percent_PEG_P Parameter: Treatment Value: 10percent PEG vs. No Treatment
  misc_feature: MA Experiment ID: 20000794 Result: Up-regulated in Transcription
  misc_feature: MA Experiment 20000794 PARAMETER Experiment Name: At_Petals_P Parameter: Age (day) Value: 23-25 days
  misc_feature: MA Experiment 20000794 PARAMETER Experiment Name: At_Petals_P Parameter: Plant Line Value: WS
  misc_feature: MA Experiment 20000794 PARAMETER Experiment Name: At_Petals_P Parameter: Tissue Value: Petals vs. Whole plant
  misc_feature: MA Experiment ID: 20001757 Result: Down-regulated in Transcription
  misc_feature: MA Experiment 20001757 PARAMETER Experiment Name: At_50mM_NH4NO3_L-to-H_P Parameter: Timepoint (hr) Value: 6
  misc_feature: MA Experiment 20001757 PARAMETER Experiment Name: At_50mM_NH4NO3_L-to-H_P Parameter: Tissue Value: Leaf
  misc_feature: MA Experiment 20001757 PARAMETER Experiment Name: At_50mM_NH4NO3_L-to-H_P Parameter: Treatment Value: 50mM NH4NO3 vs 100mM Mannitol
  misc_feature: MA Experiment ID: 20001904 Result: Up-regulated in Transcription
  misc_feature: MA Experiment 20001904 PARAMETER Experiment Name: At_Drought_Reproduction_P Parameter: Age (day) Value: 37
  misc_feature: MA Experiment 20001904 PARAMETER Experiment Name: At_Drought_Reproduction_P Parameter: Organism Value: A. thaliana
  misc_feature: MA Experiment 20001904 PARAMETER Experiment Name: At_Drought_Reproduction_P Parameter: Plant Line Value: WS
  misc_feature: MA Experiment 20001904 PARAMETER Experiment Name: At_Drought_Reproduction_P Parameter: Timepoint (day) Value: 7
  misc_feature: MA Experiment 20001904 PARAMETER Experiment Name: At_Drought_Reproduction_P Parameter: Tissue Value: Rosettes
  misc_feature: MA Experiment 20001904 PARAMETER Experiment Name: At_Drought_Reproduction_P Parameter: Treatment Value: Drought vs. No Drought
  misc_feature: MA Experiment ID: 20001906 Result: Up-regulated in Transcription
  misc_feature: MA Experiment 20001906 PARAMETER Experiment Name: At_Drought_Reproduction_P Parameter: Age (day) Value: 35
  misc_feature: MA Experiment 20001906 PARAMETER Experiment Name: At_Drought_Reproduction_P Parameter: Organism Value: A. thaliana
  misc_feature: MA Experiment 20001906 PARAMETER Experiment Name: At_Drought_Reproduction_P Parameter: Plant Line Value: WS
  misc_feature: MA Experiment 20001906 PARAMETER Experiment Name: At_Drought_Reproduction_P Parameter: Timepoint (day) Value: 5
  misc_feature: MA Experiment 20001906 PARAMETER Experiment Name: At_Drought_Reproduction_P Parameter: Tissue Value: Siliques
  misc_feature: MA Experiment 20001906 PARAMETER Experiment Name: At_Drought_Reproduction_P Parameter: Treatment Value: Drought vs. No Drought
  misc_feature: MA Experiment ID: 20001908 Result: Up-regulated in Transcription
  misc_feature: MA Experiment 20001908 PARAMETER Experiment Name: At_Drought_Reproduction_P Parameter: Age (day) Value: 40
  misc_feature: MA Experiment 20001908 PARAMETER Experiment Name: At_Drought_Reproduction_P Parameter: Organism Value: A. thaliana
  misc_feature: MA Experiment 20001908 PARAMETER Experiment Name: At_Drought_Reproduction_P Parameter: Plant Line Value: WS
  misc_feature: MA Experiment 20001908 PARAMETER Experiment Name: At_Drought_Reproduction_P Parameter: Timepoint (day) Value: 10
  misc_feature: MA Experiment 20001908 PARAMETER Experiment Name: At_Drought_Reproduction_P Parameter: Tissue Value: Siliques
  misc_feature: MA Experiment 20001908 PARAMETER Experiment Name: At_Drought_Reproduction_P Parameter: Treatment Value: Drought vs. No Drought
ggagatcacaaagcaatctaaaaacatttctcttgatctttttcctttaccaaaaaacaaagatcctttcttctgtttcgtaatgatggctagaaacgttctagtaagcggtggtgctggatacatcggtagtcacacggtgcttcaacttcttctcggtggttactccgtcgtagttgttgataatctcgataattcctccgccgtctctcttcaacgtgtgaagaaactcgcggctgaacacggagaacgcctctccttccaccaggtggatcttcgagacaggtctgctcttgagaagatattctcagaaacaaagtttgatgcagtgatacattttgctggacttaaagcagttggtgagagtgtagagaagcctttgctttattataataataatcttgttggtactattactcttttggaagttatggctcaacatggctgcaaaaatcttgtgttttcatcatcagcaactgtgtatggctctccaaaagaagttccttgtacagaggagtttccaatttctgctttgaacccatatggacgaacaaagctattcattgaggaaatctgccgcgatgtatacggttctgacccggaatggaagattatattgcttaggtatttcaatcctgttggtgcacatcctagtggtgacattggtgaagaccctcgtggtattccaaacaatctcatgccctttgtacaacaagtggctgttggtaggagacctcatctcactgtctttggaaatgattacaatacaaaagatggaacaggggttcgagattacattcatgttattgatttagctgatggacacatagcggctctacgtaagctagaagattgcaagatcggttgtgaagtgtacaatctcggaacaggaaatggaacatcagttcttgaaatggttgatgcttttgaaaaagcatccggaaagaaaatccctctggtgatcgcgggacgtcgaccgggagatgctgaagttgtatacgcctcgacggaaagagcagaaagtgaattgaattggaaggccaaatatgggattgaggagatgtgtagagatttgtggaactgggctagtaataatccttatggatatgattcctcttctgaagacaactctcattaacttttcttaatcgttttcttcttttgctaaaacatatttctccacactaaattattatagtatccgcaagaaaaaacaacaacaataaagagtcagattttagggaaatatagggacattatgtattattattacaatcaatacttagtctgtaattgatttggatatgttcttgtataatcaaaaaagatttgttatgaatagctacaacgcaaatgtttagctctatacggcaaaaagtaccttgaggttgacacgacgtcgttttcagctcggtgatagttgaaatgtatctttctgaagcttttaagttcaagagcccacacacttcttctcattctttataaacataacactggacagtaaccaaacttcagatctgaatcaacctcttaagtggtacagaagaagagaaaggaatgatgattagtgaaagagatgattttagtctcactggaccattacacttaacatctatagattgggctaatgaacatcatcgacgatccgtagctggatctttggttcaaggaatctatgtagctgagcgtgaccgtcagctacaaagagaaggtcctgagttagctttatctccaatatggtctgagtttttccatttccgcctcattcgtaagtttgtcgatgacgcggataactctatcttcggaggaatctatgagtacaaactgccgcaacagctctctcaaaccgtcaaatcaatggaatttagtccacgttttgtgattgctttcagaggaacggttacaaaagtggactccatttcccgtgacatcgagcatgacatccatgttattagaaacgggcttcacacgacaacacggtttgagatagctatccaagcagtgagaaacattgttgcttcggttggtggttctagtgtttggcttgctggtcattctcttggtgcatctatggcattacttaccgggaaaaccatcgctagaaccgggttttttcctgagtgtttcgcattcaatccgccgtttttgtctgcccctatcgaaaaaattaaggataagaggattaaacatgggatacgcattgcaggcagtgtgatcacagctggacttgctctagccaaaaaagccacccaacactacagccaaaacgaccgtgcattacccgcacctcctgatccatttgaagctttatccgactggttcccgcggctgtatgtcaaccctggtgaccacttatgctcagagtatgttggttactttgagcaccgaaacaagatggaagaaatcgggattgggtttgtagagcgggtagcgacgcagcactcgttgggcggtatgctgttaggaggacaagagccggtacatctgattccatcttcggttttgacggtgaacttaagctcctcgagagatttcaaacaagctcatgggattcatcagtggtggagggaagataacaagtttgagactaaagtttaccagtacaaatgatttgtatcagtttttttttaaatggatttaaccggtattaggcttttactttccggtttagacggttcaatgtatcgcaatcataaataagtgtctctctatagtcggtatatataaaccggaaataggcgtctacgttctaatttagccggttcaatgtgttgtaatcttatatatagtctcttgatc

SEQ ID NO: 29865 - protein, 378 aa, Arabidopsis thaliana
  peptide (1)..(378): Ceres Seq. ID no. 12329265
  misc_feature (33)..(366): Pfam Name: NAD dependent epimerase/dehydratase family Pfam Description: NAD dependent epimerase/dehydratase family
  misc_feature (33)..(366): Pfam Name: NAD dependent epimerase/dehydratase family Pfam Description: NAD dependent epimerase/dehydratase family
  misc_feature (3)..(369): Homolog of NCBI NO: 9965188 NR Description: UDP-glucose 4-epimerase [Moraxella catarrhalis]
  misc_feature (29)..(373): Homolog of NCBI NO: 30186144 NR Description: Unknown (protein for MGC:53114) [Xenopus laevis]
  misc_feature (27)..(369): Homolog of NCBI NO: 11386762 NR Description: UDP-glucose 4-epimerase (Galactowaldenase)
  misc_feature (29)..(372): Homolog of NCBI NO: 15217653 NR Description: UDP-galactose 4-epimerase, putative; protein id:
  misc_feature (28)..(378): Homolog of NCBI NO: 11386775 NR Description: UDP-glucose 4-epimerase GEPI48 (Galactowaldenase)
  misc_feature (3)..(369): Homolog of NCBI NO: 9965188 NR Description: UDP-glucose 4-epimerase [Moraxella catarrhalis]
  misc_feature (27)..(369): Homolog of NCBI NO: 11386762 NR Description: UDP-glucose 4-epimerase (Galactowaldenase)
  misc_feature (28)..(378): Homolog of NCBI NO: 11386775 NR Description: UDP-glucose 4-epimerase GEPI48 (Galactowaldenase)
  misc_feature (28)..(378): Homolog of NCBI NO: 15236988 NR Description: UDP-galactose 4-epimerase - like protein
  misc_feature (29)..(378): Homolog of NCBI NO: 12643850 NR Description: Probable UDP-glucose 4-epimerase At4g10960
  misc_feature (29)..(378): Homolog of NCBI NO: 21553659 NR Description: UDP-galactose 4-epimerase-like protein
  misc_feature (29)..(377): Homolog of NCBI NO: 15236663 NR Description: UDPglucose 4-epimerase - like protein
  misc_feature (29)..(377): Homolog of NCBI NO: 21536846 NR Description: UDPglucose 4-epimerase-like protein [Arabidopsis
  misc_feature (29)..(372): Homolog of NCBI NO: 15217653 NR Description: UDP-galactose 4-epimerase, putative; protein id:
  misc_feature (29)..(373): Homolog of NCBI NO: 30186144 NR Description: Unknown (protein for MGC:53114) [Xenopus laevis]
  misc_feature (29)..(377): Homolog of NCBI NO: 21536846 NR Description: UDPglucose 4-epimerase-like protein [Arabidopsis
  misc_feature (29)..(377): Homolog of NCBI NO: 15236663 NR Description: UDPglucose 4-epimerase - like protein
  misc_feature (29)..(378): Homolog of NCBI NO: 21553659 NR Description: UDP-galactose 4-epimerase-like protein
  misc_feature (29)..(378): Homolog of NCBI NO: 12643850 NR Description: Probable UDP-glucose 4-epimerase At4g10960
  misc_feature (28)..(378): Homolog of NCBI NO: 15236988 NR Description: UDP-galactose 4-epimerase - like protein
EITKQSKNISLDLFPLPKNKDPFFCFVMMARNVLVSGGAGYIGSHTVLQLLLGGYSVVVVDNLDNSSAVSLQRVKKLAAEHGERLSFHQVDLRDRSALEKIFSETKFDAVIHFAGLKAVGESVEKPLLYYNNNLVGTITLLEVMAQHGCKNLVFSSSATVYGSPKEVPCTEEFPISALNPYGRTKLFIEEICRDVYGSDPEWKIILLRYFNPVGAHPSGDIGEDPRGIPNNLMPFVQQVAVGRRPHLTVFGNDYNTKDGTGVRDYIHVIDLADGHIAALRKLEDCKIGCEVYNLGTGNGTSVLEMVDAFEKASGKKIPLVIAGRRPGDAEVVYASTERAESELNWKAKYGIEEMCRDLWNWASNNPYGYDSSSEDNSH

SEQ ID NO: 29866 - protein, 351 aa, Arabidopsis thaliana
  peptide (1)..(351): Ceres Seq. ID no. 12329266
  misc_feature (6)..(339): Pfam Name: NAD dependent epimerase/dehydratase family Pfam Description: NAD dependent epimerase/dehydratase family
  misc_feature (6)..(339): Pfam Name: NAD dependent epimerase/dehydratase family Pfam Description: NAD dependent epimerase/dehydratase family
  misc_feature (1)..(342): Homolog of NCBI NO: 9965188 NR Description: UDP-glucose 4-epimerase [Moraxella catarrhalis]
  misc_feature (2)..(346): Homolog of NCBI NO: 30186144 NR Description: Unknown (protein for MGC:53114) [Xenopus laevis]
  misc_feature (1)..(342): Homolog of NCBI NO: 11386762 NR Description: UDP-glucose 4-epimerase (Galactowaldenase)
  misc_feature (2)..(345): Homolog of NCBI NO: 15217653 NR Description: UDP-galactose 4-epimerase, putative; protein id:
  misc_feature (1)..(351): Homolog of NCBI NO: 11386775 NR Description: UDP-glucose 4-epimerase GEPI48 (Galactowaldenase)
  misc_feature (1)..(342): Homolog of NCBI NO: 9965188 NR Description: UDP-glucose 4-epimerase [Moraxella catarrhalis]
  misc_feature (1)..(342): Homolog of NCBI NO: 11386762 NR Description: UDP-glucose 4-epimerase (Galactowaldenase)
  misc_feature (1)..(351): Homolog of NCBI NO: 11386775 NR Description: UDP-glucose 4-epimerase GEPI48 (Galactowaldenase)
  misc_feature (1)..(351): Homolog of NCBI NO: 15236988 NR Description: UDP-galactose 4-epimerase - like protein
  misc_feature (2)..(351): Homolog of NCBI NO: 12643850 NR Description: Probable UDP-glucose 4-epimerase At4g10960
  misc_feature (2)..(351): Homolog of NCBI NO: 21553659 NR Description: UDP-galactose 4-epimerase-like protein
  misc_feature (2)..(350): Homolog of NCBI NO: 15236663 NR Description: UDPglucose 4-epimerase - like protein
  misc_feature (2)..(350): Homolog of NCBI NO: 21536846 NR Description: UDPglucose 4-epimerase-like protein [Arabidopsis
  misc_feature (2)..(345): Homolog of NCBI NO: 15217653 NR Description: UDP-galactose 4-epimerase, putative; protein id:
  misc_feature (2)..(346): Homolog of NCBI NO: 30186144 NR Description: Unknown (protein for MGC:53114) [Xenopus laevis]
  misc_feature (2)..(350): Homolog of NCBI NO: 21536846 NR Description: UDPglucose 4-epimerase-like protein [Arabidopsis
  misc_feature (2)..(350): Homolog of NCBI NO: 15236663 NR Description: UDPglucose 4-epimerase - like protein
  misc_feature (2)..(351): Homolog of NCBI NO: 21553659 NR Description: UDP-galactose 4-epimerase-like protein
  misc_feature (2)..(351): Homolog of NCBI NO: 12643850 NR Description: Probable UDP-glucose 4-epimerase At4g10960
  misc_feature (1)..(351): Homolog of NCBI NO: 15236988 NR Description: UDP-galactose 4-epimerase - like protein
MMARNVLVSGGAGYIGSHTVLQLLLGGYSVVVVDNLDNSSAVSLQRVKKLAAEHGERLSFHQVDLRDRSALEKIFSETKFDAVIHFAGLKAVGESVEKPLLYYNNNLVGTITLLEVMAQHGCKNLVFSSSATVYGSPKEVPCTEEFPISALNPYGRTKLFIEEICRDVYGSDPEWKIILLRYFNPVGAHPSGDIGEDPRGIPNNLMPFVQQVAVGRRPHLTVFGNDYNTKDGTGVRDYIHVIDLADGHIAALRKLEDCKIGCEVYNLGTGNGTSVLEMVDAFEKASGKKIPLVIAGRRPGDAEVVYASTERAESELNWKAKYGIEEMCRDLWNWASNNPYGYDSSSEDNSH

SEQ ID NO: 29867 - protein, 350 aa, Arabidopsis thaliana
  peptide (1)..(350): Ceres Seq. ID no. 12329267
  misc_feature (5)..(338): Pfam Name: NAD dependent epimerase/dehydratase family Pfam Description: NAD dependent epimerase/dehydratase family
  misc_feature (5)..(338): Pfam Name: NAD dependent epimerase/dehydratase family Pfam Description: NAD dependent epimerase/dehydratase family
  misc_feature (1)..(341): Homolog of NCBI NO: 9965188 NR Description: UDP-glucose 4-epimerase [Moraxella catarrhalis]
  misc_feature (1)..(345): Homolog of NCBI NO: 30186144 NR Description: Unknown (protein for MGC:53114) [Xenopus laevis]
  misc_feature (1)..(341): Homolog of NCBI NO: 11386762 NR Description: UDP-glucose 4-epimerase (Galactowaldenase)
  misc_feature (1)..(344): Homolog of NCBI NO: 15217653 NR Description: UDP-galactose 4-epimerase, putative; protein id:
  misc_feature (1)..(350): Homolog of NCBI NO: 11386775 NR Description: UDP-glucose 4-epimerase GEPI48 (Galactowaldenase)
  misc_feature (1)..(341): Homolog of NCBI NO: 9965188 NR Description: UDP-glucose 4-epimerase [Moraxella catarrhalis]
  misc_feature (1)..(341): Homolog of NCBI NO: 11386762 NR Description: UDP-glucose 4-epimerase (Galactowaldenase)
  misc_feature (1)..(350): Homolog of NCBI NO: 11386775 NR Description: UDP-glucose 4-epimerase GEPI48 (Galactowaldenase)
  misc_feature (1)..(350): Homolog of NCBI NO: 15236988 NR Description: UDP-galactose 4-epimerase - like protein
  misc_feature (1)..(350): Homolog of NCBI NO: 12643850 NR Description: Probable UDP-glucose 4-epimerase At4g10960
  misc_feature (1)..(350): Homolog of NCBI NO: 21553659 NR Description: UDP-galactose 4-epimerase-like protein
  misc_feature (1)..(349): Homolog of NCBI NO: 15236663 NR Description: UDPglucose 4-epimerase - like protein
  misc_feature (1)..(349): Homolog of NCBI NO: 21536846 NR Description: UDPglucose 4-epimerase-like protein [Arabidopsis
  misc_feature (1)..(344): Homolog of NCBI NO: 15217653 NR Description: UDP-galactose 4-epimerase, putative; protein id:
  misc_feature (1)..(345): Homolog of NCBI NO: 30186144 NR Description: Unknown (protein for MGC:53114) [Xenopus laevis]
  misc_feature (1)..(349): Homolog of NCBI NO: 21536846 NR Description: UDPglucose 4-epimerase-like protein [Arabidopsis
  misc_feature (1)..(349): Homolog of NCBI NO: 15236663 NR Description: UDPglucose 4-epimerase - like protein
  misc_feature (1)..(350): Homolog of NCBI NO: 21553659 NR Description: UDP-galactose 4-epimerase-like protein
  misc_feature (1)..(350): Homolog of NCBI NO: 12643850 NR Description: Probable UDP-glucose 4-epimerase At4g10960
  misc_feature (1)..(350): Homolog of NCBI NO: 15236988 NR Description: UDP-galactose 4-epimerase - like protein
MARNVLVSGGAGYIGSHTVLQLLLGGYSVVVVDNLDNSSAVSLQRVKKLAAEHGERLSFHQVDLRDRSALEKIFSETKFDAVIHFAGLKAVGESVEKPLLYYNNNLVGTITLLEVMAQHGCKNLVFSSSATVYGSPKEVPCTEEFPISALNPYGRTKLFIEEICRDVYGSDPEWKIILLRYFNPVGAHPSGDIGEDPRGIPNNLMPFVQQVAVGRRPHLTVFGNDYNTKDGTGVRDYIHVIDLADGHIAALRKLEDCKIGCEVYNLGTGNGTSVLEMVDAFEKASGKKIPLVIAGRRPGDAEVVYASTERAESELNWKAKYGIEEMCRDLWNWASNNPYGYDSSSEDNSH

SEQ ID NO: 29868 - DNA, 1144 bp, Arabidopsis thaliana
  misc_feature (1)..(1144): Ceres Seq. ID no. 13490483
  misc_feature: MA Experiment ID: 108434 Result: Up-regulated in Transcription
  misc_feature: MA Experiment 108434 PARAMETER Experiment Name: At_Root_Tips_cDNA_P Parameter: Tissue Value: Root Tips
  misc_feature: MA Experiment ID: 108435 Result: Down-regulated in Transcription
  misc_feature: MA Experiment 108435 PARAMETER Experiment Name: At_stm_Mutants_cDNA_P Parameter: Plant Line Value: wt Landsburg vs stm
  misc_feature: MA Experiment 108435 PARAMETER Experiment Name: At_stm_Mutants_cDNA_P Parameter: Tissue Value: Shoot Apical Meristem Region
  misc_feature: MA Experiment ID: 108461 Result: Up-regulated in Transcription
  misc_feature: MA Experiment 108461 PARAMETER Experiment Name: At_Germinating_Seeds_cDNA_P Parameter: Age (day) Value: 1 vs. 0
  misc_feature: MA Experiment 108461 PARAMETER Experiment Name: At_Germinating_Seeds_cDNA_P Parameter: Tissue Value: Germinating Seeds
  misc_feature: MA Experiment ID: 108462 Result: Up-regulated in Transcription
  misc_feature: MA Experiment 108462 PARAMETER Experiment Name: At_Germinating_Seeds_cDNA_P Parameter: Age (day) Value: 2 vs. 0
  misc_feature: MA Experiment 108462 PARAMETER Experiment Name: At_Germinating_Seeds_cDNA_P Parameter: Tissue Value: Germinating Seeds
  misc_feature: MA Experiment ID: 108595 Result: Down-regulated in Transcription
  misc_feature: MA Experiment 108595 PARAMETER Experiment Name: At_Ler-pi_Ovule_cDNA_P Parameter: Plant Line Value: null
  misc_feature: MA Experiment ID: 20000070 Result: Down-regulated in Transcription
  misc_feature: MA Experiment 20000070 PARAMETER Experiment Name: At_100uM_ABA_Mutants_cDNA_P Parameter: Plant Line Value: CS24
  misc_feature: MA Experiment 20000070 PARAMETER Experiment Name: At_100uM_ABA_Mutants_cDNA_P Parameter: Timepoint (hr) Value: 6
  misc_feature: MA Experiment 20000070 PARAMETER Experiment Name: At_100uM_ABA_Mutants_cDNA_P Parameter: Tissue Value: Aerial
  misc_feature: MA Experiment 20000070 PARAMETER Experiment Name: At_100uM_ABA_Mutants_cDNA_P Parameter: Treatment Value: 100uM ABA vs. No Treatment
  misc_feature: MA Experiment ID: 20000087 Result: Down-regulated in Transcription
  misc_feature: MA Experiment 20000087 PARAMETER Experiment Name: At_100uM_ABA_Mutants_cDNA_P Parameter: Plant Line Value: WS
  misc_feature: MA Experiment 20000087 PARAMETER Experiment Name: At_100uM_ABA_Mutants_cDNA_P Parameter: Timepoint (hr) Value: 6
  misc_feature: MA Experiment 20000087 PARAMETER Experiment Name: At_100uM_ABA_Mutants_cDNA_P Parameter: Tissue Value: Aerial
  misc_feature: MA Experiment 20000087 PARAMETER Experiment Name: At_100uM_ABA_Mutants_cDNA_P Parameter: Treatment Value: 100uM ABA vs. No Treatment
  misc_feature: MA Experiment ID: 20000088 Result: Down-regulated in Transcription
  misc_feature: MA Experiment 20000088 PARAMETER Experiment Name: At_100uM_ABA_Mutants_cDNA_P Parameter: Plant Line Value: Landsberg
  misc_feature: MA Experiment 20000088 PARAMETER Experiment Name: At_100uM_ABA_Mutants_cDNA_P Parameter: Timepoint (hr) Value: 6
  misc_feature: MA Experiment 20000088 PARAMETER Experiment Name: At_100uM_ABA_Mutants_cDNA_P Parameter: Tissue Value: Aerial
  misc_feature: MA Experiment 20000088 PARAMETER Experiment Name: At_100uM_ABA_Mutants_cDNA_P Parameter: Treatment Value: 100uM ABA vs. No Treatment
  misc_feature: MA Experiment ID: 20000113 Result: Up-regulated in Transcription
  misc_feature: MA Experiment 20000113 PARAMETER Experiment Name: At_42deg_Heat_cDNA_P Parameter: Temperature (deg C) Value: 42 vs. 22
  misc_feature: MA Experiment 20000113 PARAMETER Experiment Name: At_42deg_Heat_cDNA_P Parameter: Timepoint (hr) Value: 8
  misc_feature: MA Experiment 20000113 PARAMETER Experiment Name: At_42deg_Heat_cDNA_P Parameter: Tissue Value: Aerial
  misc_feature: MA Experiment ID: 20000117 Result: Down-regulated in Transcription
  misc_feature: MA Experiment 20000117 PARAMETER Experiment Name: At_100uM_ABA_Mutants_cDNA_P Parameter: Plant Line Value: Columbia
  misc_feature: MA Experiment 20000117 PARAMETER Experiment Name: At_100uM_ABA_Mutants_cDNA_P Parameter: Timepoint (hr) Value: 6
  misc_feature: MA Experiment 20000117 PARAMETER Experiment Name: At_100uM_ABA_Mutants_cDNA_P Parameter: Tissue Value: Aerial
  misc_feature: MA Experiment 20000117 PARAMETER Experiment Name: At_100uM_ABA_Mutants_cDNA_P Parameter: Treatment Value: 100uM ABA vs. No Treatment
  misc_feature: MA Experiment ID: 20000179 Result: Up-regulated in Transcription
  misc_feature: MA Experiment 20000179 PARAMETER Experiment Name: At_Germinating_Seeds_P Parameter: Age (hr) Value: 6 vs. 0
  misc_feature: MA Experiment 20000179 PARAMETER Experiment Name: At_Germinating_Seeds_P Parameter: Tissue Value: Germinating Seeds
  misc_feature: MA Experiment ID: 20000180 Result: Up-regulated in Transcription
  misc_feature: MA Experiment 20000180 PARAMETER Experiment Name: At_Germinating_Seeds_P Parameter: Age (hr) Value: 24 vs. 0
  misc_feature: MA Experiment 20000180 PARAMETER Experiment Name: At_Germinating_Seeds_P Parameter: Tissue Value: Germinating Seeds
  misc_feature: MA Experiment ID: 20000185 Result: Down-regulated in Transcription
  misc_feature: MA Experiment 20000185 PARAMETER Experiment Name: At_Roots__P Parameter: Age (day) Value: 7 vs. 21
  misc_feature: MA Experiment 20000185 PARAMETER Experiment Name: At_Roots__P Parameter: Organism Value: A. thaliana
  misc_feature: MA Experiment 20000185 PARAMETER Experiment Name: At_Roots__P Parameter: Tissue Value: Roots vs. Whole Plant
  misc_feature: MA Experiment ID: 20000437 Result: Down-regulated in Transcription
  misc_feature: MA Experiment 20000437 PARAMETER Experiment Name: At_Drought_P Parameter: Age (day) Value: 8
  misc_feature: MA Experiment 20000437 PARAMETER Experiment Name: At_Drought_P Parameter: Organism Value: A. thaliana
  misc_feature: MA Experiment 20000437 PARAMETER Experiment Name: At_Drought_P Parameter: Plant Line Value: WS
  misc_feature: MA Experiment 20000437 PARAMETER Experiment Name: At_Drought_P Parameter: Timepoint (hr) Value: 24
  misc_feature: MA Experiment 20000437 PARAMETER Experiment Name: At_Drought_P Parameter: Tissue Value: Whole Plant
  misc_feature: MA Experiment 20000437 PARAMETER Experiment Name: At_Drought_P Parameter: Treatment Value: Drought vs. No Drought
  misc_feature: MA Experiment ID: 20000438 Result: Up-regulated in Transcription
  misc_feature: MA Experiment 20000438 PARAMETER Experiment Name: At_Shoots__P Parameter: Age (day) Value: 14
  misc_feature: MA Experiment 20000438 PARAMETER Experiment Name: At_Shoots__P Parameter: Tissue Value: Shoots vs. Whole Plant
  misc_feature: MA Experiment ID: 20000439 Result: Down-regulated in Transcription
  misc_feature: MA Experiment 20000439 PARAMETER Experiment Name: At_Roots__P Parameter: Age (day) Value: 14 vs. 21
  misc_feature: MA Experiment 20000439 PARAMETER Experiment Name: At_Roots__P Parameter: Organism Value: A. thaliana
  misc_feature: MA Experiment 20000439 PARAMETER Experiment Name: At_Roots__P Parameter: Tissue Value: Roots vs. Whole Plant
  misc_feature: MA Experiment ID: 20000794 Result: Down-regulated in Transcription
  misc_feature: MA Experiment 20000794 PARAMETER Experiment Name: At_Petals_P Parameter: Age (day) Value: 23-25 days
  misc_feature: MA Experiment 20000794 PARAMETER Experiment Name: At_Petals_P Parameter: Plant Line Value: WS
  misc_feature: MA Experiment 20000794 PARAMETER Experiment Name: At_Petals_P Parameter: Tissue Value: Petals vs. Whole plant
  misc_feature: MA Experiment ID: 20001248 Result: Down-regulated in Transcription
  misc_feature: MA Experiment 20001248 PARAMETER Experiment Name: At_Far-red-induction_P Parameter: Age (day) Value: 7
  misc_feature: MA Experiment 20001248 PARAMETER Experiment Name: At_Far-red-induction_P Parameter: Light Value: Far-red vs. White
  misc_feature: MA Experiment 20001248 PARAMETER Experiment Name: At_Far-red-induction_P Parameter: Organism Value: A. thaliana
  misc_feature: MA Experiment 20001248 PARAMETER Experiment Name: At_Far-red-induction_P Parameter: Plant Line Value: Columbia
  misc_feature: MA Experiment 20001248 PARAMETER Experiment Name: At_Far-red-induction_P Parameter: Timepoint (hr) Value: 4
  misc_feature: MA Experiment 20001248 PARAMETER Experiment Name: At_Far-red-induction_P Parameter: Tissue Value: Whole Plant
  misc_feature: MA Experiment ID: 20001450 Result: Down-regulated in Transcription
  misc_feature: MA Experiment 20001450 PARAMETER Experiment Name: At_Far-red-induction_P Parameter: Age (day) Value: 7
  misc_feature: MA Experiment 20001450 PARAMETER Experiment Name: At_Far-red-induction_P Parameter: Light Value: Far-red vs. White
  misc_feature: MA Experiment 20001450 PARAMETER Experiment Name: At_Far-red-induction_P Parameter: Organism Value: A. thaliana
  misc_feature: MA Experiment 20001450 PARAMETER Experiment Name: At_Far-red-induction_P Parameter: Plant Line Value: Columbia
  misc_feature: MA Experiment 20001450 PARAMETER Experiment Name: At_Far-red-induction_P Parameter: Timepoint (hr) Value: 8
  misc_feature: MA Experiment 20001450 PARAMETER Experiment Name: At_Far-red-induction_P Parameter: Tissue Value: Whole Plant
  misc_feature: MA Experiment ID: 20001451 Result: Down-regulated in Transcription
  misc_feature: MA Experiment 20001451 PARAMETER Experiment Name: At_Far-red-induction_P Parameter: Age (day) Value: 7
  misc_feature: MA Experiment 20001451 PARAMETER Experiment Name: At_Far-red-induction_P Parameter: Light Value: Far-red vs. White
  misc_feature: MA Experiment 20001451 PARAMETER Experiment Name: At_Far-red-induction_P Parameter: Organism Value: A. thaliana
  misc_feature: MA Experiment 20001451 PARAMETER Experiment Name: At_Far-red-induction_P Parameter: Plant Line Value: Columbia
  misc_feature: MA Experiment 20001451 PARAMETER Experiment Name: At_Far-red-induction_P Parameter: Timepoint (hr) Value: 24
  misc_feature: MA Experiment 20001451 PARAMETER Experiment Name: At_Far-red-induction_P Parameter: Tissue Value: Whole Plant
  misc_feature: MA Experiment ID: 20001557 Result: Down-regulated in Transcription
  misc_feature: MA Experiment 20001557 PARAMETER Experiment Name: At_Drought_Soil_Dry_P Parameter: Age (day) Value: 27
  misc_feature: MA Experiment 20001557 PARAMETER Experiment Name: At_Drought_Soil_Dry_P Parameter: Organism Value: A. thaliana
  misc_feature: MA Experiment 20001557 PARAMETER Experiment Name: At_Drought_Soil_Dry_P Parameter: Plant Line Value: WS
  misc_feature: MA Experiment 20001557 PARAMETER Experiment Name: At_Drought_Soil_Dry_P Parameter: Post Timepoint (hr) Value: 3
  misc_feature: MA Experiment 20001557 PARAMETER Experiment Name: At_Drought_Soil_Dry_P Parameter: Post-Treatment Value: Re-Water vs. No Drought
  misc_feature: MA Experiment 20001557 PARAMETER Experiment Name: At_Drought_Soil_Dry_P Parameter: Timepoint (day) Value: 13
  misc_feature: MA Experiment 20001557 PARAMETER Experiment Name: At_Drought_Soil_Dry_P Parameter: Treatment Value: Drought vs. No Drought
  misc_feature: MA Experiment ID: 20001559 Result: Down-regulated in Transcription
  misc_feature: MA Experiment 20001559 PARAMETER Experiment Name: At_Drought_Soil_Dry_P Parameter: Age (day) Value: 28
  misc_feature: MA Experiment 20001559 PARAMETER Experiment Name: At_Drought_Soil_Dry_P Parameter: Organism Value: A. thaliana
  misc_feature: MA Experiment 20001559 PARAMETER Experiment Name: At_Drought_Soil_Dry_P Parameter: Plant Line Value: WS
  misc_feature: MA Experiment 20001559 PARAMETER Experiment Name: At_Drought_Soil_Dry_P Parameter: Post Timepoint (hr) Value: 29
  misc_feature: MA Experiment 20001559 PARAMETER Experiment Name: At_Drought_Soil_Dry_P Parameter: Post-Treatment Value: Re-Water vs. No Drought
  misc_feature: MA Experiment 20001559 PARAMETER Experiment Name: At_Drought_Soil_Dry_P Parameter: Timepoint (day) Value: 14
  misc_feature: MA Experiment 20001559 PARAMETER Experiment Name: At_Drought_Soil_Dry_P Parameter: Treatment Value: Drought vs. No Drought
  misc_feature: MA Experiment ID: 20001757 Result: Up-regulated in Transcription
  misc_feature: MA Experiment 20001757 PARAMETER Experiment Name: At_50mM_NH4NO3_L-to-H_P Parameter: Timepoint (hr) Value: 6
  misc_feature: MA Experiment 20001757 PARAMETER Experiment Name: At_50mM_NH4NO3_L-to-H_P Parameter: Tissue Value: Leaf
  misc_feature: MA Experiment 20001757 PARAMETER Experiment Name: At_50mM_NH4NO3_L-to-H_P Parameter: Treatment Value: 50mM NH4NO3 vs 100mM Mannitol
agctatttggtttctctatccgattcgtctctctcacgccctcacgtttatccacctcatcctcaaaccaaaccacaagacctcttttttaagtaaccaatcacagagagatagagagagagaacagagtcaatgtcaatggcgtctatagcttcttcttcttccaccaccctactctcttcctctagggttcttcttccctccaagtcttctcttttatctcctaccgtctctttccccagaatcataccctcttcctcggcatcatcctcttctctctgttccgggttctccagtctcggttccctcaccaccaaccgctccgcctcacgccggaacttcgccgtcaaggctcaggctgatgatttaccactggtcggtaataaggcgcctgattttgaagctgaggcagtttttgatcaagagttcataaaggtgaagctctctgagtacattggcaaaaagtatgttattctattcttctaccctttggacttcacttttgtctgccccactgagattactgccttcagtgaccgttatgaagaatttgagaagctaaacaccgaagtattaggggtctctgtcgacagtgtgttctcgcatcttgcgtgggtccaaacagacagaaagtcgggagggctcggtgatctgaattatcctcttgtttcggatatcactaaatccatttcaaaatcgtttggagtgctcatccctgatcagggcattgcactgagagggcttttcatcatagacaaggaaggagtcattcagcattccaccatcaacaacctcggtattggccgaagtgttgatgagacaatgagaaccctccaggcattacagtatgttcaagaaaacccggatgaagtgtgccctgcgggatggaagccaggggagaaatcaatgaaacctgaccccaagctcagcaaagaatacttttcagctatctagaggctaagattgaacacatgtttggtgaaaattagcaatcagagttgttttattcgtcttttcaaagttggagcagagttgttatttttagccaaagaacctttgtatctatctcatctttctcctgtttctgctatgtgattctccttaaattgaatcaaaaataaagaaatccttcttttcttttgcc

SEQ ID NO: 29869 - protein, 273 aa, Arabidopsis thaliana
  peptide (1)..(273): Ceres Seq. ID no. 13490484
  misc_feature (82)..(233): Pfam Name: AhpC/TSA family Pfam Description: AhpC/TSA family
  misc_feature (3)..(273): Homolog of NCBI NO: 1498198 NR Description: 2-Cys peroxiredoxin bas1 [Arabidopsis thaliana]
  misc_feature (3)..(273): Homolog of NCBI NO: 7242491 NR Description: 2-Cys peroxiredoxin [Arabidopsis thaliana]
  misc_feature (3)..(273): Homolog of NCBI NO: 3121825 NR Description: 2-cys peroxiredoxin BAS1, chloroplast precursor
  misc_feature (3)..(273): Homolog of NCBI NO: 21592588 NR Description: putative 2-cys peroxiredoxin BAS1 precursor
  misc_feature (3)..(273): Homolog of NCBI NO: 15229806 NR Description: 2-cys peroxiredoxin BAS1 precursor
  misc_feature (3)..(273): Homolog of NCBI NO: 11119229 NR Description: 2-Cys peroxiredoxin [Brassica napus]
  misc_feature (3)..(273): Homolog of NCBI NO: 21553667 NR Description: 2-cys peroxiredoxin-like protein [Arabidopsis
  misc_feature (3)..(273): Homolog of NCBI NO: 13265490 NR Description: AT5g06290 [Arabidopsis thaliana]
  misc_feature (3)..(273): Homolog of NCBI NO: 9758409 NR Description: 2-cys peroxiredoxin-like protein [Arabidopsis
  misc_feature (1)..(273): Homolog of NCBI NO: 18415155 NR Description: 2-cys peroxiredoxin-related protein [Arabidopsis
MSMASIASSSSTTLLSSSRVLLPSKSSLLSPTVSFPRIIPSSSASSSSLCSGFSSLGSLTTNRSASRRNFAVKAQADDLPLVGNKAPDFEAEAVFDQEFIKVKLSEYIGKKYVILFFYPLDFTFVCPTEITAFSDRYEEFEKLNTEVLGVSVDSVFSHLAWVQTDRKSGGLGDLNYPLVSDITKSISKSFGVLIPDQGIALRGLFIIDKEGVIQHSTINNLGIGRSVDETMRTLQALQYVQENPDEVCPAGWKPGEKSMKPDPKLSKEYFSAI

SEQ ID NO: 29870 - protein, 271 aa, Arabidopsis thaliana
  peptide (1)..(271): Ceres Seq. ID no. 13490485
  misc_feature (80)..(231): Pfam Name: AhpC/TSA family Pfam Description: AhpC/TSA family
  misc_feature (1)..(271): Homolog of NCBI NO: 1498198 NR Description: 2-Cys peroxiredoxin bas1 [Arabidopsis thaliana]
  misc_feature (1)..(271): Homolog of NCBI NO: 7242491 NR Description: 2-Cys peroxiredoxin [Arabidopsis thaliana]
  misc_feature (1)..(271): Homolog of NCBI NO: 3121825 NR Description: 2-cys peroxiredoxin BAS1, chloroplast precursor
  misc_feature (1)..(271): Homolog of NCBI NO: 21592588 NR Description: putative 2-cys peroxiredoxin BAS1 precursor
  misc_feature (1)..(271): Homolog of NCBI NO: 15229806 NR Description: 2-cys peroxiredoxin BAS1 precursor
  misc_feature (1)..(271): Homolog of NCBI NO: 11119229 NR Description: 2-Cys peroxiredoxin [Brassica napus]
  misc_feature (1)..(271): Homolog of NCBI NO: 21553667 NR Description: 2-cys peroxiredoxin-like protein [Arabidopsis
  misc_feature (1)..(271): Homolog of NCBI NO: 13265490 NR Description: AT5g06290 [Arabidopsis thaliana]
  misc_feature (1)..(271): Homolog of NCBI NO: 9758409 NR Description: 2-cys peroxiredoxin-like protein [Arabidopsis
  misc_feature (1)..(271): Homolog of NCBI NO: 18415155 NR Description: 2-cys peroxiredoxin-related protein [Arabidopsis
MASIASSSSTTLLSSSRVLLPSKSSLLSPTVSFPRIIPSSSASSSSLCSGFSSLGSLTTNRSASRRNFAVKAQADDLPLVGNKAPDFEAEAVFDQEFIKVKLSEYIGKKYVILFFYPLDFTFVCPTEITAFSDRYEEFEKLNTEVLGVSVDSVFSHLAWVQTDRKSGGLGDLNYPLVSDITKSISKSFGVLIPDQGIALRGLFIIDKEGVIQHSTINNLGIGRSVDETMRTLQALQYVQENPDEVCPAGWKPGEKSMKPDPKLSKEYFSAI

SEQ ID NO: 29871 - DNA, 1235 bp, Arabidopsis thaliana
  misc_feature (1)..(1235): Ceres Seq. ID no. 13490486
  misc_feature: MA Experiment ID: 108434 Result: Down-regulated in Transcription
  misc_feature: MA Experiment 108434 PARAMETER Experiment Name: At_Root_Tips_cDNA_P Parameter: Tissue Value: Root Tips
  misc_feature: MA Experiment ID: 108579 Result: Up-regulated in Transcription
  misc_feature: MA Experiment 108579 PARAMETER Experiment Name: At_4deg_Cold_cDNA_P Parameter: Temperature (deg C) Value: 4 vs. 22
  misc_feature: MA Experiment 108579 PARAMETER Experiment Name: At_4deg_Cold_cDNA_P Parameter: Timepoint (hr) Value: 6
  misc_feature: MA Experiment 108579 PARAMETER Experiment Name: At_4deg_Cold_cDNA_P Parameter: Tissue Value: Aerial
  misc_feature: MA Experiment ID: 108585 Result: Up-regulated in Transcription
  misc_feature: MA Experiment 108585 PARAMETER Experiment Name: At_5mM_NaNP_cDNA_P Parameter: Timepoint (hr) Value: 6
  misc_feature: MA Experiment 108585 PARAMETER Experiment Name: At_5mM_NaNP_cDNA_P Parameter: Tissue Value: Aerial
  misc_feature: MA Experiment 108585 PARAMETER Experiment Name: At_5mM_NaNP_cDNA_P Parameter: Treatment Value: null
  misc_feature: MA Experiment ID: 20000173 Result: Down-regulated in Transcription
  misc_feature: MA Experiment 20000173 PARAMETER Experiment Name: At_42deg_Heat_P Parameter: Age (day) Value: 14
  misc_feature: MA Experiment 20000173 PARAMETER Experiment Name: At_42deg_Heat_P Parameter: Organism Value: A. thaliana
  misc_feature: MA Experiment 20000173 PARAMETER Experiment Name: At_42deg_Heat_P Parameter: Plant Line Value: WS
  misc_feature: MA Experiment 20000173 PARAMETER Experiment Name: At_42deg_Heat_P Parameter: Temperature (deg C) Value: 42 vs. 22
  misc_feature: MA Experiment 20000173 PARAMETER Experiment Name: At_42deg_Heat_P Parameter: Timepoint (hr) Value: 6
  misc_feature: MA Experiment 20000173 PARAMETER Experiment Name: At_42deg_Heat_P Parameter: Tissue Value: Aerial
  misc_feature: MA Experiment ID: 20000184 Result: Down-regulated in Transcription
  misc_feature: MA Experiment 20000184 PARAMETER Experiment Name: At_Shoots__P Parameter: Age (day) Value: 7
  misc_feature: MA Experiment 20000184 PARAMETER Experiment Name: At_Shoots__P Parameter: Tissue Value: Shoots vs. Whole Plant
  misc_feature: MA Experiment ID: 20000437 Result: Up-regulated in Transcription
  misc_feature: MA Experiment 20000437 PARAMETER Experiment Name: At_Drought_P Parameter: Age (day) Value: 8
  misc_feature: MA Experiment 20000437 PARAMETER Experiment Name: At_Drought_P Parameter: Organism Value: A. thaliana
  misc_feature: MA Experiment 20000437 PARAMETER Experiment Name: At_Drought_P Parameter: Plant Line Value: WS
  misc_feature: MA Experiment 20000437 PARAMETER Experiment Name: At_Drought_P Parameter: Timepoint (hr) Value: 24
  misc_feature: MA Experiment 20000437 PARAMETER Experiment Name: At_Drought_P Parameter: Tissue Value: Whole Plant
  misc_feature: MA Experiment 20000437 PARAMETER Experiment Name: At_Drought_P Parameter: Treatment Value: Drought vs. No Drought
gaaaaaaaaaatccaatttagaaaaccgcgcgttggagggaaagccatagaaaactaaaagataacaaacattttaacaaacccaaacccaaaaattctcaaggaggccgaagaagaagaagaagaaatgagcgttaatggtgagaacaaggtctcaggaggagatagttcatcttcagatcgacctgttagagtctacgccgatgggatcttcgatttgttccatttcggccacgctcgtgccatcgaacaagccaaaaaatcgtttccgaatacgtatctgcttgttggatgttgcaatgacgaaattacgaacaaattcaaggggaaaactgtgatgactgaatctgagcgatacgaatctcttcgacattgcaagtgggttgatgaagtgattccagatgcaccatgggttcttacaacagagtttcttgataagcataagatagattacgtagctcacgatgctcttccctatgcggatactagtggagctggaaatgatgtttatgagtttgtaaagtcgattgggaagtttaaggagactaaacgaacagaggggatatcgacatctgatataatcatgagaatagtgaaagattataaccagtatgtgttgcgtaatctggaccgaggttattcaagagaagaactcggtgtcagcttcgttaaggagaagaggcttagagtgaatatgagattgaagaaactacaagagaaagttaaagaacaacaagaaaagatacaaaccgtagcaaaaactgctgggatgcaccatgatgagtggcttgaaaatgctgatcgttgggtggctggatttcttgaaatgtttgaggaaggttgtcataaaatgggaacagccatcagagatgggattcagcaacggctaatgaggcaagaatcggaagagaaccggcgattgcttcaaaatggactgacgatttccaaagacaatgacgatgaacaaatgtctgatgacaacgagtttgcagaagaagactgcgtcaatgtgagcaacaaagggattgaaacagtaaagaaatgagagattttgggtcatggttgaagtatttccagatacagaaccaaaatctactagatttcaccagtaatggtattaggcttgtttattcaactgtacatcaaactctgtttcaaaatctctacttgtgtctaaaactcaaatgcatcagaaatcaaaagcagtcatggatatatctatgatcaaacactcc

SEQ ID NO: 29872 - protein, 305 aa, Arabidopsis thaliana
  peptide (1)..(305): Ceres Seq. ID no. 13490487
  misc_feature (17)..(241): Homolog of NCBI NO: 3153239 NR Description: CTP:phosphocholine cytidylyltransferase b [Homo
  misc_feature (17)..(289): Homolog of NCBI NO: 7488791 NR Description: choline-phosphate cytidylyltransferase (EC
  misc_feature (14)..(291): Homolog of NCBI NO: 15225218 NR Description: cholinephosphate cytidylyltransferase
  misc_feature (14)..(291): Homolog of NCBI NO: 7488484 NR Description: probable choline-phosphate cytidylyltransferase
  misc_feature (1)..(291): Homolog of NCBI NO: 7488483 NR Description: probable choline-phosphate cytidylyltransferase
  misc_feature (4)..(294): Homolog of NCBI NO: 7488485 NR Description: probable choline-phosphate cytidylyltransferase
  misc_feature (4)..(294): Homolog of NCBI NO: 7488446 NR Description: choline-phosphate cytidylyltransferase (EC
  misc_feature (1)..(290): Homolog of NCBI NO: 25288640 NR Description: probable phosphocholine cytidylyltransferase
  misc_feature (1)..(290): Homolog of NCBI NO: 30683147 NR Description: cholinephosphate cytidylyltransferase
  misc_feature (1)..(305): Homolog of NCBI NO: 21668498 NR Description: CTP:phosphorylcholine cytidylyltransferase
MSVNGENKVSGGDSSSSDRPVRVYADGIFDLFHFGHARAIEQAKKSFPNTYLLVGCCNDEITNKFKGKTVMTESERYESLRHCKWVDEVIPDAPWVLTTEFLDKHKIDYVAHDALPYADTSGAGNDVYEFVKSIGKFKETKRTEGISTSDIIMRIVKDYNQYVLRNLDRGYSREELGVSFVKEKRLRVNMRLKKLQEKVKEQQEKIQTVAKTAGMHHDEWLENADRWVAGFLEMFEEGCHKMGTAIRDGIQQRLMRQESEENRRLLQNGLTISKDNDDEQMSDDNEFAEEDCVNVSNKGIETVKK

SEQ ID NO: 29873 - protein, 235 aa, Arabidopsis thaliana
  peptide (1)..(235): Ceres Seq. ID no. 13490488
  misc_feature (1)..(171): Homolog of NCBI NO: 3153239 NR Description: CTP:phosphocholine cytidylyltransferase b [Homo
  misc_feature (1)..(219): Homolog of NCBI NO: 7488791 NR Description: choline-phosphate cytidylyltransferase (EC
  misc_feature (1)..(221): Homolog of NCBI NO: 15225218 NR Description: cholinephosphate cytidylyltransferase
  misc_feature (1)..(221): Homolog of NCBI NO: 7488484 NR Description: probable choline-phosphate cytidylyltransferase
  misc_feature (1)..(221): Homolog of NCBI NO: 7488483 NR Description: probable choline-phosphate cytidylyltransferase
  misc_feature (1)..(224): Homolog of NCBI NO: 7488485 NR Description: probable choline-phosphate cytidylyltransferase
  misc_feature (1)..(224): Homolog of NCBI NO: 7488446 NR Description: choline-phosphate cytidylyltransferase (EC
  misc_feature (1)..(220): Homolog of NCBI NO: 25288640 NR Description: probable phosphocholine cytidylyltransferase
  misc_feature (1)..(220): Homolog of NCBI NO: 30683147 NR Description: cholinephosphate cytidylyltransferase
  misc_feature (1)..(235): Homolog of NCBI NO: 21668498 NR Description: CTP:phosphorylcholine cytidylyltransferase
MTESERYESLRHCKWVDEVIPDAPWVLTTEFLDKHKIDYVAHDALPYADTSGAGNDVYEFVKSIGKFKETKRTEGISTSDIIMRIVKDYNQYVLRNLDRGYSREELGVSFVKEKRLRVNMRLKKLQEKVKEQQEKIQTVAKTAGMHHDEWLENADRWVAGFLEMFEEGCHKMGTAIRDGIQQRLMRQESEENRRLLQNGLTISKDNDDEQMSDDNEFAEEDCVNVSNKGIETVKK

SEQ ID NO: 29874 - protein, 153 aa, Arabidopsis thaliana
  peptide (1)..(153): Ceres Seq. ID no. 13490489
  misc_feature (1)..(89): Homolog of NCBI NO: 3153239 NR Description: CTP:phosphocholine cytidylyltransferase b [Homo
  misc_feature (1)..(137): Homolog of NCBI NO: 7488791 NR Description: choline-phosphate cytidylyltransferase (EC
  misc_feature (1)..(139): Homolog of NCBI NO: 15225218 NR Description: cholinephosphate cytidylyltransferase
  misc_feature (1)..(139): Homolog of NCBI NO: 7488484 NR Description: probable choline-phosphate cytidylyltransferase
  misc_feature (1)..(139): Homolog of NCBI NO: 7488483 NR Description: probable choline-phosphate cytidylyltransferase
  misc_feature (1)..(142): Homolog of NCBI NO: 7488485 NR Description: probable choline-phosphate cytidylyltransferase
  misc_feature (1)..(142): Homolog of NCBI NO: 7488446 NR Description: choline-phosphate cytidylyltransferase (EC
  misc_feature (1)..(138): Homolog of NCBI NO: 25288640 NR Description: probable phosphocholine cytidylyltransferase
  misc_feature (1)..(138): Homolog of NCBI NO: 30683147 NR Description: cholinephosphate cytidylyltransferase
  misc_feature (1)..(153): Homolog of NCBI NO: 21668498 NR Description: CTP:phosphorylcholine cytidylyltransferase
MRIVKDYNQYVLRNLDRGYSREELGVSFVKEKRLRVNMRLKKLQEKVKEQQEKIQTVAKTAGMHHDEWLENADRWVAGFLEMFEEGCHKMGTAIRDGIQQRLMRQESEENRRLLQNGLTISKDNDDEQMSDDNEFAEEDCVNVSNKGIETVKK

SEQ ID NO: 29875 - DNA, 1654 bp, Arabidopsis thaliana
  misc_feature (1)..(1654): Ceres Seq. ID no. 12422368
  misc_feature: MA Experiment ID: 108435 Result: Down-regulated in Transcription
  misc_feature: MA Experiment 108435 PARAMETER Experiment Name: At_stm_Mutants_cDNA_P Parameter: Plant Line Value: wt Landsburg vs stm
  misc_feature: MA Experiment 108435 PARAMETER Experiment Name: At_stm_Mutants_cDNA_P Parameter: Tissue Value: Shoot Apical Meristem Region
  misc_feature: MA Experiment ID: 108461 Result: Down-regulated in Transcription
  misc_feature: MA Experiment 108461 PARAMETER Experiment Name: At_Germinating_Seeds_cDNA_P Parameter: Age (day) Value: 1 vs. 0
  misc_feature: MA Experiment 108461 PARAMETER Experiment Name: At_Germinating_Seeds_cDNA_P Parameter: Tissue Value: Germinating Seeds
  misc_feature: MA Experiment ID: 108462 Result: Down-regulated in Transcription
  misc_feature: MA Experiment 108462 PARAMETER Experiment Name: At_Germinating_Seeds_cDNA_P Parameter: Age (day) Value: 2 vs. 0
  misc_feature: MA Experiment 108462 PARAMETER Experiment Name: At_Germinating_Seeds_cDNA_P Parameter: Tissue Value: Germinating Seeds
  misc_feature: MA Experiment ID: 108464 Result: Down-regulated in Transcription
  misc_feature: MA Experiment 108464 PARAMETER Experiment Name: At_Germinating_Seeds_cDNA_P Parameter: Age (day) Value: 4 vs. 0
  misc_feature: MA Experiment 108464 PARAMETER Experiment Name: At_Germinating_Seeds_cDNA_P Parameter: Tissue Value: Germinating Seeds
  misc_feature: MA Experiment ID: 108569 Result: Up-regulated in Transcription
  misc_feature: MA Experiment 108569 PARAMETER Experiment Name: At_0.001%_MeJA__cDNA_P Parameter: Timepoint (hr) Value: 6
  misc_feature: MA Experiment 108569 PARAMETER Experiment Name: At_0.001%_MeJA__cDNA_P Parameter: Tissue Value: Aerial
  misc_feature: MA Experiment 108569 PARAMETER Experiment Name: At_0.001%_MeJA__cDNA_P Parameter: Treatment Value: 0.001% MeJA vs. No Treatment
  misc_feature: MA Experiment ID: 108573 Result: Up-regulated in Transcription
  misc_feature: MA Experiment 108573 PARAMETER Experiment Name: At_Drought_cDNA_P Parameter: Timepoint (hr) Value: 6
  misc_feature: MA Experiment 108573 PARAMETER Experiment Name: At_Drought_cDNA_P Parameter: Tissue Value: Aerial
  misc_feature: MA Experiment 108573 PARAMETER Experiment Name: At_Drought_cDNA_P Parameter: Treatment Value: Drought vs. No Drought
  misc_feature: MA Experiment ID: 108574 Result: Up-regulated in Transcription
  misc_feature: MA Experiment 108574 PARAMETER Experiment Name: At_Wounding__cDNA_P Parameter: Timepoint (hr) Value: 1
  misc_feature: MA Experiment 108574 PARAMETER Experiment Name: At_Wounding__cDNA_P Parameter: Tissue Value: Aerial
  misc_feature: MA Experiment 108574 PARAMETER Experiment Name: At_Wounding__cDNA_P Parameter: Treatment Value: Wounding vs. No Wounding
  misc_feature: MA Experiment ID: 108577 Result: Down-regulated in Transcription
  misc_feature: MA Experiment 108577 PARAMETER Experiment Name: At_42deg_Heat_cDNA_P Parameter: Temperature (deg C) Value: 42 vs. 22
  misc_feature: MA Experiment 108577 PARAMETER Experiment Name: At_42deg_Heat_cDNA_P Parameter: Timepoint (hr) Value: 6
  misc_feature: MA Experiment 108577 PARAMETER Experiment Name: At_42deg_Heat_cDNA_P Parameter: Tissue Value: Aerial
  misc_feature: MA Experiment ID: 108579 Result: Up-regulated in Transcription
  misc_feature: MA Experiment 108579 PARAMETER Experiment Name: At_4deg_Cold_cDNA_P Parameter: Temperature (deg C) Value: 4 vs. 22
  misc_feature: MA Experiment 108579 PARAMETER Experiment Name: At_4deg_Cold_cDNA_P Parameter: Timepoint (hr) Value: 6
  misc_feature: MA Experiment 108579 PARAMETER Experiment Name: At_4deg_Cold_cDNA_P Parameter: Tissue Value: Aerial
  misc_feature: MA Experiment ID: 108585 Result: Up-regulated in Transcription
  misc_feature: MA Experiment 108585 PARAMETER Experiment Name: At_5mM_NaNP_cDNA_P Parameter: Timepoint (hr) Value: 6
  misc_feature: MA Experiment 108585 PARAMETER Experiment Name: At_5mM_NaNP_cDNA_P Parameter: Tissue Value: Aerial
  misc_feature: MA Experiment 108585 PARAMETER Experiment Name: At_5mM_NaNP_cDNA_P Parameter: Treatment Value: null
  misc_feature: MA Experiment ID: 108594 Result: Down-regulated in Transcription
  misc_feature: MA Experiment 108594 PARAMETER Experiment Name: At_Ler-rhl_Root_cDNA_P Parameter: Plant Line Value: null
  misc_feature: MA Experiment ID: 108595 Result: Up-regulated in Transcription
  misc_feature: MA Experiment 108595 PARAMETER Experiment Name: At_Ler-pi_Ovule_cDNA_P Parameter: Plant Line Value: null
  misc_feature: MA Experiment ID: 108608 Result: Up-regulated in Transcription
  misc_feature: MA Experiment 108608 PARAMETER Experiment Name: At_100uM_ABA_cDNA_P Parameter: Timepoint (hr) Value: 1
  misc_feature: MA Experiment 108608 PARAMETER Experiment Name: At_100uM_ABA_cDNA_P Parameter: Tissue Value: Aerial
  misc_feature: MA Experiment 108608 PARAMETER Experiment Name: At_100uM_ABA_cDNA_P Parameter: Treatment Value: 100uM ABA vs. No Treatment
  misc_feature: MA Experiment ID: 20000030 Result: Down-regulated in Transcription
  misc_feature: MA Experiment 20000030 PARAMETER Experiment Name: At_CS6630_Roots_cDNA_P Parameter: Plant Line Value: CS6630 vs. WS
  misc_feature: MA Experiment 20000030 PARAMETER Experiment Name: At_CS6630_Roots_cDNA_P Parameter: Tissue Value: Roots
  misc_feature: MA Experiment ID: 20000069 Result: Up-regulated in Transcription
  misc_feature: MA Experiment 20000069 PARAMETER Experiment Name: At_100uM_ABA_Mutants_cDNA_P Parameter: Plant Line Value: CS23
  misc_feature: MA Experiment 20000069 PARAMETER Experiment Name: At_100uM_ABA_Mutants_cDNA_P Parameter: Timepoint (hr) Value: 6
  misc_feature: MA Experiment 20000069 PARAMETER Experiment Name: At_100uM_ABA_Mutants_cDNA_P Parameter: Tissue Value: Aerial
  misc_feature: MA Experiment 20000069 PARAMETER Experiment Name: At_100uM_ABA_Mutants_cDNA_P Parameter: Treatment Value: 100uM ABA vs. No Treatment
  misc_feature: MA Experiment ID: 20000070 Result: Up-regulated in Transcription
  misc_feature: MA Experiment 20000070 PARAMETER Experiment Name: At_100uM_ABA_Mutants_cDNA_P Parameter: Plant Line Value: CS24
  misc_feature: MA Experiment 20000070 PARAMETER Experiment Name: At_100uM_ABA_Mutants_cDNA_P Parameter: Timepoint (hr) Value: 6
  misc_feature: MA Experiment 20000070 PARAMETER Experiment Name: At_100uM_ABA_Mutants_cDNA_P Parameter: Tissue Value: Aerial
  misc_feature: MA Experiment 20000070 PARAMETER Experiment Name: At_100uM_ABA_Mutants_cDNA_P Parameter: Treatment Value: 100uM ABA vs. No Treatment
  misc_feature: MA Experiment ID: 20000071 Result: Up-regulated in Transcription
  misc_feature: MA Experiment 20000071 PARAMETER Experiment Name: At_100uM_ABA_Mutants_cDNA_P Parameter: Plant Line Value: CS8104
  misc_feature: MA Experiment 20000071 PARAMETER Experiment Name: At_100uM_ABA_Mutants_cDNA_P Parameter: Timepoint (hr) Value: 6
  misc_feature: MA Experiment 20000071 PARAMETER Experiment Name: At_100uM_ABA_Mutants_cDNA_P Parameter: Tissue Value: Aerial
  misc_feature: MA Experiment 20000071 PARAMETER Experiment Name: At_100uM_ABA_Mutants_cDNA_P Parameter: Treatment Value: 100uM ABA vs. No Treatment
  misc_feature: MA Experiment ID: 20000086 Result: Up-regulated in Transcription
  misc_feature: MA Experiment 20000086 PARAMETER Experiment Name: At_100uM_ABA_Mutants_cDNA_P Parameter: Plant Line Value: CS22
  misc_feature: MA Experiment 20000086 PARAMETER Experiment Name: At_100uM_ABA_Mutants_cDNA_P Parameter: Timepoint (hr) Value: 6
  misc_feature: MA Experiment 20000086 PARAMETER Experiment Name: At_100uM_ABA_Mutants_cDNA_P Parameter: Tissue Value: Aerial
  misc_feature: MA Experiment 20000086 PARAMETER Experiment Name: At_100uM_ABA_Mutants_cDNA_P Parameter: Treatment Value: 100uM ABA vs. No Treatment
  misc_feature: MA Experiment ID: 20000088 Result: Up-regulated in Transcription
  misc_feature: MA Experiment 20000088 PARAMETER Experiment Name: At_100uM_ABA_Mutants_cDNA_P Parameter: Plant Line Value: Landsberg
  misc_feature: MA Experiment 20000088 PARAMETER Experiment Name: At_100uM_ABA_Mutants_cDNA_P Parameter: Timepoint (hr) Value: 6
  misc_feature: MA Experiment 20000088 PARAMETER Experiment Name: At_100uM_ABA_Mutants_cDNA_P Parameter: Tissue Value: Aerial
  misc_feature: MA Experiment 20000088 PARAMETER Experiment Name: At_100uM_ABA_Mutants_cDNA_P Parameter: Treatment Value: 100uM ABA vs. No Treatment
  misc_feature: MA Experiment ID: 20000089 Result: Up-regulated in Transcription
  misc_feature: MA Experiment ID: 20000090 Result: Up-regulated in Transcription
  misc_feature: MA Experiment ID: 20000112 Result: Down-regulated in Transcription
  misc_feature: MA Experiment 20000112 PARAMETER Experiment Name: At_42deg_Heat_cDNA_P Parameter: Temperature (deg C) Value: 42 vs. 22
  misc_feature: MA Experiment 20000112 PARAMETER Experiment Name: At_42deg_Heat_cDNA_P Parameter: Timepoint (hr) Value: 2
  misc_feature: MA Experiment 20000112 PARAMETER Experiment Name: At_42deg_Heat_cDNA_P Parameter: Tissue Value: Aerial
  misc_feature: MA Experiment ID: 20000117 Result: Up-regulated in Transcription
  misc_feature: MA Experiment 20000117 PARAMETER Experiment Name: At_100uM_ABA_Mutants_cDNA_P Parameter: Plant Line Value: Columbia
  misc_feature: MA Experiment 20000117 PARAMETER Experiment Name: At_100uM_ABA_Mutants_cDNA_P Parameter: Timepoint (hr) Value: 6
  misc_feature: MA Experiment 20000117 PARAMETER Experiment Name: At_100uM_ABA_Mutants_cDNA_P Parameter: Tissue Value: Aerial
  misc_feature: MA Experiment 20000117 PARAMETER Experiment Name: At_100uM_ABA_Mutants_cDNA_P Parameter: Treatment Value: 100uM ABA vs. No Treatment
  misc_feature: MA Experiment ID: 20000144 Result: Down-regulated in Transcription
  misc_feature: MA Experiment 20000144 PARAMETER Experiment Name: At_42deg_Heat_cDNA_P Parameter: Temperature (deg C) Value: 42 vs. 22
  misc_feature: MA Experiment 20000144 PARAMETER Experiment Name: At_42deg_Heat_cDNA_P Parameter: Timepoint (hr) Value: 1
  misc_feature: MA Experiment 20000144 PARAMETER Experiment Name: At_42deg_Heat_cDNA_P Parameter: Tissue Value: Aerial
  misc_feature: MA Experiment ID: 20000166 Result: Up-regulated in Transcription
  misc_feature: MA Experiment 20000166 PARAMETER Experiment Name: At_100uM_ABA_P Parameter: Age (day) Value: 14
  misc_feature: MA Experiment 20000166 PARAMETER Experiment Name: At_100uM_ABA_P Parameter: Organism Value: A. thaliana
  misc_feature: MA Experiment 20000166 PARAMETER Experiment Name: At_100uM_ABA_P Parameter: Plant Line Value: WS
  misc_feature: MA Experiment 20000166 PARAMETER Experiment Name: At_100uM_ABA_P Parameter: Timepoint (hr) Value: 1
  misc_feature: MA Experiment 20000166 PARAMETER Experiment Name: At_100uM_ABA_P Parameter: Tissue Value: Aerial
  misc_feature: MA Experiment 20000166 PARAMETER Experiment Name: At_100uM_ABA_P Parameter: Treatment Value: 100uM ABA vs. No Treatment
  misc_feature: MA Experiment ID: 20000171 Result: Down-regulated in Transcription
  misc_feature: MA Experiment 20000171 PARAMETER Experiment Name: At_42deg_Heat_P Parameter: Age (day) Value: 14
  misc_feature: MA Experiment 20000171 PARAMETER Experiment Name: At_42deg_Heat_P Parameter: Organism Value: A. thaliana
  misc_feature: MA Experiment 20000171 PARAMETER Experiment Name: At_42deg_Heat_P Parameter: Plant Line Value: WS
  misc_feature: MA Experiment 20000171 PARAMETER Experiment Name: At_42deg_Heat_P Parameter: Temperature (deg C) Value: 42 vs. 22
  misc_feature: MA Experiment 20000171 PARAMETER Experiment Name: At_42deg_Heat_P Parameter: Timepoint (hr) Value: 1
  misc_feature: MA Experiment 20000171 PARAMETER Experiment Name: At_42deg_Heat_P Parameter: Tissue Value: Aerial
  misc_feature: MA Experiment ID: 20000173 Result: Down-regulated in Transcription
  misc_feature: MA Experiment 20000173 PARAMETER Experiment Name: At_42deg_Heat_P Parameter: Age (day) Value: 14
  misc_feature: MA Experiment 20000173 PARAMETER Experiment Name: At_42deg_Heat_P Parameter: Organism Value: A. thaliana
  misc_feature: MA Experiment 20000173 PARAMETER Experiment Name: At_42deg_Heat_P Parameter: Plant Line Value: WS
  misc_feature: MA Experiment 20000173 PARAMETER Experiment Name: At_42deg_Heat_P Parameter: Temperature (deg C) Value: 42 vs. 22
  misc_feature: MA Experiment 20000173 PARAMETER Experiment Name: At_42deg_Heat_P Parameter: Timepoint (hr) Value: 6
  misc_feature: MA Experiment 20000173 PARAMETER Experiment Name: At_42deg_Heat_P Parameter: Tissue Value: Aerial
  misc_feature: MA Experiment ID: 20000180 Result: Down-regulated in Transcription
  misc_feature: MA Experiment 20000180 PARAMETER Experiment Name: At_Germinating_Seeds_P Parameter: Age (hr) Value: 24 vs. 0
  misc_feature: MA Experiment 20000180 PARAMETER Experiment Name: At_Germinating_Seeds_P Parameter: Tissue Value: Germinating Seeds
  misc_feature: MA Experiment ID: 20000184 Result: Down-regulated in Transcription
  misc_feature: MA Experiment 20000184 PARAMETER Experiment Name: At_Shoots__P Parameter: Age (day) Value: 7
  misc_feature: MA Experiment 20000184 PARAMETER Experiment Name: At_Shoots__P Parameter: Tissue Value: Shoots vs. Whole Plant
  misc_feature: MA Experiment ID: 20000185 Result: Down-regulated in Transcription
  misc_feature: MA Experiment 20000185 PARAMETER Experiment Name: At_Roots__P Parameter: Age (day) Value: 7 vs. 21
  misc_feature: MA Experiment 20000185 PARAMETER Experiment Name: At_Roots__P Parameter: Organism Value: A. thaliana
  misc_feature: MA Experiment 20000185 PARAMETER Experiment Name: At_Roots__P Parameter: Tissue Value: Roots vs. Whole Plant
  misc_feature: MA Experiment ID: 20000213 Result: Up-regulated in Transcription
  misc_feature: MA Experiment 20000213 PARAMETER Experiment Name: At_4deg_Cold_P Parameter: Timepoint (hr) Value: 2
  misc_feature: MA Experiment ID: 20000234 Result: Down-regulated in Transcription
  misc_feature: MA Experiment 20000234 PARAMETER Experiment Name: At_Siliques_P Parameter: Age (day) Value: 21
  misc_feature: MA Experiment 20000234 PARAMETER Experiment Name: At_Siliques_P Parameter: Organism Value: A. thaliana
  misc_feature: MA Experiment 20000234 PARAMETER Experiment Name: At_Siliques_P Parameter: Plant Line Value: WS
  misc_feature: MA Experiment 20000234 PARAMETER Experiment Name: At_Siliques_P Parameter: Tissue Value: Less Than 5mm Siliques vs. Whole Plant
  misc_feature: MA Experiment ID: 20000308 Result: Up-regulated in Transcription
  misc_feature: MA Experiment 20000308 PARAMETER Experiment Name: At_100mM_NaCl__P Parameter: Age (day) Value: 17
  misc_feature: MA Experiment 20000308 PARAMETER Experiment Name: At_100mM_NaCl__P Parameter: Organism Value: A. thaliana
  misc_feature: MA Experiment 20000308 PARAMETER Experiment Name: At_100mM_NaCl__P Parameter: Plant Line Value: WS
  misc_feature: MA Experiment 20000308 PARAMETER Experiment Name: At_100mM_NaCl__P Parameter: Timepoint (hr) Value: 72
  misc_feature: MA Experiment 20000308 PARAMETER Experiment Name: At_100mM_NaCl__P Parameter: Tissue Value: Whole Plant
  misc_feature: MA Experiment 20000308 PARAMETER Experiment Name: At_100mM_NaCl__P Parameter: Treatment Value: 100mM NaCl vs. No Treatment
  misc_feature: MA Experiment ID: 20000437 Result: Up-regulated in Transcription
  misc_feature: MA Experiment 20000437 PARAMETER Experiment Name: At_Drought_P Parameter: Age (day) Value: 8
  misc_feature: MA Experiment 20000437 PARAMETER Experiment Name: At_Drought_P Parameter: Organism Value: A. thaliana
  misc_feature: MA Experiment 20000437 PARAMETER Experiment Name: At_Drought_P Parameter: Plant Line Value: WS
  misc_feature: MA Experiment 20000437 PARAMETER Experiment Name: At_Drought_P Parameter: Timepoint (hr) Value: 24
  misc_feature: MA Experiment 20000437 PARAMETER Experiment Name: At_Drought_P Parameter: Tissue Value: Whole Plant
  misc_feature: MA Experiment 20000437 PARAMETER Experiment Name: At_Drought_P Parameter: Treatment Value: Drought vs. No Drought
  misc_feature: MA Experiment ID: 20000438 Result: Down-regulated in Transcription
  misc_feature: MA Experiment 20000438 PARAMETER Experiment Name: At_Shoots__P Parameter: Age (day) Value: 14
  misc_feature: MA Experiment 20000438 PARAMETER Experiment Name: At_Shoots__P Parameter: Tissue Value: Shoots vs. Whole Plant
  misc_feature: MA Experiment ID: 20000439 Result: Down-regulated in Transcription
  misc_feature: MA Experiment 20000439 PARAMETER Experiment Name: At_Roots__P Parameter: Age (day) Value: 14 vs. 21
  misc_feature: MA Experiment 20000439 PARAMETER Experiment Name: At_Roots__P Parameter: Organism Value: A. thaliana
  misc_feature: MA Experiment 20000439 PARAMETER Experiment Name: At_Roots__P Parameter: Tissue Value: Roots vs. Whole Plant
  misc_feature: MA Experiment ID: 20000495 Result: Down-regulated in Transcription
  misc_feature: MA Experiment 20000495 PARAMETER Experiment Name: At_Guard_Cells_P Parameter: Harvest Date Value: 8/2/2002
  misc_feature: MA Experiment 20000495 PARAMETER Experiment Name: At_Guard_Cells_P Parameter: Organism Value: A. thaliana
  misc_feature: MA Experiment 20000495 PARAMETER Experiment Name: At_Guard_Cells_P Parameter: Tissue Value: Guard Cells vs. Leaves
  misc_feature: MA Experiment ID: 20000574 Result: Up-regulated in Transcription
  misc_feature: MA Experiment 20000574 PARAMETER Experiment Name: At_100uM_ABA_Mutants__P Parameter: Organism Value: A. thaliana
  misc_feature: MA Experiment 20000574 PARAMETER Experiment Name: At_100uM_ABA_Mutants__P Parameter: Plant Line Value: CS23 vs. Ler wt
  misc_feature: MA Experiment 20000574 PARAMETER Experiment Name: At_100uM_ABA_Mutants__P Parameter: Timepoint (hr) Value: N/A
  misc_feature: MA Experiment 20000574 PARAMETER Experiment Name: At_100uM_ABA_Mutants__P Parameter: Tissue Value: Whole Plant
  misc_feature: MA Experiment 20000574 PARAMETER Experiment Name: At_100uM_ABA_Mutants__P Parameter: Treatment Value: None
  misc_feature: MA Experiment ID: 20000794 Result: Up-regulated in Transcription
  misc_feature: MA Experiment 20000794 PARAMETER Experiment Name: At_Petals_P Parameter: Age (day) Value: 23-25 days
  misc_feature: MA Experiment 20000794 PARAMETER Experiment Name: At_Petals_P Parameter: Plant Line Value: WS
  misc_feature: MA Experiment 20000794 PARAMETER Experiment Name: At_Petals_P Parameter: Tissue Value: Petals vs. Whole plant
  misc_feature: MA Experiment ID: 20001451 Result: Down-regulated in Transcription
  misc_feature: MA Experiment 20001451 PARAMETER Experiment Name: At_Far-red-induction_P Parameter: Age (day) Value: 7
  misc_feature: MA Experiment 20001451 PARAMETER Experiment Name: At_Far-red-induction_P Parameter: Light Value: Far-red vs. White
  misc_feature: MA Experiment 20001451 PARAMETER Experiment Name: At_Far-red-induction_P Parameter: Organism Value: A. thaliana
  misc_feature: MA Experiment 20001451 PARAMETER Experiment Name: At_Far-red-induction_P Parameter: Plant Line Value: Columbia
  misc_feature: MA Experiment 20001451 PARAMETER Experiment Name: At_Far-red-induction_P Parameter: Timepoint (hr) Value: 24
  misc_feature: MA Experiment 20001451 PARAMETER Experiment Name: At_Far-red-induction_P Parameter: Tissue Value: Whole Plant
  misc_feature: MA Experiment ID: 20001557 Result: Up-regulated in Transcription
  misc_feature: MA Experiment 20001557 PARAMETER Experiment Name: At_Drought_Soil_Dry_P Parameter: Age (day) Value: 27
  misc_feature: MA Experiment 20001557 PARAMETER Experiment Name: At_Drought_Soil_Dry_P Parameter: Organism Value: A. thaliana
  misc_feature: MA Experiment 20001557 PARAMETER Experiment Name: At_Drought_Soil_Dry_P Parameter: Plant Line Value: WS
  misc_feature: MA Experiment 20001557 PARAMETER Experiment Name: At_Drought_Soil_Dry_P Parameter: Post Timepoint (hr) Value: 3
  misc_feature: MA Experiment 20001557 PARAMETER Experiment Name: At_Drought_Soil_Dry_P Parameter: Post-Treatment Value: Re-Water vs. No Drought
  misc_feature: MA Experiment 20001557 PARAMETER Experiment Name: At_Drought_Soil_Dry_P Parameter: Timepoint (day) Value: 13
  misc_feature: MA Experiment 20001557 PARAMETER Experiment Name: At_Drought_Soil_Dry_P Parameter: Treatment Value: Drought vs. No Drought
  misc_feature: MA Experiment ID: 20001906 Result: Up-regulated in Transcription
  misc_feature: MA Experiment 20001906 PARAMETER Experiment Name: At_Drought_Reproduction_P Parameter: Age (day) Value: 35
  misc_feature: MA Experiment 20001906 PARAMETER Experiment Name: At_Drought_Reproduction_P Parameter: Organism Value: A. thaliana
  misc_feature: MA Experiment 20001906 PARAMETER Experiment Name: At_Drought_Reproduction_P Parameter: Plant Line Value: WS
  misc_feature: MA Experiment 20001906 PARAMETER Experiment Name: At_Drought_Reproduction_P Parameter: Timepoint (day) Value: 5
  misc_feature: MA Experiment 20001906 PARAMETER Experiment Name: At_Drought_Reproduction_P Parameter: Tissue Value: Siliques
  misc_feature: MA Experiment 20001906 PARAMETER Experiment Name: At_Drought_Reproduction_P Parameter: Treatment Value: Drought vs. No Drought
attatagaatatctaataatgaagaatcggtttcaaaattaataatgactgattataattacattgacaacatgcagggactaataacaattacactcacagcatcgtttcctcaactccacccagcatcatgcaacagccaggacccactcagttgcggcggtccgaataagctccagatcggagttttgctattgggactctgtttcctctccgtagggagtggaggaatacgaccttgtagcatcccttttggggttgatcagtttgaccaacgaactgaggaaggggttaaaggagtggccagtttcttcaactggtattacatgactttcactgtggttctgatcattacgcagaccgtagttgtgtatatccaggatcaagtcagttggattatcggttttagtatccctaccggactcatggctcttgcggttgttatgttttttgccggaatgaagcgttatgtctacgttaaaccagaaggaagtatattctctgggatcgctcaagttatcgtggcagctcgtaagaagcgaaagctgaaacttccggcggaagatgacggcactgtcacctattacgacccagccatcaagtctagcgtgttatccaagttacaccgcagtaaccaattcaggtgtcttgacaaagccgcggtggttatagaaggtgacctaacacccgagggacctcccgcagacaagtggcggttatgcagcgtccaagaagtggaagaagtgaagtgtttgatccgaattgttcctatctggtcggccggaataatctcactcgcggccatgacaacacaaggcactttcacggtctctcaagctttgaaaatggatcgaaacttaggtcctaaattcgagattccggctggttcactctccgtcatctctctcctcacaatcggcatctttcttcccttctacgaccgcgtttttgtaccattcatgcggcgaatcaccggccataaatccggaatcacactcctccaaaggataggaacagggatcgttttcacgatcttttctatgatcgttgcgggcattgtggagcgtatgagacgcatacgctccatcaatgccggagatccaacgggaatgactccaatgtcggtgttttggctttcgccgcagctaattctcatgggactatgtgaagcattcaatatcatcggacaaattgagttcttcaacagtcagtttccagagcacatgagaagtatcgctaattctctcttctctttatcgttcgccggttcgagctaccttagtagtttccttgtgactgtcgttcataaattctccggtgggcatgatcgtccggattggctaaacaagaatctcaacgcgggaaaattggattacttctattatctgattgcggttttgggtgtggttaatctggtttacttttggtattgtgctcggggataccggtacaaggtcggtttaccgattgaagactttgaggaggacaagtcctccgatgatgttgagatgacttccaagaaatcgatggaatgatttaatagactatccttagggacaacaagaagattgtcgatgttgtttgaataattactatgacaatgtatgtatcataatatgtaagaactagaatatataataaatttttaccttcc

SEQ ID NO: 29876 - protein, 510 aa, Arabidopsis thaliana
  peptide (1)..(510): Ceres Seq. ID no. 12422369
  misc_feature (27)..(420): Pfam Name: POT family Pfam Description: POT family
  misc_feature (26)..(505): Homolog of NCBI NO: 15221883 NR Description: peptide transporter, putative
  misc_feature (26)..(510): Homolog of NCBI NO: 18408546 NR Description: putative peptide transporter
  misc_feature (26)..(510): Homolog of NCBI NO: 16226701 NR Description: AT3g47960/T17F15_170 [Arabidopsis thaliana]
  misc_feature (26)..(510): Homolog of NCBI NO: 7488141 NR Description: probable peptide transport protein T17F15.170 -
  misc_feature (26)..(484): Homolog of NCBI NO: 15241927 NR Description: peptide transporter; protein id: At5g62680.1
  misc_feature (18)..(485): Homolog of NCBI NO: 34906908 NR Description: putative peptide transporter
  misc_feature (18)..(502): Homolog of NCBI NO: 25403285 NR Description: protein T7N9.14 [imported] - Arabidopsis thaliana
  misc_feature (18)..(502): Homolog of NCBI NO: 15223425 NR Description: peptide transporter, putative; protein id:
  misc_feature (26)..(510): Homolog of NCBI NO: 18409391 NR Description: putative peptide transporter
  misc_feature (21)..(510): Homolog of NCBI NO: 25404847 NR Description: probable peptide transporter T17F3.10
YRISNNEESVSKLIMTDYNYIDNMQGLITITLTASFPQLHPASCNSQDPLSCGGPNKLQIGVLLLGLCFLSVGSGGIRPCSIPFGVDQFDQRTEEGVKGVASFFNWYYMTFTVVLIITQTVVVYIQDQVSWIIGFSIPTGLMALAVVMFFAGMKRYVYVKPEGSIFSGIAQVIVAARKKRKLKLPAEDDGTVTYYDPAIKSSVLSKLHRSNQFRCLDKAAVVIEGDLTPEGPPADKWRLCSVQEVEEVKCLIRIVPIWSAGIISLAAMTTQGTFTVSQALKMDRNLGPKFEIPAGSLSVISLLTIGIFLPFYDRVFVPFMRRITGHKSGITLLQRIGTGIVFTIFSMIVAGIVERMRRIRSINAGDPTGMTPMSVFWLSPQLILMGLCEAFNIIGQIEFFNSQFPEHMRSIANSLFSLSFAGSSYLSSFLVTVVHKFSGGHDRPDWLNKNLNAGKLDYFYYLIAVLGVVNLVYFWYCARGYRYKVGLPIEDFEEDKSSDDVEMTSKKSME

SEQ ID NO: 29877 - protein, 496 aa, Arabidopsis thaliana
  peptide (1)..(496): Ceres Seq. ID no. 12422370
  misc_feature (13)..(406): Pfam Name: POT family Pfam Description: POT family
  misc_feature (12)..(491): Homolog of NCBI NO: 15221883 NR Description: peptide transporter, putative
  misc_feature (12)..(496): Homolog of NCBI NO: 16226701 NR Description: AT3g47960/T17F15_170 [Arabidopsis thaliana]
  misc_feature (12)..(496): Homolog of NCBI NO: 18408546 NR Description: putative peptide transporter
  misc_feature (12)..(496): Homolog of NCBI NO: 7488141 NR Description: probable peptide transport protein T17F15.170 -
  misc_feature (12)..(470): Homolog of NCBI NO: 15241927 NR Description: peptide transporter; protein id: At5g62680.1
  misc_feature (4)..(471): Homolog of NCBI NO: 34906908 NR Description: putative peptide transporter
  misc_feature (4)..(488): Homolog of NCBI NO: 25403285 NR Description: protein T7N9.14 [imported] - Arabidopsis thaliana
  misc_feature (4)..(488): Homolog of NCBI NO: 15223425 NR Description: peptide transporter, putative; protein id:
  misc_feature (12)..(496): Homolog of NCBI NO: 18409391 NR Description: putative peptide transporter
  misc_feature (7)..(496): Homolog of NCBI NO: 25404847 NR Description: probable peptide transporter T17F3.10
MTDYNYIDNMQGLITITLTASFPQLHPASCNSQDPLSCGGPNKLQIGVLLLGLCFLSVGSGGIRPCSIPFGVDQFDQRTEEGVKGVASFFNWYYMTFTVVLIITQTVVVYIQDQVSWIIGFSIPTGLMALAVVMFFAGMKRYVYVKPEGSIFSGIAQVIVAARKKRKLKLPAEDDGTVTYYDPAIKSSVLSKLHRSNQFRCLDKAAVVIEGDLTPEGPPADKWRLCSVQEVEEVKCLIRIVPIWSAGIISLAAMTTQGTFTVSQALKMDRNLGPKFEIPAGSLSVISLLTIGIFLPFYDRVFVPFMRRITGHKSGITLLQRIGTGIVFTIFSMIVAGIVERMRRIRSINAGDPTGMTPMSVFWLSPQLILMGLCEAFNIIGQIEFFNSQFPEHMRSIANSLFSLSFAGSSYLSSFLVTVVHKFSGGHDRPDWLNKNLNAGKLDYFYYLIAVLGVVNLVYFWYCARGYRYKVGLPIEDFEEDKSSDDVEMTSKKSME

SEQ ID NO: 29878 - protein, 487 aa, Arabidopsis thaliana
  peptide (1)..(487): Ceres Seq. ID no. 12422371
  misc_feature (4)..(397): Pfam Name: POT family Pfam Description: POT family
  misc_feature (3)..(482): Homolog of NCBI NO: 15221883 NR Description: peptide transporter, putative
  misc_feature (3)..(487): Homolog of NCBI NO: 18408546 NR Description: putative peptide transporter
  misc_feature (3)..(487): Homolog of NCBI NO: 16226701 NR Description: AT3g47960/T17F15_170 [Arabidopsis thaliana]
  misc_feature (3)..(487): Homolog of NCBI NO: 7488141 NR Description: probable peptide transport protein T17F15.170 -
  misc_feature (3)..(461): Homolog of NCBI NO: 15241927 NR Description: peptide transporter; protein id: At5g62680.1
  misc_feature (1)..(462): Homolog of NCBI NO: 34906908 NR Description: putative peptide transporter
  misc_feature (1)..(479): Homolog of NCBI NO: 25403285 NR Description: protein T7N9.14 [imported] - Arabidopsis thaliana
  misc_feature (1)..(479): Homolog of NCBI NO: 15223425 NR Description: peptide transporter, putative; protein id:
  misc_feature (3)..(487): Homolog of NCBI NO: 18409391 NR Description: putative peptide transporter
  misc_feature (1)..(487): Homolog of NCBI NO: 25404847 NR Description: probable peptide transporter T17F3.10
MQGLITITLTASFPQLHPASCNSQDPLSCGGPNKLQIGVLLLGLCFLSVGSGGIRPCSIPFGVDQFDQRTEEGVKGVASFFNWYYMTFTVVLIITQTVVVYIQDQVSWIIGFSIPTGLMALAVVMFFAGMKRYVYVKPEGSIFSGIAQVIVAARKKRKLKLPAEDDGTVTYYDPAIKSSVLSKLHRSNQFRCLDKAAVVIEGDLTPEGPPADKWRLCSVQEVEEVKCLIRIVPIWSAGIISLAAMTTQGTFTVSQALKMDRNLGPKFEIPAGSLSVISLLTIGIFLPFYDRVFVPFMRRITGHKSGITLLQRIGTGIVFTIFSMIVAGIVERMRRIRSINAGDPTGMTPMSVFWLSPQLILMGLCEAFNIIGQIEFFNSQFPEHMRSIANSLFSLSFAGSSYLSSFLVTVVHKFSGGHDRPDWLNKNLNAGKLDYFYYLIAVLGVVNLVYFWYCARGYRYKVGLPIEDFEEDKSSDDVEMTSKKSME

SEQ ID NO: 29879 - DNA, 842 bp, Arabidopsis thaliana
  misc_feature (1)..(842): Ceres Seq. ID no. 12322334
  misc_feature: MA Experiment ID: 20000180 Result: Up-regulated in Transcription
  misc_feature: MA Experiment 20000180 PARAMETER Experiment Name: At_Germinating_Seeds_P Parameter: Age (hr) Value: 24 vs. 0
  misc_feature: MA Experiment 20000180 PARAMETER Experiment Name: At_Germinating_Seeds_P Parameter: Tissue Value: Germinating Seeds
  misc_feature: MA Experiment ID: 20000184 Result: Down-regulated in Transcription
  misc_feature: MA Experiment 20000184 PARAMETER Experiment Name: At_Shoots__P Parameter: Age (day) Value: 7
  misc_feature: MA Experiment 20000184 PARAMETER Experiment Name: At_Shoots__P Parameter: Tissue Value: Shoots vs. Whole Plant
ctacgattagtttaatctctcagtccaccggagagtgtaaaaacagcgagaaaatcgacgtcgttcgatcgccgactgcgagcgaagaagaagatggctgaagaagaagttgactacgtattcaaggttgttttgaacggagattcagcggttgggaagtcacagctacgggctcggttcacaagagacgaattcagtatggattccaaagccacaattcggtgtcgatttcaatactcgaacgctcgttattgacgataagaacatcaaagctcagatctgggacatcgcaggccagaaacgacacagagctattacataagcctactacaaaggtgctgttggtgcaatgttagtttacgatatgacaatacgtgaaagctttgagcacattcctcagtggttggaagaactacgagtgcacgcggataagaacattgtcatcatcttgattggtaacaagacggatttagagaaccagagatcggttcctgtggaagatgccaaggaatttgcagagaaggaagggctttttttccttgagacttcagcactaaactccacaaatgtcgagaactctttcaacactctcttgactgagatcttcaacaaggtgaacaagaagaatctcgctaagaccaccgtgtcttgcagctcacaagtcagtcttctaagaccaccgtgtgttgcagctcaataagtcagtcttctcgatttggtccattacagtttagaatgaaataaaccatttcatatacttcaaaaatattgtttatatttggtttttagatagtgagttttgtgtagtgtacgttgatttttagaacaaaatctttcatttt

SEQ ID NO: 29880 - protein, 116 aa, Arabidopsis thaliana
  peptide (1)..(116): Ceres Seq. ID no. 12322335
  misc_feature (1)..(87): Pfam Name: Ras family Pfam Description: Ras family
  misc_feature (1)..(95): Homolog of NCBI NO: 15238392 NR Description: GTP-binding protein, putative
  misc_feature (1)..(95): Homolog of NCBI NO: 7438430 NR Description: GTP-binding protein - garden pea
  misc_feature (1)..(95): Homolog of NCBI NO: 21617896 NR Description: GTP-binding protein GB3 [Arabidopsis thaliana]
  misc_feature (1)..(95): Homolog of NCBI NO: 15236099 NR Description: GTP-binding protein, putative
  misc_feature (1)..(95): Homolog of NCBI NO: 1184985 NR Description: ATGB3 [Arabidopsis thaliana]
  misc_feature (1)..(116): Homolog of NCBI NO: 15227197 NR Description: GTP-binding protein, putative; protein id:
MLVYDMTIRESFEHIPQWLEELRVHADKNIVIILIGNKTDLENQRSVPVEDAKEFAEKEGLFFLETSALNSTNVENSFNTLLTEIFNKVNKKNLAKTTVSCSSQVSLLRPPCVAAQ

SEQ ID NO: 29881 - protein, 111 aa, Arabidopsis thaliana
  peptide (1)..(111): Ceres Seq. ID no. 12322336
  misc_feature (1)..(82): Pfam Name: Ras family Pfam Description: Ras family
  misc_feature (1)..(90): Homolog of NCBI NO: 15238392 NR Description: GTP-binding protein, putative
  misc_feature (1)..(90): Homolog of NCBI NO: 7438430 NR Description: GTP-binding protein - garden pea
  misc_feature (1)..(90): Homolog of NCBI NO: 15236099 NR Description: GTP-binding protein, putative
  misc_feature (1)..(90): Homolog of NCBI NO: 21617896 NR Description: GTP-binding protein GB3 [Arabidopsis thaliana]
  misc_feature (1)..(90): Homolog of NCBI NO: 1184985 NR Description: ATGB3 [Arabidopsis thaliana]
  misc_feature (1)..(111): Homolog of NCBI NO: 15227197 NR Description: GTP-binding protein, putative; protein id:
MTIRESFEHIPQWLEELRVHADKNIVIILIGNKTDLENQRSVPVEDAKEFAEKEGLFFLETSALNSTNVENSFNTLLTEIFNKVNKKNLAKTTVSCSSQVSLLRPPCVAAQ

SEQ ID NO: 29882 - DNA, 1119 bp, Arabidopsis thaliana
  misc_feature (1)..(1119): Ceres Seq. ID no. 13487755
  misc_feature: MA Experiment ID: 108462 Result: Down-regulated in Transcription
  misc_feature: MA Experiment 108462 PARAMETER Experiment Name: At_Germinating_Seeds_cDNA_P Parameter: Age (day) Value: 2 vs. 0
  misc_feature: MA Experiment 108462 PARAMETER Experiment Name: At_Germinating_Seeds_cDNA_P Parameter: Tissue Value: Germinating Seeds
  misc_feature: MA Experiment ID: 108463 Result: Down-regulated in Transcription
  misc_feature: MA Experiment 108463 PARAMETER Experiment Name: At_Germinating_Seeds_cDNA_P Parameter: Age (day) Value: 3 vs. 0
  misc_feature: MA Experiment 108463 PARAMETER Experiment Name: At_Germinating_Seeds_cDNA_P Parameter: Tissue Value: Germinating Seeds
  misc_feature: MA Experiment ID: 108464 Result: Down-regulated in Transcription
  misc_feature: MA Experiment 108464 PARAMETER Experiment Name: At_Germinating_Seeds_cDNA_P Parameter: Age (day) Value: 4 vs. 0
  misc_feature: MA Experiment 108464 PARAMETER Experiment Name: At_Germinating_Seeds_cDNA_P Parameter: Tissue Value: Germinating Seeds
  misc_feature: MA Experiment ID: 108573 Result: Down-regulated in Transcription
  misc_feature: MA Experiment 108573 PARAMETER Experiment Name: At_Drought_cDNA_P Parameter: Timepoint (hr) Value: 6
  misc_feature: MA Experiment 108573 PARAMETER Experiment Name: At_Drought_cDNA_P Parameter: Tissue Value: Aerial
  misc_feature: MA Experiment 108573 PARAMETER Experiment Name: At_Drought_cDNA_P Parameter: Treatment Value: Drought vs. No Drought
  misc_feature: MA Experiment ID: 108595 Result: Down-regulated in Transcription
  misc_feature: MA Experiment 108595 PARAMETER Experiment Name: At_Ler-pi_Ovule_cDNA_P Parameter: Plant Line Value: null
  misc_feature: MA Experiment ID: 20000113 Result: Down-regulated in Transcription
  misc_feature: MA Experiment 20000113 PARAMETER Experiment Name: At_42deg_Heat_cDNA_P Parameter: Temperature (deg C) Value: 42 vs. 22
  misc_feature: MA Experiment 20000113 PARAMETER Experiment Name: At_42deg_Heat_cDNA_P Parameter: Timepoint (hr) Value: 8
  misc_feature: MA Experiment 20000113 PARAMETER Experiment Name: At_42deg_Heat_cDNA_P Parameter: Tissue Value: Aerial
  misc_feature: MA Experiment ID: 20000173 Result: Down-regulated in Transcription
  misc_feature: MA Experiment 20000173 PARAMETER Experiment Name: At_42deg_Heat_P Parameter: Age (day) Value: 14
  misc_feature: MA Experiment 20000173 PARAMETER Experiment Name: At_42deg_Heat_P Parameter: Organism Value: A. thaliana
  misc_feature: MA Experiment 20000173 PARAMETER Experiment Name: At_42deg_Heat_P Parameter: Plant Line Value: WS
  misc_feature: MA Experiment 20000173 PARAMETER Experiment Name: At_42deg_Heat_P Parameter: Temperature (deg C) Value: 42 vs. 22
  misc_feature: MA Experiment 20000173 PARAMETER Experiment Name: At_42deg_Heat_P Parameter: Timepoint (hr) Value: 6
  misc_feature: MA Experiment 20000173 PARAMETER Experiment Name: At_42deg_Heat_P Parameter: Tissue Value: Aerial
  misc_feature: MA Experiment ID: 20000436 Result: Down-regulated in Transcription
  misc_feature: MA Experiment 20000436 PARAMETER Experiment Name: At_Drought_P Parameter: Age (day) Value: 7
  misc_feature: MA Experiment 20000436 PARAMETER Experiment Name: At_Drought_P Parameter: Organism Value: A. thaliana
  misc_feature: MA Experiment 20000436 PARAMETER Experiment Name: At_Drought_P Parameter: Plant Line Value: WS
  misc_feature: MA Experiment 20000436 PARAMETER Experiment Name: At_Drought_P Parameter: Timepoint (hr) Value: 12
  misc_feature: MA Experiment 20000436 PARAMETER Experiment Name: At_Drought_P Parameter: Tissue Value: Whole Plant
  misc_feature: MA Experiment 20000436 PARAMETER Experiment Name: At_Drought_P Parameter: Treatment Value: Drought vs. No Drought
  misc_feature: MA Experiment ID: 20000437 Result: Down-regulated in Transcription
  misc_feature: MA Experiment 20000437 PARAMETER Experiment Name: At_Drought_P Parameter: Age (day) Value: 8
  misc_feature: MA Experiment 20000437 PARAMETER Experiment Name: At_Drought_P Parameter: Organism Value: A. thaliana
  misc_feature: MA Experiment 20000437 PARAMETER Experiment Name: At_Drought_P Parameter: Plant Line Value: WS
  misc_feature: MA Experiment 20000437 PARAMETER Experiment Name: At_Drought_P Parameter: Timepoint (hr) Value: 24
  misc_feature: MA Experiment 20000437 PARAMETER Experiment Name: At_Drought_P Parameter: Tissue Value: Whole Plant
  misc_feature: MA Experiment 20000437 PARAMETER Experiment Name: At_Drought_P Parameter: Treatment Value: Drought vs. No Drought
tgaagactgagaagcagagaaccgaaagaagaaaacaaaactctcgaagtcgcaacagaaaagaaacgagagagatatggtggtaggcggcggaggagaaggagatcagaagagaagcagcggagaaatgatggcgatggcgagtttattcaacgatcagcagaatccaattcaacagtttcaggttaaattcaaagaagtagaaactaatttcaagacatggttgtcgaaacagtcgattccggtggaagccgccgtcgtatccaccatgagcggtgtacaaggagctttcattggtggtctcatgggaacactctctcctgaaatgcctcaagccggcgttgaccctcaagccatagcttcgatgaaacaagctcaggctcttgtgggtggtccttgggtccaagctcggaattttgctgcaattactggtgtgaatgctggaattgcttctgttatgaagcggattagaggcaaagaggatattgaatctgcagtggtggcagcgttaggatctggatttgcatactcattggtgagccaaggattgcaaggacaacctatgaatgcaatcactactgctgctggttttgctgtttttcaaggagtgttttttaaattgggagaaagattctctaaaccgagtactgaagatccatttttcacaagaggaaggacaatgctagtgaagctaggtttggagaaatacgagaagaacttcaagaaaggacttttaactgatcccacattgccattgctcactgatagcgcgctgaaagatgcgaacatcccaccagggccaagacttatgatactagatcatatccagagggacccggagataaagggcaaacgaaagtaggagccatgttgtttaatcaaatatgttttgatggtaacgatcttcaaacacatatgtaatgccttttacttttagctgctattgccatgaagagctcttgttagatacttctgtttctattaccaatgtttgattatctttaaaaaaattgagtagttcgtctcaaatcaaattggatataggttctgaataaaacgaaaatgaaatatgctttgtatgagaataagatgtttatattatgtatagttgattgactc

SEQ ID NO: 29883 - protein, 261 aa, Arabidopsis thaliana
  peptide (1)..(261): Ceres Seq. ID no. 13487756
  misc_feature (52)..(186): Pfam Name: Tim17/Tim22/Tim23 family Pfam Description: Tim17/Tim22/Tim23 family
  misc_feature (7)..(252): Homolog of NCBI NO: 32487911 NR Description: OJ000315_02.15 [Oryza sativa (japonica
  misc_feature (19)..(260): Homolog of NCBI NO: 21593899 NR Description: unknown [Arabidopsis thaliana]
  misc_feature (3)..(260): Homolog of NCBI NO: 15238598 NR Description: expressed protein [Arabidopsis thaliana]
  misc_feature (1)..(261): Homolog of NCBI NO: 15229167 NR Description: expressed protein [Arabidopsis thaliana]
MVVGGGGEGDQKRSSGEMMAMASLFNDQQNPIQQFQVKFKEVETNFKTWLSKQSIPVEAAVVSTMSGVQGAFIGGLMGTLSPEMPQAGVDPQAIASMKQAQALVGGPWVQARNFAAITGVNAGIASVMKRIRGKEDIESAVVAALGSGFAYSLVSQGLQGQPMNAITTAAGFAVFQGVFFKLGERFSKPSTEDPFFTRGRTMLVKLGLEKYEKNFKKGLLTDPTLPLLTDSALKDANIPPGPRLMILDHIQRDPEIKGKRK

SEQ ID NO: 29884 - protein, 244 aa, Arabidopsis thaliana
  peptide (1)..(244): Ceres Seq. ID no. 13487757
  misc_feature (35)..(169): Pfam Name: Tim17/Tim22/Tim23 family Pfam Description: Tim17/Tim22/Tim23 family
  misc_feature (1)..(235): Homolog of NCBI NO: 32487911 NR Description: OJ000315_02.15 [Oryza sativa (japonica
  misc_feature (2)..(243): Homolog of NCBI NO: 21593899 NR Description: unknown [Arabidopsis thaliana]
  misc_feature (1)..(243): Homolog of NCBI NO: 15238598 NR Description: expressed protein [Arabidopsis thaliana]
  misc_feature (1)..(244): Homolog of NCBI NO: 15229167 NR Description: expressed protein [Arabidopsis thaliana]
MMAMASLFNDQQNPIQQFQVKFKEVETNFKTWLSKQSIPVEAAVVSTMSGVQGAFIGGLMGTLSPEMPQAGVDPQAIASMKQAQALVGGPWVQARNFAAITGVNAGIASVMKRIRGKEDIESAVVAALGSGFAYSLVSQGLQGQPMNAITTAAGFAVFQGVFFKLGERFSKPSTEDPFFTRGRTMLVKLGLEKYEKNFKKGLLTDPTLPLLTDSALKDANIPPGPRLMILDHIQRDPEIKGKRK

SEQ ID NO: 29885 - protein, 243 aa, Arabidopsis thaliana
  peptide (1)..(243): Ceres Seq. ID no. 13487758
  misc_feature (34)..(168): Pfam Name: Tim17/Tim22/Tim23 family Pfam Description: Tim17/Tim22/Tim23 family
  misc_feature (1)..(234): Homolog of NCBI NO: 32487911 NR Description: OJ000315_02.15 [Oryza sativa (japonica
  misc_feature (1)..(242): Homolog of NCBI NO: 21593899 NR Description: unknown [Arabidopsis thaliana]
  misc_feature (1)..(242): Homolog of NCBI NO: 15238598 NR Description: expressed protein [Arabidopsis thaliana]
  misc_feature (1)..(243): Homolog of NCBI NO: 15229167 NR Description: expressed protein [Arabidopsis thaliana]
MAMASLFNDQQNPIQQFQVKFKEVETNFKTWLSKQSIPVEAAVVSTMSGVQGAFIGGLMGTLSPEMPQAGVDPQAIASMKQAQALVGGPWVQARNFAAITGVNAGIASVMKRIRGKEDIESAVVAALGSGFAYSLVSQGLQGQPMNAITTAAGFAVFQGVFFKLGERFSKPSTEDPFFTRGRTMLVKLGLEKYEKNFKKGLLTDPTLPLLTDSALKDANIPPGPRLMILDHIQRDPEIKGKRK

SEQ ID NO: 29886 - DNA, 1277 bp, Arabidopsis thaliana
  misc_feature (1)..(1277): Ceres Seq. ID no. 12370517
  misc_feature: MA Experiment ID: 108434 Result: Down-regulated in Transcription
  misc_feature: MA Experiment 108434 PARAMETER Experiment Name: At_Root_Tips_cDNA_P Parameter: Tissue Value: Root Tips
  misc_feature: MA Experiment ID: 108595 Result: Down-regulated in Transcription
  misc_feature: MA Experiment 108595 PARAMETER Experiment Name: At_Ler-pi_Ovule_cDNA_P Parameter: Plant Line Value: null
  misc_feature: MA Experiment ID: 20000113 Result: Down-regulated in Transcription
  misc_feature: MA Experiment 20000113 PARAMETER Experiment Name: At_42deg_Heat_cDNA_P Parameter: Temperature (deg C) Value: 42 vs. 22
  misc_feature: MA Experiment 20000113 PARAMETER Experiment Name: At_42deg_Heat_cDNA_P Parameter: Timepoint (hr) Value: 8
  misc_feature: MA Experiment 20000113 PARAMETER Experiment Name: At_42deg_Heat_cDNA_P Parameter: Tissue Value: Aerial
  misc_feature: MA Experiment ID: 20000171 Result: Down-regulated in Transcription
  misc_feature: MA Experiment 20000171 PARAMETER Experiment Name: At_42deg_Heat_P Parameter: Age (day) Value: 14
  misc_feature: MA Experiment 20000171 PARAMETER Experiment Name: At_42deg_Heat_P Parameter: Organism Value: A. thaliana
  misc_feature: MA Experiment 20000171 PARAMETER Experiment Name: At_42deg_Heat_P Parameter: Plant Line Value: WS
  misc_feature: MA Experiment 20000171 PARAMETER Experiment Name: At_42deg_Heat_P Parameter: Temperature (deg C) Value: 42 vs. 22
  misc_feature: MA Experiment 20000171 PARAMETER Experiment Name: At_42deg_Heat_P Parameter: Timepoint (hr) Value: 1
  misc_feature: MA Experiment 20000171 PARAMETER Experiment Name: At_42deg_Heat_P Parameter: Tissue Value: Aerial
  misc_feature: MA Experiment ID: 20000173 Result: Down-regulated in Transcription
  misc_feature: MA Experiment 20000173 PARAMETER Experiment Name: At_42deg_Heat_P Parameter: Age (day) Value: 14
  misc_feature: MA Experiment 20000173 PARAMETER Experiment Name: At_42deg_Heat_P Parameter: Organism Value: A. thaliana
  misc_feature: MA Experiment 20000173 PARAMETER Experiment Name: At_42deg_Heat_P Parameter: Plant Line Value: WS
  misc_feature: MA Experiment 20000173 PARAMETER Experiment Name: At_42deg_Heat_P Parameter: Temperature (deg C) Value: 42 vs. 22
  misc_feature: MA Experiment 20000173 PARAMETER Experiment Name: At_42deg_Heat_P Parameter: Timepoint (hr) Value: 6
  misc_feature: MA Experiment 20000173 PARAMETER Experiment Name: At_42deg_Heat_P Parameter: Tissue Value: Aerial
  misc_feature: MA Experiment ID: 20000184 Result: Down-regulated in Transcription
  misc_feature: MA Experiment 20000184 PARAMETER Experiment Name: At_Shoots__P Parameter: Age (day) Value: 7
  misc_feature: MA Experiment 20000184 PARAMETER Experiment Name: At_Shoots__P Parameter: Tissue Value: Shoots vs. Whole Plant
  misc_feature: MA Experiment ID: 20000234 Result: Down-regulated in Transcription
  misc_feature: MA Experiment 20000234 PARAMETER Experiment Name: At_Siliques_P Parameter: Age (day) Value: 21
  misc_feature: MA Experiment 20000234 PARAMETER Experiment Name: At_Siliques_P Parameter: Organism Value: A. thaliana
  misc_feature: MA Experiment 20000234 PARAMETER Experiment Name: At_Siliques_P Parameter: Plant Line Value: WS
  misc_feature: MA Experiment 20000234 PARAMETER Experiment Name: At_Siliques_P Parameter: Tissue Value: Less Than 5mm Siliques vs. Whole Plant
  misc_feature: MA Experiment ID: 20001247 Result: Up-regulated in Transcription
  misc_feature: MA Experiment 20001247 PARAMETER Experiment Name: At_Far-red-induction_P Parameter: Age (day) Value: 7
  misc_feature: MA Experiment 20001247 PARAMETER Experiment Name: At_Far-red-induction_P Parameter: Light Value: Far-red vs. White
  misc_feature: MA Experiment 20001247 PARAMETER Experiment Name: At_Far-red-induction_P Parameter: Organism Value: A. thaliana
  misc_feature: MA Experiment 20001247 PARAMETER Experiment Name: At_Far-red-induction_P Parameter: Plant Line Value: Columbia
  misc_feature: MA Experiment 20001247 PARAMETER Experiment Name: At_Far-red-induction_P Parameter: Timepoint (hr) Value: 1
  misc_feature: MA Experiment 20001247 PARAMETER Experiment Name: At_Far-red-induction_P Parameter: Tissue Value: Whole Plant
  misc_feature: MA Experiment ID: 20001557 Result: Up-regulated in Transcription
  misc_feature: MA Experiment 20001557 PARAMETER Experiment Name: At_Drought_Soil_Dry_P Parameter: Age (day) Value: 27
  misc_feature: MA Experiment 20001557 PARAMETER Experiment Name: At_Drought_Soil_Dry_P Parameter: Organism Value: A. thaliana
  misc_feature: MA Experiment 20001557 PARAMETER Experiment Name: At_Drought_Soil_Dry_P Parameter: Plant Line Value: WS
  misc_feature: MA Experiment 20001557 PARAMETER Experiment Name: At_Drought_Soil_Dry_P Parameter: Post Timepoint (hr) Value: 3
  misc_feature: MA Experiment 20001557 PARAMETER Experiment Name: At_Drought_Soil_Dry_P Parameter: Post-Treatment Value: Re-Water vs. No Drought
  misc_feature: MA Experiment 20001557 PARAMETER Experiment Name: At_Drought_Soil_Dry_P Parameter: Timepoint (day) Value: 13
  misc_feature: MA Experiment 20001557 PARAMETER Experiment Name: At_Drought_Soil_Dry_P Parameter: Treatment Value: Drought vs. No Drought
  misc_feature: MA Experiment ID: 20001558 Result: Up-regulated in Transcription
  misc_feature: MA Experiment 20001558 PARAMETER Experiment Name: At_Drought_Soil_Dry_P Parameter: Age (day) Value: 27
  misc_feature: MA Experiment 20001558 PARAMETER Experiment Name: At_Drought_Soil_Dry_P Parameter: Organism Value: A. thaliana
  misc_feature: MA Experiment 20001558 PARAMETER Experiment Name: At_Drought_Soil_Dry_P Parameter: Plant Line Value: WS
  misc_feature: MA Experiment 20001558 PARAMETER Experiment Name: At_Drought_Soil_Dry_P Parameter: Post Timepoint (hr) Value: 6
  misc_feature: MA Experiment 20001558 PARAMETER Experiment Name: At_Drought_Soil_Dry_P Parameter: Post-Treatment Value: Re-Water vs. No Drought
  misc_feature: MA Experiment 20001558 PARAMETER Experiment Name: At_Drought_Soil_Dry_P Parameter: Timepoint (day) Value: 13
  misc_feature: MA Experiment 20001558 PARAMETER Experiment Name: At_Drought_Soil_Dry_P Parameter: Treatment Value: Drought vs. No Drought
aaaagctgaaacaagagttcgagaaaaatttcgattctcttgctcgtaaaagcttcttttgattctctttgactctgttttgtggatagctcctgaagaagaagaagatgatggtagtgaacagctttgatctatggcaaaaagatgttttcttctctgcagctgaagagaatggagtctgcttatagattgtggattagagagaagaaagatgagatttgtaaggaacttcaagcagctttaggtacagctaaatggcagttggaggagtttgagaaggcagtgagattgagtcataaacggtgtggggatgatgattcttcatccacacggcataaacagtttgttaccgctattgaaaaccagattcatcgcgtagaaacttctctggcaagaagcttatagtgaaaatgggaaaaagcctctccgttgggttgatcttaatgaagaagagcgtgatgacttagcaatgtttctctctggatcttctcgaacttcacagagttttagtggtgagagcagcatcaagtcgagagagtctactaatagttctctagttgaaaacgttatggaagtttcagctaaagtaacattcaagaaagctaaagtttatggtgatggctctgagtgtgtcatagacattgaagaaagagtgacacctggccaagcagagaaatcagttgggctgagaagaatatggagttcaccaaatttcaattctttgagaattatagttcctggtggtgataatgaagaagaaaaggagacattggtggcacaaatagaagcgacgcctaaagttaaaggaactaagtctgtattgtggatgcagagacttcctgatcataatcagctctttgacaagaccggttgctttcaaaatccgatacgcttaccgtttaatcacccgatcaagtttattgtttccttaatgctaatggtgtttctactattacccttcgtagtgtatttgtcttgagaattttaccacggttcgaaactgtcaagaagctgctaaagagatcagctttcgcgtctaatggttaggattcataatcccacaagaacaaacagagattaaaaagctttacatatgttacttttaacttgttgctttggttcttcagggaacgtatagaaacattgaaacttgtaagattaagtaaagggattagagtttatattacggctttggctgccgttgataaagatggaaatgcaatattcgtttcgtagatgtttgacaatacaatgccataagaatcaagatttatgcc

SEQ ID NO: 29887 - protein, 169 aa, Arabidopsis thaliana
  peptide (1)..(169): Ceres Seq. ID no. 12370518
  misc_feature (1)..(11): Homolog of NCBI NO: 40253501 NR Description: clathrin-coat assembly protein-like
  misc_feature (1)..(12): Homolog of NCBI NO: 18396454 NR Description: putative clathrin-coat assembly protein
  misc_feature (1)..(12): Homolog of NCBI NO: 25403328 NR Description: protein T22C5.15 [imported] - Arabidopsis
  misc_feature (1)..(164): Homolog of NCBI NO: 7486766 NR Description: hypothetical protein F9N11.90 - Arabidopsis
  misc_feature (1)..(166): Homolog of NCBI NO: 18417554 NR Description: putative protein
  misc_feature (1)..(129): Homolog of NCBI NO: 7485788 NR Description: hypothetical protein At2g18860 [imported] -
  misc_feature (1)..(169): Homolog of NCBI NO: 30680486 NR Description: expressed protein [Arabidopsis thaliana]
MFLSGSSRTSQSFSGESSIKSRESTNSSLVENVMEVSAKVTFKKAKVYGDGSECVIDIEERVTPGQAEKSVGLRRIWSSPNFNSLRIIVPGGDNEEEKETLVAQIEATPKVKGTKSVLWMQRLPDHNQLFDKTGCFQNPIRLPFNHPIKFIVSLMLMVFLLLPFVVYLS

SEQ ID NO: 29888 - protein, 136 aa, Arabidopsis thaliana
  peptide (1)..(136): Ceres Seq. ID no. 12370519
  misc_feature (1)..(131): Homolog of NCBI NO: 7486766 NR Description: hypothetical protein F9N11.90 - Arabidopsis
  misc_feature (1)..(133): Homolog of NCBI NO: 18417554 NR Description: putative protein
  misc_feature (1)..(96): Homolog of NCBI NO: 7485788 NR Description: hypothetical protein At2g18860 [imported] -
  misc_feature (1)..(136): Homolog of NCBI NO: 30680486 NR Description: expressed protein [Arabidopsis thaliana]
MEVSAKVTFKKAKVYGDGSECVIDIEERVTPGQAEKSVGLRRIWSSPNFNSLRIIVPGGDNEEEKETLVAQIEATPKVKGTKSVLWMQRLPDHNQLFDKTGCFQNPIRLPFNHPIKFIVSLMLMVFLLLPFVVYLS

SEQ ID NO: 29889 - protein, 86 aa, Arabidopsis thaliana
  peptide (1)..(86): Ceres Seq. ID no. 12370520
  misc_feature (24)..(85): Homolog of NCBI NO: 26006490 NR Description: Hypothetical protein [Oryza sativa (japonica
  misc_feature (10)..(82): Homolog of NCBI NO: 40253501 NR Description: clathrin-coat assembly protein-like
  misc_feature (9)..(82): Homolog of NCBI NO: 18396454 NR Description: putative clathrin-coat assembly protein
  misc_feature (9)..(82): Homolog of NCBI NO: 25403328 NR Description: protein T22C5.15 [imported] - Arabidopsis
  misc_feature (10)..(86): Homolog of NCBI NO: 7486766 NR Description: hypothetical protein F9N11.90 - Arabidopsis
  misc_feature (10)..(86): Homolog of NCBI NO: 18417554 NR Description: putative protein
  misc_feature (10)..(82): Homolog of NCBI NO: 7485788 NR Description: hypothetical protein At2g18860 [imported] -
  misc_feature (10)..(82): Homolog of NCBI NO: 30680486 NR Description: expressed protein [Arabidopsis thaliana]
MFSSLQLKRMESAYRLWIREKKDEICKELQAALGTAKWQLEEFEKAVRLSHKRCGDDDSSSTRHKQFVTAIENQIHRVETSLARSL

SEQ ID NO: 29890 - DNA, 1647 bp, Arabidopsis thaliana
  misc_feature (1)..(1647): Ceres Seq. ID no. 13492901
  misc_feature: MA Experiment ID: 108461 Result: Down-regulated in Transcription
  misc_feature: MA Experiment 108461 PARAMETER Experiment Name: At_Germinating_Seeds_cDNA_P Parameter: Age (day) Value: 1 vs. 0
  misc_feature: MA Experiment 108461 PARAMETER Experiment Name: At_Germinating_Seeds_cDNA_P Parameter: Tissue Value: Germinating Seeds
  misc_feature: MA Experiment ID: 108462 Result: Down-regulated in Transcription
  misc_feature: MA Experiment 108462 PARAMETER Experiment Name: At_Germinating_Seeds_cDNA_P Parameter: Age (day) Value: 2 vs. 0
  misc_feature: MA Experiment 108462 PARAMETER Experiment Name: At_Germinating_Seeds_cDNA_P Parameter: Tissue Value: Germinating Seeds
  misc_feature: MA Experiment ID: 108463 Result: Down-regulated in Transcription
  misc_feature: MA Experiment 108463 PARAMETER Experiment Name: At_Germinating_Seeds_cDNA_P Parameter: Age (day) Value: 3 vs. 0
  misc_feature: MA Experiment 108463 PARAMETER Experiment Name: At_Germinating_Seeds_cDNA_P Parameter: Tissue Value: Germinating Seeds
  misc_feature: MA Experiment ID: 108464 Result: Down-regulated in Transcription
  misc_feature: MA Experiment 108464 PARAMETER Experiment Name: At_Germinating_Seeds_cDNA_P Parameter: Age (day) Value: 4 vs. 0
  misc_feature: MA Experiment 108464 PARAMETER Experiment Name: At_Germinating_Seeds_cDNA_P Parameter: Tissue Value: Germinating Seeds
  misc_feature: MA Experiment ID: 108573 Result: Up-regulated in Transcription
  misc_feature: MA Experiment 108573 PARAMETER Experiment Name: At_Drought_cDNA_P Parameter: Timepoint (hr) Value: 6
  misc_feature: MA Experiment 108573 PARAMETER Experiment Name: At_Drought_cDNA_P Parameter: Tissue Value: Aerial
  misc_feature: MA Experiment 108573 PARAMETER Experiment Name: At_Drought_cDNA_P Parameter: Treatment Value: Drought vs. No Drought
  misc_feature: MA Experiment ID: 108579 Result: Down-regulated in Transcription
  misc_feature: MA Experiment 108579 PARAMETER Experiment Name: At_4deg_Cold_cDNA_P Parameter: Temperature (deg C) Value: 4 vs. 22
  misc_feature: MA Experiment 108579 PARAMETER Experiment Name: At_4deg_Cold_cDNA_P Parameter: Timepoint (hr) Value: 6
  misc_feature: MA Experiment 108579 PARAMETER Experiment Name: At_4deg_Cold_cDNA_P Parameter: Tissue Value: Aerial
  misc_feature: MA Experiment ID: 20000180 Result: Down-regulated in Transcription
  misc_feature: MA Experiment 20000180 PARAMETER Experiment Name: At_Germinating_Seeds_P Parameter: Age (hr) Value: 24 vs. 0
  misc_feature: MA Experiment 20000180 PARAMETER Experiment Name: At_Germinating_Seeds_P Parameter: Tissue Value: Germinating Seeds
  misc_feature: MA Experiment ID: 20000184 Result: Down-regulated in Transcription
  misc_feature: MA Experiment 20000184 PARAMETER Experiment Name: At_Shoots__P Parameter: Age (day) Value: 7
  misc_feature: MA Experiment 20000184 PARAMETER Experiment Name: At_Shoots__P Parameter: Tissue Value: Shoots vs. Whole Plant
  misc_feature: MA Experiment ID: 20000496 Result: Up-regulated in Transcription
  misc_feature: MA Experiment 20000496 PARAMETER Experiment Name: At_Guard_Cells_P Parameter: Harvest Date Value: 7/19/2002
  misc_feature: MA Experiment 20000496 PARAMETER Experiment Name: At_Guard_Cells_P Parameter: Organism Value: Canola
  misc_feature: MA Experiment 20000496 PARAMETER Experiment Name: At_Guard_Cells_P Parameter: Tissue Value: Guard Cells vs. Leaves
aattctacaaagaaaaagcctcctttttgttgccctgtgtcaaaaaagaaacctttttggtgggatttggtttcgctttcttgggggccaaaaagaggagatgatgaatccgaataagcagcaaagaagaaacctttacttcttcttcgtcttcgtcttctatgtcttcatcctctgtgctcgctttcaaacctctgaagctactaaagactcgtcggctcaagtgaagttacagaatcgtcgacttagctccaccgtcgtgtttcctgtctccgggaatgtgtatcctcttgggtactattatgtgttgcttaacattggcaacccacctaagctctttgacttggacattgacactggcagtgacctcacttgggttcagtgtgatgcaccttgcaacggttgcacaaagcctcgtgctaagcagtacaagcccaatcacaacactttgccttgttcacacatcttgtgttctggtcttgaccttccccaggacagaccttgtgctgaccctgaggatcaatgtgactatgaaatcggatactccgatcatgcatcatctattggtgcacttgtaactgatgaggttcctctaaaactcgcaaatggctccattatgaatcttcgtttgacatttggatgtgggtatgatcagcagaatcctggtccacatcctcctcctccaacagcgggaatacttggccttggaagagggaaagtaggcctctcaactcagctaaagtccttggggataacgaagaatgtgattgtgcattgcttaagtcatactggtaaaggctttctctctattggagatgagcttgttccttcttctggagttacatggacttcattggctactaattcacctagtaaaaactacatggctggaccagcagagcttctctttaacgacaagaccacaggtgtcaaaggcattaacgtagttttcgatagtggaagctcgtacacttacttcaatgcagaagcataccaagctattctcgatcttataagaaaagacttgaatgggaagcctttgacggacacaaaagatgataaaagcttaccagtctgctggaaaggcaaaaaacctttgaaatcacttgatgaggttaagaaatacttcaagacgattactttacgatttgggaatcaaaagaatggtcagctatttcaggttccacctgagtcgtatctcataatcaccgaaaaaggaagagtatgtttgggtattctgaatggaactgaaatcggtctcgagggctacaatatcattggagacatatctttccaagggataatggtgatctatgacaatgagaagcagaggattggatggatttcttcagactgtgacaaacttcccaatgtgaatcacgactatggaggagatctgtcggaggaagcttatccaataggatttggtttgataaaagagcttttctcaggaagtgattcttcaaagaacaagaacttggtctcagatggagagctttgacacaagagaagagtcttttttaaagtggtgtagtaaaaagattttgaggtttttggtttttggttttgttgttatcatagaaacaaggaaaatattttgtgaatatatatatcatcatataatagcaaaatgcaacagagtttaag

SEQ ID NO: 29891 - protein, 499 aa, Arabidopsis thaliana
  peptide (1)..(499): Ceres Seq. ID no. 13492902
  misc_feature (49)..(450): Pfam Name: Eukaryotic aspartyl protease Pfam Description: Eukaryotic aspartyl protease
  misc_feature (83)..(456): Homolog of NCBI NO: 33340111 NR Description: nucellin-like protein [Oryza sativa]
  misc_feature (106)..(454): Homolog of NCBI NO: 21805926 NR Description: nucellin-like aspartic protease [Zea mays]
  misc_feature (405)..(458): Homolog of NCBI NO: 7484812 NR Description: aspartic proteinase homolog F17M5.250 -
  misc_feature (84)..(403): Homolog of NCBI NO: 7484812 NR Description: aspartic proteinase homolog F17M5.250 -
  misc_feature (81)..(458): Homolog of NCBI NO: 26452545 NR Description: putative nucellin [Arabidopsis thaliana]
  misc_feature (81)..(458): Homolog of NCBI NO: 18418224 NR Description: nucellin protein, putative [Arabidopsis thaliana]
  misc_feature (84)..(456): Homolog of NCBI NO: 15219354 NR Description: nucellin protein, putative [Arabidopsis thaliana]
  misc_feature (34)..(456): Homolog of NCBI NO: 25350204 NR Description: nucellin-like protein, 27671-25467
  misc_feature (34)..(456): Homolog of NCBI NO: 30699263 NR Description: nucellin protein, putative [Arabidopsis thaliana]
  misc_feature (34)..(499): Homolog of NCBI NO: 30699261 NR Description: nucellin protein, putative [Arabidopsis thaliana]
ILQRKSLLFVALCQKRNLFGGIWFRFLGGQKEEMMNPNKQQRRNLYFFFVFVFYVFILCARFQTSEATKDSSAQVKLQNRRLSSTVVFPVSGNVYPLGYYYVLLNIGNPPKLFDLDIDTGSDLTWVQCDAPCNGCTKPRAKQYKPNHNTLPCSHILCSGLDLPQDRPCADPEDQCDYEIGYSDHASSIGALVTDEVPLKLANGSIMNLRLTFGCGYDQQNPGPHPPPPTAGILGLGRGKVGLSTQLKSLGITKNVIVHCLSHTGKGFLSIGDELVPSSGVTWTSLATNSPSKNYMAGPAELLFNDKTTGVKGINVVFDSGSSYTYFNAEAYQAILDLIRKDLNGKPLTDTKDDKSLPVCWKGKKPLKSLDEVKKYFKTITLRFGNQKNGQLFQVPPESYLIITEKGRVCLGILNGTEIGLEGYNIIGDISFQGIMVIYDNEKQRIGWISSDCDKLPNVNHDYGGDLSEEAYPIGFGLIKELFSGSDSSKNKNLVSDGEL

SEQ ID NO: 29892 - protein, 466 aa, Arabidopsis thaliana
  peptide (1)..(466): Ceres Seq. ID no. 13492903
  misc_feature (16)..(417): Pfam Name: Eukaryotic aspartyl protease Pfam Description: Eukaryotic aspartyl protease
  misc_feature (50)..(423): Homolog of NCBI NO: 33340111 NR Description: nucellin-like protein [Oryza sativa]
  misc_feature (73)..(421): Homolog of NCBI NO: 21805926 NR Description: nucellin-like aspartic protease [Zea mays]
  misc_feature (372)..(425): Homolog of NCBI NO: 7484812 NR Description: aspartic proteinase homolog F17M5.250 -
  misc_feature (51)..(370): Homolog of NCBI NO: 7484812 NR Description: aspartic proteinase homolog F17M5.250 -
  misc_feature (48)..(425): Homolog of NCBI NO: 26452545 NR Description: putative nucellin [Arabidopsis thaliana]
  misc_feature (48)..(425): Homolog of NCBI NO: 18418224 NR Description: nucellin protein, putative [Arabidopsis thaliana]
  misc_feature (51)..(423): Homolog of NCBI NO: 15219354 NR Description: nucellin protein, putative [Arabidopsis thaliana]
  misc_feature (1)..(423): Homolog of NCBI NO: 25350204 NR Description: nucellin-like protein, 27671-25467
  misc_feature (1)..(423): Homolog of NCBI NO: 30699263 NR Description: nucellin protein, putative [Arabidopsis thaliana]
  misc_feature (1)..(466): Homolog of NCBI NO: 30699261 NR Description: nucellin protein, putative [Arabidopsis thaliana]
MMNPNKQQRRNLYFFFVFVFYVFILCARFQTSEATKDSSAQVKLQNRRLSSTVVFPVSGNVYPLGYYYVLLNIGNPPKLFDLDIDTGSDLTWVQCDAPCNGCTKPRAKQYKPNHNTLPCSHILCSGLDLPQDRPCADPEDQCDYEIGYSDHASSIGALVTDEVPLKLANGSIMNLRLTFGCGYDQQNPGPHPPPPTAGILGLGRGKVGLSTQLKSLGITKNVIVHCLSHTGKGFLSIGDELVPSSGVTWTSLATNSPSKNYMAGPAELLFNDKTTGVKGINVVFDSGSSYTYFNAEAYQAILDLIRKDLNGKPLTDTKDDKSLPVCWKGKKPLKSLDEVKKYFKTITLRFGNQKNGQLFQVPPESYLIITEKGRVCLGILNGTEIGLEGYNIIGDISFQGIMVIYDNEKQRIGWISSDCDKLPNVNHDYGGDLSEEAYPIGFGLIKELFSGSDSSKNKNLVSDGEL

SEQ ID NO: 29893 - protein, 465 aa, Arabidopsis thaliana
  peptide (1)..(465): Ceres Seq. ID no. 13492904
  misc_feature (15)..(416): Pfam Name: Eukaryotic aspartyl protease Pfam Description: Eukaryotic aspartyl protease
  misc_feature (49)..(422): Homolog of NCBI NO: 33340111 NR Description: nucellin-like protein [Oryza sativa]
  misc_feature (72)..(420): Homolog of NCBI NO: 21805926 NR Description: nucellin-like aspartic protease [Zea mays]
  misc_feature (371)..(424): Homolog of NCBI NO: 7484812 NR Description: aspartic proteinase homolog F17M5.250 -
  misc_feature (50)..(369): Homolog of NCBI NO: 7484812 NR Description: aspartic proteinase homolog F17M5.250 -
  misc_feature (47)..(424): Homolog of NCBI NO: 26452545 NR Description: putative nucellin [Arabidopsis thaliana]
  misc_feature (47)..(424): Homolog of NCBI NO: 18418224 NR Description: nucellin protein, putative [Arabidopsis thaliana]
  misc_feature (50)..(422): Homolog of NCBI NO: 15219354 NR Description: nucellin protein, putative [Arabidopsis thaliana]
  misc_feature (1)..(422): Homolog of NCBI NO: 25350204 NR Description: nucellin-like protein, 27671-25467
  misc_feature (1)..(422): Homolog of NCBI NO: 30699263 NR Description: nucellin protein, putative [Arabidopsis thaliana]
  misc_feature (1)..(465): Homolog of NCBI NO: 30699261 NR Description: nucellin protein, putative [Arabidopsis thaliana]
MNPNKQQRRNLYFFFVFVFYVFILCARFQTSEATKDSSAQVKLQNRRLSSTVVFPVSGNVYPLGYYYVLLNIGNPPKLFDLDIDTGSDLTWVQCDAPCNGCTKPRAKQYKPNHNTLPCSHILCSGLDLPQDRPCADPEDQCDYEIGYSDHASSIGALVTDEVPLKLANGSIMNLRLTFGCGYDQQNPGPHPPPPTAGILGLGRGKVGLSTQLKSLGITKNVIVHCLSHTGKGFLSIGDELVPSSGVTWTSLATNSPSKNYMAGPAELLFNDKTTGVKGINVVFDSGSSYTYFNAEAYQAILDLIRKDLNGKPLTDTKDDKSLPVCWKGKKPLKSLDEVKKYFKTITLRFGNQKNGQLFQVPPESYLIITEKGRVCLGILNGTEIGLEGYNIIGDISFQGIMVIYDNEKQRIGWISSDCDKLPNVNHDYGGDLSEEAYPIGFGLIKELFSGSDSSKNKNLVSDGEL

SEQ ID NO: 29894 - DNA, 1232 bp, Arabidopsis thaliana
  misc_feature (1)..(1232): Ceres Seq. ID no. 13490604
  misc_feature: MA Experiment ID: 108573 Result: Up-regulated in Transcription
  misc_feature: MA Experiment 108573 PARAMETER Experiment Name: At_Drought_cDNA_P Parameter: Timepoint (hr) Value: 6
  misc_feature: MA Experiment 108573 PARAMETER Experiment Name: At_Drought_cDNA_P Parameter: Tissue Value: Aerial
  misc_feature: MA Experiment 108573 PARAMETER Experiment Name: At_Drought_cDNA_P Parameter: Treatment Value: Drought vs. No Drought
  misc_feature: MA Experiment ID: 20000111 Result: Up-regulated in Transcription
  misc_feature: MA Experiment 20000111 PARAMETER Experiment Name: At_42deg_Heat_cDNA_P Parameter: Temperature (deg C) Value: 42 vs. 22
  misc_feature: MA Experiment 20000111 PARAMETER Experiment Name: At_42deg_Heat_cDNA_P Parameter: Timepoint (hr) Value: 6
  misc_feature: MA Experiment 20000111 PARAMETER Experiment Name: At_42deg_Heat_cDNA_P Parameter: Tissue Value: Aerial
  misc_feature: MA Experiment ID: 20000112 Result: Up-regulated in Transcription
  misc_feature: MA Experiment 20000112 PARAMETER Experiment Name: At_42deg_Heat_cDNA_P Parameter: Temperature (deg C) Value: 42 vs. 22
  misc_feature: MA Experiment 20000112 PARAMETER Experiment Name: At_42deg_Heat_cDNA_P Parameter: Timepoint (hr) Value: 2
  misc_feature: MA Experiment 20000112 PARAMETER Experiment Name: At_42deg_Heat_cDNA_P Parameter: Tissue Value: Aerial
  misc_feature: MA Experiment ID: 20000113 Result: Up-regulated in Transcription
  misc_feature: MA Experiment 20000113 PARAMETER Experiment Name: At_42deg_Heat_cDNA_P Parameter: Temperature (deg C) Value: 42 vs. 22
  misc_feature: MA Experiment 20000113 PARAMETER Experiment Name: At_42deg_Heat_cDNA_P Parameter: Timepoint (hr) Value: 8
  misc_feature: MA Experiment 20000113 PARAMETER Experiment Name: At_42deg_Heat_cDNA_P Parameter: Tissue Value: Aerial
  misc_feature: MA Experiment ID: 20000171 Result: Up-regulated in Transcription
  misc_feature: MA Experiment 20000171 PARAMETER Experiment Name: At_42deg_Heat_P Parameter: Age (day) Value: 14
  misc_feature: MA Experiment 20000171 PARAMETER Experiment Name: At_42deg_Heat_P Parameter: Organism Value: A. thaliana
  misc_feature: MA Experiment 20000171 PARAMETER Experiment Name: At_42deg_Heat_P Parameter: Plant Line Value: WS
  misc_feature: MA Experiment 20000171 PARAMETER Experiment Name: At_42deg_Heat_P Parameter: Temperature (deg C) Value: 42 vs. 22
  misc_feature: MA Experiment 20000171 PARAMETER Experiment Name: At_42deg_Heat_P Parameter: Timepoint (hr) Value: 1
  misc_feature: MA Experiment 20000171 PARAMETER Experiment Name: At_42deg_Heat_P Parameter: Tissue Value: Aerial
  misc_feature: MA Experiment ID: 20000173 Result: Up-regulated in Transcription
  misc_feature: MA Experiment 20000173 PARAMETER Experiment Name: At_42deg_Heat_P Parameter: Age (day) Value: 14
  misc_feature: MA Experiment 20000173 PARAMETER Experiment Name: At_42deg_Heat_P Parameter: Organism Value: A. thaliana
  misc_feature: MA Experiment 20000173 PARAMETER Experiment Name: At_42deg_Heat_P Parameter: Plant Line Value: WS
  misc_feature: MA Experiment 20000173 PARAMETER Experiment Name: At_42deg_Heat_P Parameter: Temperature (deg C) Value: 42 vs. 22
  misc_feature: MA Experiment 20000173 PARAMETER Experiment Name: At_42deg_Heat_P Parameter: Timepoint (hr) Value: 6
  misc_feature: MA Experiment 20000173 PARAMETER Experiment Name: At_42deg_Heat_P Parameter: Tissue Value: Aerial
  misc_feature: MA Experiment ID: 20001905 Result: Up-regulated in Transcription
  misc_feature: MA Experiment 20001905 PARAMETER Experiment Name: At_Drought_Reproduction_P Parameter: Age (day) Value: 40
  misc_feature: MA Experiment 20001905 PARAMETER Experiment Name: At_Drought_Reproduction_P Parameter: Organism Value: A. thaliana
  misc_feature: MA Experiment 20001905 PARAMETER Experiment Name: At_Drought_Reproduction_P Parameter: Plant Line Value: WS
  misc_feature: MA Experiment 20001905 PARAMETER Experiment Name: At_Drought_Reproduction_P Parameter: Timepoint (day) Value: 10
  misc_feature: MA Experiment 20001905 PARAMETER Experiment Name: At_Drought_Reproduction_P Parameter: Tissue Value: Rosettes
  misc_feature: MA Experiment 20001905 PARAMETER Experiment Name: At_Drought_Reproduction_P Parameter: Treatment Value: Drought vs. No Drought
aattccccaatttctccaatctgagaaaatagggtttccgatttggatccttaattcagacacctgactcgtcttctcatcctacccccaattcaatattcgtcgccaatatgccgcaaagacactcgaagaacaacaatgatcttgcgtatttcacttacgacgagaagaagaagttaggttatggaactcagagagagagattggggagagactcgatcaaaccctttgatgcttgttctctctgcttgaagcctttcattgatccgatgtgttgccataagggtcatgtcttttgcagagagtgtatgcttgaatgtttccttgctcagaagaaagatatccaaaggaggcttgctgcacattcgtctcaaaagaagcaagataaggatgaagaagaagagaggctaatgttacaaaaggcgagagagctcgacgaatttgatcagcaaaaccatagtgcaatgcctcgaaacagtgacaagaatcacgacgaagataagaatggttttcatggggcaaacagtgtgaagacgacttcctttgaagaagaagcgcttaggacaatgaaagccttctggctcccatcagctacaccagcagcttcggtcagagtagatgctccagaaactcacacagtctgtccagagggcaaagagaagctcaagcttaagaacctctttgcaattcgtttcacagaagacaacagcgaagaggaagagaccaagacaaaatcagcatcttcaagctcttatgataaatcctacatctgcccgagctgcaaagtcactctcaccaacacaatgtccctcgtggcacttagctcatgcggacatgttttctgcaagaagtgtgctgagaagtttatgcccgtcgacaaagtctgtcttgtgtgtgacaaaccttgcaaggataggaacttggttgggttaaagaaagtaggcacgggtttcgctgagcacgacgatcatcttgaggctaaggagtacaagcatttgggtagtggatctggtttggggcttgtgaggccggttaagacatgatgtaaccacatcaaatgttctgttccagttacagaaaatatccttgattttgtaatacttatggcttgtatcctttgctacaactaagagacgctgctttctccattttggctcttggtttgtccttttgatcggatcctatttgtgtttcttccctacggagatcaaatggaaatttaacatttaagt

SEQ ID NO: 29895 - protein, 310 aa, Arabidopsis thaliana
  peptide (1)..(310): Ceres Seq. ID no. 13490605
  misc_feature (146)..(276): Homolog of NCBI NO: 32414767 NR Description: hypothetical protein [Neurospora crassa]
  misc_feature (4)..(291): Homolog of NCBI NO: 13384956 NR Description: RIKEN cDNA 2310061K06 [Mus musculus]
  misc_feature (4)..(292): Homolog of NCBI NO: 15030017 NR Description: Similar to eNOS interacting protein [Homo sapiens]
  misc_feature (4)..(291): Homolog of NCBI NO: 27731403 NR Description: similar to RIKEN cDNA 2310061K06
  misc_feature (4)..(292): Homolog of NCBI NO: 7705716 NR Description: eNOS interacting protein; CGI-25 protein [Homo
  misc_feature (4)..(292): Homolog of NCBI NO: 38174118 NR Description: Unknown (protein for MGC:75989) [Silurana
  misc_feature (4)..(292): Homolog of NCBI NO: 24643007 NR Description: CG6179-PA [Drosophila melanogaster]
  misc_feature (4)..(294): Homolog of NCBI NO: 31213459 NR Description: ENSANGP00000021661 [Anopheles gambiae]
  misc_feature (1)..(310): Homolog of NCBI NO: 18407260 NR Description: expressed protein [Arabidopsis thaliana]
  misc_feature (1)..(310): Homolog of NCBI NO: 26449463 NR Description: unknown protein [Arabidopsis thaliana]
MPQRHSKNNNDLAYFTYDEKKKLGYGTQRERLGRDSIKPFDACSLCLKPFIDPMCCHKGHVFCRECMLECFLAQKKDIQRRLAAHSSQKKQDKDEEEERLMLQKARELDEFDQQNHSAMPRNSDKNHDEDKNGFHGANSVKTTSFEEEALRTMKAFWLPSATPAASVRVDAPETHTVCPEGKEKLKLKNLFAIRFTEDNSEEEETKTKSASSSSYDKSYICPSCKVTLTNTMSLVALSSCGHVFCKKCAEKFMPVDKVCLVCDKPCKDRNLVGLKKVGTGFAEHDDHLEAKEYKHLGSGSGLGLVRPVKT

SEQ ID NO: 29896 - protein, 257 aa, Arabidopsis thaliana
  peptide (1)..(257): Ceres Seq. ID no. 13490606
  misc_feature (93)..(223): Homolog of NCBI NO: 32414767 NR Description: hypothetical protein [Neurospora crassa]
  misc_feature (1)..(238): Homolog of NCBI NO: 13384956 NR Description: RIKEN cDNA 2310061K06 [Mus musculus]
  misc_feature (1)..(239): Homolog of NCBI NO: 15030017 NR Description: Similar to eNOS interacting protein [Homo sapiens]
  misc_feature (1)..(238): Homolog of NCBI NO: 27731403 NR Description: similar to RIKEN cDNA 2310061K06
  misc_feature (1)..(239): Homolog of NCBI NO: 7705716 NR Description: eNOS interacting protein; CGI-25 protein [Homo
  misc_feature (1)..(239): Homolog of NCBI NO: 38174118 NR Description: Unknown (protein for MGC:75989) [Silurana
  misc_feature (1)..(239): Homolog of NCBI NO: 24643007 NR Description: CG6179-PA [Drosophila melanogaster]
  misc_feature (1)..(241): Homolog of NCBI NO: 31213459 NR Description: ENSANGP00000021661 [Anopheles gambiae]
  misc_feature (1)..(257): Homolog of NCBI NO: 18407260 NR Description: expressed protein [Arabidopsis thaliana]
  misc_feature (1)..(257): Homolog of NCBI NO: 26449463 NR Description: unknown protein [Arabidopsis thaliana]
MCCHKGHVFCRECMLECFLAQKKDIQRRLAAHSSQKKQDKDEEEERLMLQKARELDEFDQQNHSAMPRNSDKNHDEDKNGFHGANSVKTTSFEEEALRTMKAFWLPSATPAASVRVDAPETHTVCPEGKEKLKLKNLFAIRFTEDNSEEEETKTKSASSSSYDKSYICPSCKVTLTNTMSLVALSSCGHVFCKKCAEKFMPVDKVCLVCDKPCKDRNLVGLKKVGTGFAEHDDHLEAKEYKHLGSGSGLGLVRPVKT

SEQ ID NO: 29897 - protein, 244 aa, Arabidopsis thaliana
  peptide (1)..(244): Ceres Seq. ID no. 13490607
  misc_feature (80)..(210): Homolog of NCBI NO: 32414767 NR Description: hypothetical protein [Neurospora crassa]
  misc_feature (1)..(225): Homolog of NCBI NO: 13384956 NR Description: RIKEN cDNA 2310061K06 [Mus musculus]
  misc_feature (1)..(226): Homolog of NCBI NO: 15030017 NR Description: Similar to eNOS interacting protein [Homo sapiens]
  misc_feature (1)..(225): Homolog of NCBI NO: 27731403 NR Description: similar to RIKEN cDNA 2310061K06
  misc_feature (1)..(226): Homolog of NCBI NO: 7705716 NR Description: eNOS interacting protein; CGI-25 protein [Homo
  misc_feature (1)..(226): Homolog of NCBI NO: 38174118 NR Description: Unknown (protein for MGC:75989) [Silurana
  misc_feature (1)..(226): Homolog of NCBI NO: 24643007 NR Description: CG6179-PA [Drosophila melanogaster]
  misc_feature (1)..(228): Homolog of NCBI NO: 31213459 NR Description: ENSANGP00000021661 [Anopheles gambiae]
  misc_feature (1)..(244): Homolog of NCBI NO: 18407260 NR Description: expressed protein [Arabidopsis thaliana]
  misc_feature (1)..(244): Homolog of NCBI NO: 26449463 NR Description: unknown protein [Arabidopsis thaliana]
MLECFLAQKKDIQRRLAAHSSQKKQDKDEEEERLMLQKARELDEFDQQNHSAMPRNSDKNHDEDKNGFHGANSVKTTSFEEEALRTMKAFWLPSATPAASVRVDAPETHTVCPEGKEKLKLKNLFAIRFTEDNSEEEETKTKSASSSSYDKSYICPSCKVTLTNTMSLVALSSCGHVFCKKCAEKFMPVDKVCLVCDKPCKDRNLVGLKKVGTGFAEHDDHLEAKEYKHLGSGSGLGLVRPVKT

SEQ ID NO: 29898 - DNA, 1821 bp, Arabidopsis thaliana
  misc_feature (1)..(1821): Ceres Seq. ID no. 13490490
  misc_feature: MA Experiment ID: 108434 Result: Down-regulated in Transcription
  misc_feature: MA Experiment 108434 PARAMETER Experiment Name: At_Root_Tips_cDNA_P Parameter: Tissue Value: Root Tips
  misc_feature: MA Experiment ID: 108463 Result: Up-regulated in Transcription
  misc_feature: MA Experiment 108463 PARAMETER Experiment Name: At_Germinating_Seeds_cDNA_P Parameter: Age (day) Value: 3 vs. 0
  misc_feature: MA Experiment 108463 PARAMETER Experiment Name: At_Germinating_Seeds_cDNA_P Parameter: Tissue Value: Germinating Seeds
  misc_feature: MA Experiment ID: 108464 Result: Up-regulated in Transcription
  misc_feature: MA Experiment 108464 PARAMETER Experiment Name: At_Germinating_Seeds_cDNA_P Parameter: Age (day) Value: 4 vs. 0
  misc_feature: MA Experiment 108464 PARAMETER Experiment Name: At_Germinating_Seeds_cDNA_P Parameter: Tissue Value: Germinating Seeds
  misc_feature: MA Experiment ID: 108488 Result: Down-regulated in Transcription
  misc_feature: MA Experiment ID: 108489 Result: Up-regulated in Transcription
  misc_feature: MA Experiment ID: 108561 Result: Up-regulated in Transcription
  misc_feature: MA Experiment 108561 PARAMETER Experiment Name: At_100uM_ABA_cDNA_P Parameter: Timepoint (hr) Value: 6
  misc_feature: MA Experiment 108561 PARAMETER Experiment Name: At_100uM_ABA_cDNA_P Parameter: Tissue Value: Aerial
  misc_feature: MA Experiment 108561 PARAMETER Experiment Name: At_100uM_ABA_cDNA_P Parameter: Treatment Value: 100uM ABA vs. No Treatment
  misc_feature: MA Experiment ID: 108572 Result: Up-regulated in Transcription
  misc_feature: MA Experiment 108572 PARAMETER Experiment Name: At_Drought_cDNA_P Parameter: Timepoint (hr) Value: 1
  misc_feature: MA Experiment 108572 PARAMETER Experiment Name: At_Drought_cDNA_P Parameter: Tissue Value: Aerial
  misc_feature: MA Experiment 108572 PARAMETER Experiment Name: At_Drought_cDNA_P Parameter: Treatment Value: Drought vs. No Drought
  misc_feature: MA Experiment ID: 108573 Result: Up-regulated in Transcription
  misc_feature: MA Experiment 108573 PARAMETER Experiment Name: At_Drought_cDNA_P Parameter: Timepoint (hr) Value: 6
  misc_feature: MA Experiment 108573 PARAMETER Experiment Name: At_Drought_cDNA_P Parameter: Tissue Value: Aerial
  misc_feature: MA Experiment 108573 PARAMETER Experiment Name: At_Drought_cDNA_P Parameter: Treatment Value: Drought vs. No Drought
  misc_feature: MA Experiment ID: 108579 Result: Up-regulated in Transcription
  misc_feature: MA Experiment 108579 PARAMETER Experiment Name: At_4deg_Cold_cDNA_P Parameter: Temperature (deg C) Value: 4 vs. 22
  misc_feature: MA Experiment 108579 PARAMETER Experiment Name: At_4deg_Cold_cDNA_P Parameter: Timepoint (hr) Value: 6
  misc_feature: MA Experiment 108579 PARAMETER Experiment Name: At_4deg_Cold_cDNA_P Parameter: Tissue Value: Aerial
  misc_feature: MA Experiment ID: 108585 Result: Up-regulated in Transcription
  misc_feature: MA Experiment 108585 PARAMETER Experiment Name: At_5mM_NaNP_cDNA_P Parameter: Timepoint (hr) Value: 6
  misc_feature: MA Experiment 108585 PARAMETER Experiment Name: At_5mM_NaNP_cDNA_P Parameter: Tissue Value: Aerial
  misc_feature: MA Experiment 108585 PARAMETER Experiment Name: At_5mM_NaNP_cDNA_P Parameter: Treatment Value: null
  misc_feature: MA Experiment ID: 108605 Result: Up-regulated in Transcription
  misc_feature: MA Experiment 108605 PARAMETER Experiment Name: At_100uM_ABA_cDNA_P Parameter: Timepoint (hr) Value: 6
  misc_feature: MA Experiment 108605 PARAMETER Experiment Name: At_100uM_ABA_cDNA_P Parameter: Tissue Value: Aerial
  misc_feature: MA Experiment 108605 PARAMETER Experiment Name: At_100uM_ABA_cDNA_P Parameter: Treatment Value: 100uM ABA vs. No Treatment
  misc_feature: MA Experiment ID: 108607 Result: Up-regulated in Transcription
  misc_feature: MA Experiment 108607 PARAMETER Experiment Name: At_100uM_ABA_cDNA_P Parameter: Timepoint (hr) Value: 4
  misc_feature: MA Experiment 108607 PARAMETER Experiment Name: At_100uM_ABA_cDNA_P Parameter: Tissue Value: Aerial
  misc_feature: MA Experiment 108607 PARAMETER Experiment Name: At_100uM_ABA_cDNA_P Parameter: Treatment Value: 100uM ABA vs. No Treatment
  misc_feature: MA Experiment ID: 108609 Result: Up-regulated in Transcription
  misc_feature: MA Experiment 108609 PARAMETER Experiment Name: At_100uM_ABA_cDNA_P Parameter: Timepoint (hr) Value: 24
  misc_feature: MA Experiment 108609 PARAMETER Experiment Name: At_100uM_ABA_cDNA_P Parameter: Tissue Value: Aerial
  misc_feature: MA Experiment 108609 PARAMETER Experiment Name: At_100uM_ABA_cDNA_P Parameter: Treatment Value: 100uM ABA vs. No Treatment
  misc_feature: MA Experiment ID: 20000069 Result: Up-regulated in Transcription
  misc_feature: MA Experiment 20000069 PARAMETER Experiment Name: At_100uM_ABA_Mutants_cDNA_P Parameter: Plant Line Value: CS23
  misc_feature: MA Experiment 20000069 PARAMETER Experiment Name: At_100uM_ABA_Mutants_cDNA_P Parameter: Timepoint (hr) Value: 6
  misc_feature: MA Experiment 20000069 PARAMETER Experiment Name: At_100uM_ABA_Mutants_cDNA_P Parameter: Tissue Value: Aerial
  misc_feature: MA Experiment 20000069 PARAMETER Experiment Name: At_100uM_ABA_Mutants_cDNA_P Parameter: Treatment Value: 100uM ABA vs. No Treatment
  misc_feature: MA Experiment ID: 20000070 Result: Up-regulated in Transcription
  misc_feature: MA Experiment 20000070 PARAMETER Experiment Name: At_100uM_ABA_Mutants_cDNA_P Parameter: Plant Line Value: CS24
  misc_feature: MA Experiment 20000070 PARAMETER Experiment Name: At_100uM_ABA_Mutants_cDNA_P Parameter: Timepoint (hr) Value: 6
  misc_feature: MA Experiment 20000070 PARAMETER Experiment Name: At_100uM_ABA_Mutants_cDNA_P Parameter: Tissue Value: Aerial
  misc_feature: MA Experiment 20000070 PARAMETER Experiment Name: At_100uM_ABA_Mutants_cDNA_P Parameter: Treatment Value: 100uM ABA vs. No Treatment
  misc_feature: MA Experiment ID: 20000071 Result: Up-regulated in Transcription
  misc_feature: MA Experiment 20000071 PARAMETER Experiment Name: At_100uM_ABA_Mutants_cDNA_P Parameter: Plant Line Value: CS8104
  misc_feature: MA Experiment 20000071 PARAMETER Experiment Name: At_100uM_ABA_Mutants_cDNA_P Parameter: Timepoint (hr) Value: 6
  misc_feature: MA Experiment 20000071 PARAMETER Experiment Name: At_100uM_ABA_Mutants_cDNA_P Parameter: Tissue Value: Aerial
  misc_feature: MA Experiment 20000071 PARAMETER Experiment Name: At_100uM_ABA_Mutants_cDNA_P Parameter: Treatment Value: 100uM ABA vs. No Treatment
  misc_feature: MA Experiment ID: 20000072 Result: Up-regulated in Transcription
  misc_feature: MA Experiment 20000072 PARAMETER Experiment Name: At_100uM_ABA_Mutants_cDNA_P Parameter: Plant Line Value: CS8105
  misc_feature: MA Experiment 20000072 PARAMETER Experiment Name: At_100uM_ABA_Mutants_cDNA_P Parameter: Timepoint (hr) Value: 6
  misc_feature: MA Experiment 20000072 PARAMETER Experiment Name: At_100uM_ABA_Mutants_cDNA_P Parameter: Tissue Value: Aerial
  misc_feature: MA Experiment 20000072 PARAMETER Experiment Name: At_100uM_ABA_Mutants_cDNA_P Parameter: Treatment Value: 100uM ABA vs. No Treatment
  misc_feature: MA Experiment ID: 20000086 Result: Up-regulated in Transcription
  misc_feature: MA Experiment 20000086 PARAMETER Experiment Name: At_100uM_ABA_Mutants_cDNA_P Parameter: Plant Line Value: CS22
  misc_feature: MA Experiment 20000086 PARAMETER Experiment Name: At_100uM_ABA_Mutants_cDNA_P Parameter: Timepoint (hr) Value: 6
  misc_feature: MA Experiment 20000086 PARAMETER Experiment Name: At_100uM_ABA_Mutants_cDNA_P Parameter: Tissue Value: Aerial
  misc_feature: MA Experiment 20000086 PARAMETER Experiment Name: At_100uM_ABA_Mutants_cDNA_P Parameter: Treatment Value: 100uM ABA vs. No Treatment
  misc_feature: MA Experiment ID: 20000087 Result: Up-regulated in Transcription
  misc_feature: MA Experiment 20000087 PARAMETER Experiment Name: At_100uM_ABA_Mutants_cDNA_P Parameter: Plant Line Value: WS
  misc_feature: MA Experiment 20000087 PARAMETER Experiment Name: At_100uM_ABA_Mutants_cDNA_P Parameter: Timepoint (hr) Value: 6
  misc_feature: MA Experiment 20000087 PARAMETER Experiment Name: At_100uM_ABA_Mutants_cDNA_P Parameter: Tissue Value: Aerial
  misc_feature: MA Experiment 20000087 PARAMETER Experiment Name: At_100uM_ABA_Mutants_cDNA_P Parameter: Treatment Value: 100uM ABA vs. No Treatment
  misc_feature: MA Experiment ID: 20000088 Result: Up-regulated in Transcription
  misc_feature: MA Experiment 20000088 PARAMETER Experiment Name: At_100uM_ABA_Mutants_cDNA_P Parameter: Plant Line Value: Landsberg
  misc_feature: MA Experiment 20000088 PARAMETER Experiment Name: At_100uM_ABA_Mutants_cDNA_P Parameter: Timepoint (hr) Value: 6
  misc_feature: MA Experiment 20000088 PARAMETER Experiment Name: At_100uM_ABA_Mutants_cDNA_P Parameter: Tissue Value: Aerial
  misc_feature: MA Experiment 20000088 PARAMETER Experiment Name: At_100uM_ABA_Mutants_cDNA_P Parameter: Treatment Value: 100uM ABA vs. No Treatment
  misc_feature: MA Experiment ID: 20000117 Result: Up-regulated in Transcription
  misc_feature: MA Experiment 20000117 PARAMETER Experiment Name: At_100uM_ABA_Mutants_cDNA_P Parameter: Plant Line Value: Columbia
  misc_feature: MA Experiment 20000117 PARAMETER Experiment Name: At_100uM_ABA_Mutants_cDNA_P Parameter: Timepoint (hr) Value: 6
  misc_feature: MA Experiment 20000117 PARAMETER Experiment Name: At_100uM_ABA_Mutants_cDNA_P Parameter: Tissue Value: Aerial
  misc_feature: MA Experiment 20000117 PARAMETER Experiment Name: At_100uM_ABA_Mutants_cDNA_P Parameter: Treatment Value: 100uM ABA vs. No Treatment
  misc_feature: MA Experiment ID: 20000315 Result: Down-regulated in Transcription
  misc_feature: MA Experiment 20000315 PARAMETER Experiment Name: At_14day_Shoots-Roots_Sub_P Parameter: Age (day) Value: 14
  misc_feature: MA Experiment 20000315 PARAMETER Experiment Name: At_14day_Shoots-Roots_Sub_P Parameter: Organism Value: A. thaliana
  misc_feature: MA Experiment 20000315 PARAMETER Experiment Name: At_14day_Shoots-Roots_Sub_P Parameter: Plant Line Value: WS
  misc_feature: MA Experiment 20000315 PARAMETER Experiment Name: At_14day_Shoots-Roots_Sub_P Parameter: Tissue Value: Shoots vs. Whole Plant
  misc_feature: MA Experiment ID: 20000329 Result: Up-regulated in Transcription
  misc_feature: MA Experiment 20000329 PARAMETER Experiment Name: At_4deg_Cold_Sub_P Parameter: Age (day) Value: 14
  misc_feature: MA Experiment 20000329 PARAMETER Experiment Name: At_4deg_Cold_Sub_P Parameter: Organism Value: A. thaliana
  misc_feature: MA Experiment 20000329 PARAMETER Experiment Name: At_4deg_Cold_Sub_P Parameter: Plant Line Value: WS
  misc_feature: MA Experiment 20000329 PARAMETER Experiment Name: At_4deg_Cold_Sub_P Parameter: Temperature (deg C) Value: 4 vs. 22
  misc_feature: MA Experiment 20000329 PARAMETER Experiment Name: At_4deg_Cold_Sub_P Parameter: Timepoint (hr) Value: 6
  misc_feature: MA Experiment 20000329 PARAMETER Experiment Name: At_4deg_Cold_Sub_P Parameter: Tissue Value: Aerial
  misc_feature: MA Experiment ID: 20000349 Result: Up-regulated in Transcription
  misc_feature: MA Experiment 20000349 PARAMETER Experiment Name: At_100uM_ABA_Sub_P Parameter: Age (day) Value: 14
  misc_feature: MA Experiment 20000349 PARAMETER Experiment Name: At_100uM_ABA_Sub_P Parameter: Organism Value: A. thaliana
  misc_feature: MA Experiment 20000349 PARAMETER Experiment Name: At_100uM_ABA_Sub_P Parameter: Plant Line Value: WS
  misc_feature: MA Experiment 20000349 PARAMETER Experiment Name: At_100uM_ABA_Sub_P Parameter: Timepoint (hr) Value: 6
  misc_feature: MA Experiment 20000349 PARAMETER Experiment Name: At_100uM_ABA_Sub_P Parameter: Tissue Value: Aerial
  misc_feature: MA Experiment 20000349 PARAMETER Experiment Name: At_100uM_ABA_Sub_P Parameter: Treatment Value: 100uM ABA vs. No Treatment
  misc_feature: MA Experiment ID: 20000352 Result: Up-regulated in Transcription
  misc_feature: MA Experiment 20000352 PARAMETER Experiment Name: At_Drought_Sub_P Parameter: Age (day) Value: 7
  misc_feature: MA Experiment 20000352 PARAMETER Experiment Name: At_Drought_Sub_P Parameter: Organism Value: A. thaliana
  misc_feature: MA Experiment 20000352 PARAMETER Experiment Name: At_Drought_Sub_P Parameter: Plant Line Value: WS
  misc_feature: MA Experiment 20000352 PARAMETER Experiment Name: At_Drought_Sub_P Parameter: Timepoint (hr) Value: 6
  misc_feature: MA Experiment 20000352 PARAMETER Experiment Name: At_Drought_Sub_P Parameter: Tissue Value: Whole Plant
  misc_feature: MA Experiment 20000352 PARAMETER Experiment Name: At_Drought_Sub_P Parameter: Treatment Value: Drought vs. No Drought
  misc_feature: MA Experiment ID: 20000355 Result: Down-regulated in Transcription
  misc_feature: MA Experiment 20000355 PARAMETER Experiment Name: At_Siliques_Sub_P Parameter: Age (day) Value: 21
  misc_feature: MA Experiment 20000355 PARAMETER Experiment Name: At_Siliques_Sub_P Parameter: Organism Value: A. thaliana
  misc_feature: MA Experiment 20000355 PARAMETER Experiment Name: At_Siliques_Sub_P Parameter: Plant Line Value: WS
  misc_feature: MA Experiment 20000355 PARAMETER Experiment Name: At_Siliques_Sub_P Parameter: Tissue Value: Less Than 5mm Siliques vs. Whole Plant
  misc_feature: MA Experiment ID: 20000440 Result: Down-regulated in Transcription
  misc_feature: MA Experiment 20000440 PARAMETER Experiment Name: At_Closed-Flower__Sub_P Parameter: Tissue Value: Closed Flower vs. Whole Plant
gaaaaaaagattggggaagctgacctctgcctttcctcctccattaatcaaggaatataaatcagctttaaactcagtcctcttatggaagacaaaaaagcaaatatttattcgtaaatataacttcagaaccctttcaacaaaactctctctgttctttctccgtggagaagttaaagatgacgatgtcggagaactcaagaaacttggaagctggtttgctactgaggaagaaccaaaacgacatcaacgaatgtcgtatcactgctgttgtacttttcagtactttcgtttctgtttgtggctctttctgcttcggttgtgcggcaggttattcatcagttgctcaaacagggatcataaatgatttaggtctctctgttgcacaatactccatgtttggttcaatcatgacttttggaggaatgattggtgccatcttcagcgggaaagttgcagatctcatgggtcgaaaagggactatgtggtttgctcaaattttctgcatcttcggttgggttgcagtagcattagcaaaagactccatgtggcttgatattggaagactatccacaggatttgcagttggtttattaagctatgtgataccagtttacattgcagaaataacaccaaaacatgttcgaggagcgtttgtatttgctaatcagctgatgcagagttgtggattgtctttattctacgtcattggaaattttgttcattggcgtaacttggccttaatcggtctcattccatgtgcgttgcaagttgtgactttgttctttattccagagtcccctagactactgggaaaatggggacatgaaaaagaatgtagagcttcattgcaaagtcttcgcggagatgatgcagatatctctgaagaagccaacactatcaaagaaaccatgatcttgtttgatgaaggaccaaaatcgcgggttatggatttgtttcagagaagatatgctccatctgttgttattggtgtgggactaatgcttctacaacaactctctggaagctcaggacttatgtactatgtcggtagcgtatttgataaaggagggtttccaagcagcattggctcaatgattcttgcagtgatcatgataccaaaagctctattgggtctgattttggttgagaaaatgggacgaagaccacttctattggcctctaccggtggaatgtgctttttcagcttgctcctcagtttttccttctgctttcggtcatatggcatgcttgatgagctcactccgattttcacatgtatcggtgtagtgggtttcatctcttcatttgccgtaggcatgggaggcttaccatggatcatcatgtctgagatattcccaatgaatgttaaagtttctgctgggactctggttaccttagccaactggtcctttggttggattgttgctttcgcctacaacttcatgctagagtggaacgcatcaggaacgttcttgatcttctttactatatgtggtgcgggtatagtctttatttatgcgatggtacccgaaactaaaggaagaacattggaagatatacaagcttctcttacagattttctacaatgagatcaagtttgacttgtttaaagttattcattttttcttagattacaattggggggaggtttatagttttttgttgtaattgttacctcatttgatgtgcaattgagaaagagatcacttgaacataaggtttagatatctctctgtctcagtaaattagcccaatgtatgtatagtatagtcccagttttacacccaaaaaaaagaaatataaaattgaactttaagg

SEQ ID NO: 29899 - protein, 470 aa, Arabidopsis thaliana
  peptide (1)..(470): Ceres Seq. ID no. 13490491
  misc_feature (34)..(465): Pfam Name: Sugar (and other) transporter Pfam Description: Sugar (and other) transporter
  misc_feature (1)..(465): Homolog of NCBI NO: 18421106 NR Description: sugar-porter family protein 1 [Arabidopsis
  misc_feature (10)..(466): Homolog of NCBI NO: 18397139 NR Description: sugar transporter, putative [Arabidopsis
  misc_feature (1)..(465): Homolog of NCBI NO: 14585699 NR Description: sugar-porter family protein 1 [Arabidopsis
  misc_feature (1)..(466): Homolog of NCBI NO: 18397141 NR Description: sugar transporter, putative [Arabidopsis thaliana]
  misc_feature (1)..(465): Homolog of NCBI NO: 18421108 NR Description: sugar-porter family protein 2 [Arabidopsis
  misc_feature (16)..(470): Homolog of NCBI NO: 18390959 NR Description: ERD6 protein [Arabidopsis thaliana]
  misc_feature (3)..(438): Homolog of NCBI NO: 25407065 NR Description: hypothetical protein [imported] - Arabidopsis
  misc_feature (1)..(470): Homolog of NCBI NO: 6686827 NR Description: putative sugar transporter [Arabidopsis thaliana]
  misc_feature (1)..(470): Homolog of NCBI NO: 30680865 NR Description: sugar transporter, putative [Arabidopsis thaliana]
  misc_feature (1)..(470): Homolog of NCBI NO: 18390957 NR Description: sugar transporter, putative [Arabidopsis
MTMSENSRNLEAGLLLRKNQNDINECRITAVVLFSTFVSVCGSFCFGCAAGYSSVAQTGIINDLGLSVAQYSMFGSIMTFGGMIGAIFSGKVADLMGRKGTMWFAQIFCIFGWVAVALAKDSMWLDIGRLSTGFAVGLLSYVIPVYIAEITPKHVRGAFVFANQLMQSCGLSLFYVIGNFVHWRNLALIGLIPCALQVVTLFFIPESPRLLGKWGHEKECRASLQSLRGDDADISEEANTIKETMILFDEGPKSRVMDLFQRRYAPSVVIGVGLMLLQQLSGSSGLMYYVGSVFDKGGFPSSIGSMILAVIMIPKALLGLILVEKMGRRPLLLASTGGMCFFSLLLSFSFCFRSYGMLDELTPIFTCIGVVGFISSFAVGMGGLPWIIMSEIFPMNVKVSAGTLVTLANWSFGWIVAFAYNFMLEWNASGTFLIFFTICGAGIVFIYAMVPETKGRTLEDIQASLTDFLQ

SEQ ID NO: 29900 - protein, 468 aa, Arabidopsis thaliana
  peptide (1)..(468): Ceres Seq. ID no. 13490492
  misc_feature (32)..(463): Pfam Name: Sugar (and other) transporter Pfam Description: Sugar (and other) transporter
  misc_feature (1)..(463): Homolog of NCBI NO: 18421106 NR Description: sugar-porter family protein 1 [Arabidopsis
  misc_feature (8)..(464): Homolog of NCBI NO: 18397139 NR Description: sugar transporter, putative [Arabidopsis
  misc_feature (1)..(463): Homolog of NCBI NO: 14585699 NR Description: sugar-porter family protein 1 [Arabidopsis
  misc_feature (1)..(464): Homolog of NCBI NO: 18397141 NR Description: sugar transporter, putative [Arabidopsis thaliana]
  misc_feature (1)..(463): Homolog of NCBI NO: 18421108 NR Description: sugar-porter family protein 2 [Arabidopsis
  misc_feature (14)..(468): Homolog of NCBI NO: 18390959 NR Description: ERD6 protein [Arabidopsis thaliana]
  misc_feature (1)..(436): Homolog of NCBI NO: 25407065 NR Description: hypothetical protein [imported] - Arabidopsis
  misc_feature (1)..(468): Homolog of NCBI NO: 6686827 NR Description: putative sugar transporter [Arabidopsis thaliana]
  misc_feature (1)..(468): Homolog of NCBI NO: 30680865 NR Description: sugar transporter, putative [Arabidopsis thaliana]
  misc_feature (1)..(468): Homolog of NCBI NO: 18390957 NR Description: sugar transporter, putative [Arabidopsis
MSENSRNLEAGLLLRKNQNDINECRITAVVLFSTFVSVCGSFCFGCAAGYSSVAQTGIINDLGLSVAQYSMFGSIMTFGGMIGAIFSGKVADLMGRKGTMWFAQIFCIFGWVAVALAKDSMWLDIGRLSTGFAVGLLSYVIPVYIAEITPKHVRGAFVFANQLMQSCGLSLFYVIGNFVHWRNLALIGLIPCALQVVTLFFIPESPRLLGKWGHEKECRASLQSLRGDDADISEEANTIKETMILFDEGPKSRVMDLFQRRYAPSVVIGVGLMLLQQLSGSSGLMYYVGSVFDKGGFPSSIGSMILAVIMIPKALLGLILVEKMGRRPLLLASTGGMCFFSLLLSFSFCFRSYGMLDELTPIFTCIGVVGFISSFAVGMGGLPWIIMSEIFPMNVKVSAGTLVTLANWSFGWIVAFAYNFMLEWNASGTFLIFFTICGAGIVFIYAMVPETKGRTLEDIQASLTDFLQ

SEQ ID NO: 29901 - protein, 398 aa, Arabidopsis thaliana
  peptide (1)..(398): Ceres Seq. ID no. 13490493
  misc_feature (1)..(393): Pfam Name: Sugar (and other) transporter Pfam Description: Sugar (and other) transporter
  misc_feature (1)..(393): Homolog of NCBI NO: 18421106 NR Description: sugar-porter family protein 1 [Arabidopsis
  misc_feature (1)..(394): Homolog of NCBI NO: 18397139 NR Description: sugar transporter, putative [Arabidopsis
  misc_feature (1)..(393): Homolog of NCBI NO: 14585699 NR Description: sugar-porter family protein 1 [Arabidopsis
  misc_feature (1)..(394): Homolog of NCBI NO: 18397141 NR Description: sugar transporter, putative [Arabidopsis thaliana]
  misc_feature (1)..(393): Homolog of NCBI NO: 18421108 NR Description: sugar-porter family protein 2 [Arabidopsis
  misc_feature (1)..(398): Homolog of NCBI NO: 18390959 NR Description: ERD6 protein [Arabidopsis thaliana]
  misc_feature (1)..(366): Homolog of NCBI NO: 25407065 NR Description: hypothetical protein [imported] - Arabidopsis
  misc_feature (1)..(398): Homolog of NCBI NO: 6686827 NR Description: putative sugar transporter [Arabidopsis thaliana]
  misc_feature (1)..(398): Homolog of NCBI NO: 30680865 NR Description: sugar transporter, putative [Arabidopsis thaliana]
  misc_feature (1)..(398): Homolog of NCBI NO: 18390957 NR Description: sugar transporter, putative [Arabidopsis
MFGSIMTFGGMIGAIFSGKVADLMGRKGTMWFAQIFCIFGWVAVALAKDSMWLDIGRLSTGFAVGLLSYVIPVYIAEITPKHVRGAFVFANQLMQSCGLSLFYVIGNFVHWRNLALIGLIPCALQVVTLFFIPESPRLLGKWGHEKECRASLQSLRGDDADISEEANTIKETMILFDEGPKSRVMDLFQRRYAPSVVIGVGLMLLQQLSGSSGLMYYVGSVFDKGGFPSSIGSMILAVIMIPKALLGLILVEKMGRRPLLLASTGGMCFFSLLLSFSFCFRSYGMLDELTPIFTCIGVVGFISSFAVGMGGLPWIIMSEIFPMNVKVSAGTLVTLANWSFGWIVAFAYNFMLEWNASGTFLIFFTICGAGIVFIYAMVPETKGRTLEDIQASLTDFLQ

SEQ ID NO: 29902 - DNA, 1901 bp, Arabidopsis thaliana
  misc_feature (1)..(1901): Ceres Seq. ID no. 13653850
  misc_feature: MA Experiment ID: 108435 Result: Down-regulated in Transcription
  misc_feature: MA Experiment 108435 PARAMETER Experiment Name: At_stm_Mutants_cDNA_P Parameter: Plant Line Value: wt Landsburg vs stm
  misc_feature: MA Experiment 108435 PARAMETER Experiment Name: At_stm_Mutants_cDNA_P Parameter: Tissue Value: Shoot Apical Meristem Region
  misc_feature: MA Experiment ID: 108461 Result: Up-regulated in Transcription
  misc_feature: MA Experiment 108461 PARAMETER Experiment Name: At_Germinating_Seeds_cDNA_P Parameter: Age (day) Value: 1 vs. 0
  misc_feature: MA Experiment 108461 PARAMETER Experiment Name: At_Germinating_Seeds_cDNA_P Parameter: Tissue Value: Germinating Seeds
  misc_feature: MA Experiment ID: 108462 Result: Up-regulated in Transcription
  misc_feature: MA Experiment 108462 PARAMETER Experiment Name: At_Germinating_Seeds_cDNA_P Parameter: Age (day) Value: 2 vs. 0
  misc_feature: MA Experiment 108462 PARAMETER Experiment Name: At_Germinating_Seeds_cDNA_P Parameter: Tissue Value: Germinating Seeds
  misc_feature: MA Experiment ID: 108463 Result: Up-regulated in Transcription
  misc_feature: MA Experiment 108463 PARAMETER Experiment Name: At_Germinating_Seeds_cDNA_P Parameter: Age (day) Value: 3 vs. 0
  misc_feature: MA Experiment 108463 PARAMETER Experiment Name: At_Germinating_Seeds_cDNA_P Parameter: Tissue Value: Germinating Seeds
  misc_feature: MA Experiment ID: 108464 Result: Up-regulated in Transcription
  misc_feature: MA Experiment 108464 PARAMETER Experiment Name: At_Germinating_Seeds_cDNA_P Parameter: Age (day) Value: 4 vs. 0
  misc_feature: MA Experiment 108464 PARAMETER Experiment Name: At_Germinating_Seeds_cDNA_P Parameter: Tissue Value: Germinating Seeds
  misc_feature: MA Experiment ID: 108579 Result: Up-regulated in Transcription
  misc_feature: MA Experiment 108579 PARAMETER Experiment Name: At_4deg_Cold_cDNA_P Parameter: Temperature (deg C) Value: 4 vs. 22
  misc_feature: MA Experiment 108579 PARAMETER Experiment Name: At_4deg_Cold_cDNA_P Parameter: Timepoint (hr) Value: 6
  misc_feature: MA Experiment 108579 PARAMETER Experiment Name: At_4deg_Cold_cDNA_P Parameter: Tissue Value: Aerial
  misc_feature: MA Experiment ID: 108585 Result: Down-regulated in Transcription
  misc_feature: MA Experiment 108585 PARAMETER Experiment Name: At_5mM_NaNP_cDNA_P Parameter: Timepoint (hr) Value: 6
  misc_feature: MA Experiment 108585 PARAMETER Experiment Name: At_5mM_NaNP_cDNA_P Parameter: Tissue Value: Aerial
  misc_feature: MA Experiment 108585 PARAMETER Experiment Name: At_5mM_NaNP_cDNA_P Parameter: Treatment Value: null
  misc_feature: MA Experiment ID: 108595 Result: Down-regulated in Transcription
  misc_feature: MA Experiment 108595 PARAMETER Experiment Name: At_Ler-pi_Ovule_cDNA_P Parameter: Plant Line Value: null
  misc_feature: MA Experiment ID: 20000069 Result: Down-regulated in Transcription
  misc_feature: MA Experiment 20000069 PARAMETER Experiment Name: At_100uM_ABA_Mutants_cDNA_P Parameter: Plant Line Value: CS23
  misc_feature: MA Experiment 20000069 PARAMETER Experiment Name: At_100uM_ABA_Mutants_cDNA_P Parameter: Timepoint (hr) Value: 6
  misc_feature: MA Experiment 20000069 PARAMETER Experiment Name: At_100uM_ABA_Mutants_cDNA_P Parameter: Tissue Value: Aerial
  misc_feature: MA Experiment 20000069 PARAMETER Experiment Name: At_100uM_ABA_Mutants_cDNA_P Parameter: Treatment Value: 100uM ABA vs. No Treatment
  misc_feature: MA Experiment ID: 20000070 Result: Down-regulated in Transcription
  misc_feature: MA Experiment 20000070 PARAMETER Experiment Name: At_100uM_ABA_Mutants_cDNA_P Parameter: Plant Line Value: CS24
  misc_feature: MA Experiment 20000070 PARAMETER Experiment Name: At_100uM_ABA_Mutants_cDNA_P Parameter: Timepoint (hr) Value: 6
  misc_feature: MA Experiment 20000070 PARAMETER Experiment Name: At_100uM_ABA_Mutants_cDNA_P Parameter: Tissue Value: Aerial
  misc_feature: MA Experiment 20000070 PARAMETER Experiment Name: At_100uM_ABA_Mutants_cDNA_P Parameter: Treatment Value: 100uM ABA vs. No Treatment
  misc_feature: MA Experiment ID: 20000071 Result: Down-regulated in Transcription
  misc_feature: MA Experiment 20000071 PARAMETER Experiment Name: At_100uM_ABA_Mutants_cDNA_P Parameter: Plant Line Value: CS8104
  misc_feature: MA Experiment 20000071 PARAMETER Experiment Name: At_100uM_ABA_Mutants_cDNA_P Parameter: Timepoint (hr) Value: 6
  misc_feature: MA Experiment 20000071 PARAMETER Experiment Name: At_100uM_ABA_Mutants_cDNA_P Parameter: Tissue Value: Aerial
  misc_feature: MA Experiment 20000071 PARAMETER Experiment Name: At_100uM_ABA_Mutants_cDNA_P Parameter: Treatment Value: 100uM ABA vs. No Treatment
  misc_feature: MA Experiment ID: 20000072 Result: Down-regulated in Transcription
  misc_feature: MA Experiment 20000072 PARAMETER Experiment Name: At_100uM_ABA_Mutants_cDNA_P Parameter: Plant Line Value: CS8105
  misc_feature: MA Experiment 20000072 PARAMETER Experiment Name: At_100uM_ABA_Mutants_cDNA_P Parameter: Timepoint (hr) Value: 6
  misc_feature: MA Experiment 20000072 PARAMETER Experiment Name: At_100uM_ABA_Mutants_cDNA_P Parameter: Tissue Value: Aerial
  misc_feature: MA Experiment 20000072 PARAMETER Experiment Name: At_100uM_ABA_Mutants_cDNA_P Parameter: Treatment Value: 100uM ABA vs. No Treatment
  misc_feature: MA Experiment ID: 20000086 Result: Down-regulated in Transcription
  misc_feature: MA Experiment 20000086 PARAMETER Experiment Name: At_100uM_ABA_Mutants_cDNA_P Parameter: Plant Line Value: CS22
  misc_feature: MA Experiment 20000086 PARAMETER Experiment Name: At_100uM_ABA_Mutants_cDNA_P Parameter: Timepoint (hr) Value: 6
  misc_feature: MA Experiment 20000086 PARAMETER Experiment Name: At_100uM_ABA_Mutants_cDNA_P Parameter: Tissue Value: Aerial
  misc_feature: MA Experiment 20000086 PARAMETER Experiment Name: At_100uM_ABA_Mutants_cDNA_P Parameter: Treatment Value: 100uM ABA vs. No Treatment
  misc_feature: MA Experiment ID: 20000087 Result: Down-regulated in Transcription
  misc_feature: MA Experiment 20000087 PARAMETER Experiment Name: At_100uM_ABA_Mutants_cDNA_P Parameter: Plant Line Value: WS
  misc_feature: MA Experiment 20000087 PARAMETER Experiment Name: At_100uM_ABA_Mutants_cDNA_P Parameter: Timepoint (hr) Value: 6
  misc_feature: MA Experiment 20000087 PARAMETER Experiment Name: At_100uM_ABA_Mutants_cDNA_P Parameter: Tissue Value: Aerial
  misc_feature: MA Experiment 20000087 PARAMETER Experiment Name: At_100uM_ABA_Mutants_cDNA_P Parameter: Treatment Value: 100uM ABA vs. No Treatment
  misc_feature: MA Experiment ID: 20000088 Result: Down-regulated in Transcription
  misc_feature: MA Experiment 20000088 PARAMETER Experiment Name: At_100uM_ABA_Mutants_cDNA_P Parameter: Plant Line Value: Landsberg
  misc_feature: MA Experiment 20000088 PARAMETER Experiment Name: At_100uM_ABA_Mutants_cDNA_P Parameter: Timepoint (hr) Value: 6
  misc_feature: MA Experiment 20000088 PARAMETER Experiment Name: At_100uM_ABA_Mutants_cDNA_P Parameter: Tissue Value: Aerial
  misc_feature: MA Experiment 20000088 PARAMETER Experiment Name: At_100uM_ABA_Mutants_cDNA_P Parameter: Treatment Value: 100uM ABA vs. No Treatment
  misc_feature: MA Experiment ID: 20000089 Result: Down-regulated in Transcription
  misc_feature: MA Experiment ID: 20000090 Result: Down-regulated in Transcription
  misc_feature: MA Experiment ID: 20000117 Result: Down-regulated in Transcription
  misc_feature: MA Experiment 20000117 PARAMETER Experiment Name: At_100uM_ABA_Mutants_cDNA_P Parameter: Plant Line Value: Columbia
  misc_feature: MA Experiment 20000117 PARAMETER Experiment Name: At_100uM_ABA_Mutants_cDNA_P Parameter: Timepoint (hr) Value: 6
  misc_feature: MA Experiment 20000117 PARAMETER Experiment Name: At_100uM_ABA_Mutants_cDNA_P Parameter: Tissue Value: Aerial
  misc_feature: MA Experiment 20000117 PARAMETER Experiment Name: At_100uM_ABA_Mutants_cDNA_P Parameter: Treatment Value: 100uM ABA vs. No Treatment
  misc_feature: MA Experiment ID: 20000180 Result: Up-regulated in Transcription
  misc_feature: MA Experiment 20000180 PARAMETER Experiment Name: At_Germinating_Seeds_P Parameter: Age (hr) Value: 24 vs. 0
  misc_feature: MA Experiment 20000180 PARAMETER Experiment Name: At_Germinating_Seeds_P Parameter: Tissue Value: Germinating Seeds
  misc_feature: MA Experiment ID: 20000185 Result: Down-regulated in Transcription
  misc_feature: MA Experiment 20000185 PARAMETER Experiment Name: At_Roots__P Parameter: Age (day) Value: 7 vs. 21
  misc_feature: MA Experiment 20000185 PARAMETER Experiment Name: At_Roots__P Parameter: Organism Value: A. thaliana
  misc_feature: MA Experiment 20000185 PARAMETER Experiment Name: At_Roots__P Parameter: Tissue Value: Roots vs. Whole Plant
  misc_feature: MA Experiment ID: 20000224 Result: Up-regulated in Transcription
  misc_feature: MA Experiment ID: 20000235 Result: Up-regulated in Transcription
  misc_feature: MA Experiment 20000235 PARAMETER Experiment Name: At_Siliques_P Parameter: Age (day) Value: 21
  misc_feature: MA Experiment 20000235 PARAMETER Experiment Name: At_Siliques_P Parameter: Organism Value: A. thaliana
  misc_feature: MA Experiment 20000235 PARAMETER Experiment Name: At_Siliques_P Parameter: Plant Line Value: WS
  misc_feature: MA Experiment 20000235 PARAMETER Experiment Name: At_Siliques_P Parameter: Tissue Value: 5-10mm Siliques vs. Whole Plant
  misc_feature: MA Experiment ID: 20000438 Result: Up-regulated in Transcription
  misc_feature: MA Experiment 20000438 PARAMETER Experiment Name: At_Shoots__P Parameter: Age (day) Value: 14
  misc_feature: MA Experiment 20000438 PARAMETER Experiment Name: At_Shoots__P Parameter: Tissue Value: Shoots vs. Whole Plant
  misc_feature: MA Experiment ID: 20000439 Result: Down-regulated in Transcription
  misc_feature: MA Experiment 20000439 PARAMETER Experiment Name: At_Roots__P Parameter: Age (day) Value: 14 vs. 21
  misc_feature: MA Experiment 20000439 PARAMETER Experiment Name: At_Roots__P Parameter: Organism Value: A. thaliana
  misc_feature: MA Experiment 20000439 PARAMETER Experiment Name: At_Roots__P Parameter: Tissue Value: Roots vs. Whole Plant
  misc_feature: MA Experiment ID: 20000794 Result: Up-regulated in Transcription
  misc_feature: MA Experiment 20000794 PARAMETER Experiment Name: At_Petals_P Parameter: Age (day) Value: 23-25 days
  misc_feature: MA Experiment 20000794 PARAMETER Experiment Name: At_Petals_P Parameter: Plant Line Value: WS
  misc_feature: MA Experiment 20000794 PARAMETER Experiment Name: At_Petals_P Parameter: Tissue Value: Petals vs. Whole plant
  misc_feature: MA Experiment ID: 20001248 Result: Down-regulated in Transcription
  misc_feature: MA Experiment 20001248 PARAMETER Experiment Name: At_Far-red-induction_P Parameter: Age (day) Value: 7
  misc_feature: MA Experiment 20001248 PARAMETER Experiment Name: At_Far-red-induction_P Parameter: Light Value: Far-red vs. White
  misc_feature: MA Experiment 20001248 PARAMETER Experiment Name: At_Far-red-induction_P Parameter: Organism Value: A. thaliana
  misc_feature: MA Experiment 20001248 PARAMETER Experiment Name: At_Far-red-induction_P Parameter: Plant Line Value: Columbia
  misc_feature: MA Experiment 20001248 PARAMETER Experiment Name: At_Far-red-induction_P Parameter: Timepoint (hr) Value: 4
  misc_feature: MA Experiment 20001248 PARAMETER Experiment Name: At_Far-red-induction_P Parameter: Tissue Value: Whole Plant
  misc_feature: MA Experiment ID: 20001450 Result: Down-regulated in Transcription
  misc_feature: MA Experiment 20001450 PARAMETER Experiment Name: At_Far-red-induction_P Parameter: Age (day) Value: 7
  misc_feature: MA Experiment 20001450 PARAMETER Experiment Name: At_Far-red-induction_P Parameter: Light Value: Far-red vs. White
  misc_feature: MA Experiment 20001450 PARAMETER Experiment Name: At_Far-red-induction_P Parameter: Organism Value: A. thaliana
  misc_feature: MA Experiment 20001450 PARAMETER Experiment Name: At_Far-red-induction_P Parameter: Plant Line Value: Columbia
  misc_feature: MA Experiment 20001450 PARAMETER Experiment Name: At_Far-red-induction_P Parameter: Timepoint (hr) Value: 8
  misc_feature: MA Experiment 20001450 PARAMETER Experiment Name: At_Far-red-induction_P Parameter: Tissue Value: Whole Plant
aaagaaggaagaaaatttgagtgggtgagaattttttacgatagaggaagagacagcatcatctacttgtgttgtctgtgtacatatattacagtaagcgttgcaatataacttcttgaggatcttctcacattaatgggtcaaaccttttgctcttccttttgattaatttagtgtttgacaatctcctcctccttctccttcttcttcaaagttttgtcgcagtatctattgttcttacagagagaaaggaaagctttagtcttttaccagtttgatccaattctgggtttcactgaaaaaaagttgggagtttgattcttctaactgtagaagaaacagagtcaacagaagaaaactaaaaaagttgagatttttctctcacgcgctcaagaacttgagtatgtcttcttctgtagcagtgttatgggttgctacttcttctctaaatccagacccaatgaacaattgtgggttggtaagggttctagaatcttctagactgttctctccttgtcagaatcagagactaaacaaaggtaagaagaagcagataccaacttggagttcttcttttgtaaggaaccgaagtagaagaattggtgttgtgtcttcaagcttagtagcaagtccttctggagagatagctctttcatctgaagagaaggtttacaatgttgtgttgaaacaagctgctttggtgaacaaacagctaaggtcttcttcttatgaccttgatgtgaagaaaccacaagatgttgttcttcctgggagtttgagtttgttggtgggtgaagcttatgatcgatgcggtgaagtttgcgctgaatatgctaagacgttttatcttggaactttgcttatgacacccgaaaggcgaaaggcgatttgggcaatctacgtttggtgtagaagaactgatgaacttgtggatgggccaaatgcttcacatataactcccatggctttagatagatgggaagcaaggttagaagatcttttccgtggtcgtcctttcgatatgcttgatgctgctctcgctgatacagttgctagatacccggtcgatattcagccatttcgagacatgatcgaaggaatgagaatggacttgaagaaatcgagataccagaacttcgatgatctatacctttactgctactacgtcgctggaaccgtcggattgatgagcgttccggttatgggaatcgatcctaagtcgaaagcaacaaccgaaagtgtttacaacgctgccttggcccttggtatagccaatcagcttactaacatactcagagacgtaggcgaagatgcgagaagaggaagggtttatctgcctcaggatgaattggctcaggctggtctttcagatgaagacatattcgccggaaaagtaactgataaatggagaaacttcatgaaaatgcagcttaaacgagcaagaatgttcttcgacgaagctgagaaaggcgtcaccgagctcagtgccgctagcagatggcctgtatgggcttcattgctattgtacaggagaatactggacgagattgaagcgaatgattacaacaattttactaagagagcttatgtggggaaagtcaagaaaattgcagctttgccattggcttatgctaaatcagtactaaagacttcaagttcaagactatcgatatgagagcgagaggaaagtggaacaaaaacaacctaagagcgctttttgtgattaagaaaaaacttaggctcgaatttattatgttaactaatatatacatattaatggggaagcaaattcttataatgttacattatctttctgaatgtaaaaaagtatttttttttttaattttattttagttatagttctcttggcctaatgaggggatatacaatttttggttgat

SEQ ID NO: 29903 - protein, 423 aa, Arabidopsis thaliana
  peptide (1)..(423): Ceres Seq. ID no. 13653851
  misc_feature (71)..(417): Homolog of NCBI NO: 13542332 NR Description: phytoene synthase [Citrus x paradisi]
  misc_feature (68)..(417): Homolog of NCBI NO: 1346882 NR Description: Phytoene synthase, chloroplast precursor (MEL5)
  misc_feature (4)..(422): Homolog of NCBI NO: 11990226 NR Description: phytoene synthase [Helianthus annuus]
  misc_feature (4)..(422): Homolog of NCBI NO: 12584564 NR Description: phytoene synthase [Helianthus annuus]
  misc_feature (71)..(417): Homolog of NCBI NO: 6959860 NR Description: phytoene synthase [Citrus unshiu]
  misc_feature (30)..(417): Homolog of NCBI NO: 40456029 NR Description: phytoene synthase [Momordica charantia var.
  misc_feature (4)..(417): Homolog of NCBI NO: 585749 NR Description: Phytoene synthase, chloroplast precursor
  misc_feature (1)..(423): Homolog of NCBI NO: 21553694 NR Description: phytoene synthase [Arabidopsis thaliana]
  misc_feature (1)..(423): Homolog of NCBI NO: 15237933 NR Description: phytoene synthase
  misc_feature (1)..(423): Homolog of NCBI NO: 413732 NR Description: phytoene synthase
MSSSVAVLWVATSSLNPDPMNNCGLVRVLESSRLFSPCQNQRLNKGKKKQIPTWSSSFVRNRSRRIGVVSSSLVASPSGEIALSSEEKVYNVVLKQAALVNKQLRSSSYDLDVKKPQDVVLPGSLSLLVGEAYDRCGEVCAEYAKTFYLGTLLMTPERRKAIWAIYVWCRRTDELVDGPNASHITPMALDRWEARLEDLFRGRPFDMLDAALADTVARYPVDIQPFRDMIEGMRMDLKKSRYQNFDDLYLYCYYVAGTVGLMSVPVMGIDPKSKATTESVYNAALALGIANQLTNILRDVGEDARRGRVYLPQDELAQAGLSDEDIFAGKVTDKWRNFMKMQLKRARMFFDEAEKGVTELSAASRWPVWASLLLYRRILDEIEANDYNNFTKRAYVGKVKKIAALPLAYAKSVLKTSSSRLSI

SEQ ID NO: 29904 - protein, 404 aa, Arabidopsis thaliana
  peptide (1)..(404): Ceres Seq. ID no. 13653852
  misc_feature (52)..(398): Homolog of NCBI NO: 13542332 NR Description: phytoene synthase [Citrus x paradisi]
  misc_feature (49)..(398): Homolog of NCBI NO: 1346882 NR Description: Phytoene synthase, chloroplast precursor (MEL5)
  misc_feature (1)..(403): Homolog of NCBI NO: 11990226 NR Description: phytoene synthase [Helianthus annuus]
  misc_feature (1)..(403): Homolog of NCBI NO: 12584564 NR Description: phytoene synthase [Helianthus annuus]
  misc_feature (52)..(398): Homolog of NCBI NO: 6959860 NR Description: phytoene synthase [Citrus unshiu]
  misc_feature (11)..(398): Homolog of NCBI NO: 40456029 NR Description: phytoene synthase [Momordica charantia var.
  misc_feature (1)..(398): Homolog of NCBI NO: 585749 NR Description: Phytoene synthase, chloroplast precursor
  misc_feature (1)..(404): Homolog of NCBI NO: 21553694 NR Description: phytoene synthase [Arabidopsis thaliana]
  misc_feature (1)..(404): Homolog of NCBI NO: 15237933 NR Description: phytoene synthase
  misc_feature (1)..(404): Homolog of NCBI NO: 413732 NR Description: phytoene synthase
MNNCGLVRVLESSRLFSPCQNQRLNKGKKKQIPTWSSSFVRNRSRRIGVVSSSLVASPSGEIALSSEEKVYNVVLKQAALVNKQLRSSSYDLDVKKPQDVVLPGSLSLLVGEAYDRCGEVCAEYAKTFYLGTLLMTPERRKAIWAIYVWCRRTDELVDGPNASHITPMALDRWEARLEDLFRGRPFDMLDAALADTVARYPVDIQPFRDMIEGMRMDLKKSRYQNFDDLYLYCYYVAGTVGLMSVPVMGIDPKSKATTESVYNAALALGIANQLTNILRDVGEDARRGRVYLPQDELAQAGLSDEDIFAGKVTDKWRNFMKMQLKRARMFFDEAEKGVTELSAASRWPVWASLLLYRRILDEIEANDYNNFTKRAYVGKVKKIAALPLAYAKSVLKTSSSRLSI

SEQ ID NO: 29905 - protein, 270 aa, Arabidopsis thaliana
  peptide (1)..(270): Ceres Seq. ID no. 13653853
  misc_feature (1)..(264): Homolog of NCBI NO: 13542332 NR Description: phytoene synthase [Citrus x paradisi]
  misc_feature (1)..(264): Homolog of NCBI NO: 1346882 NR Description: Phytoene synthase, chloroplast precursor (MEL5)
  misc_feature (1)..(269): Homolog of NCBI NO: 11990226 NR Description: phytoene synthase [Helianthus annuus]
  misc_feature (1)..(269): Homolog of NCBI NO: 12584564 NR Description: phytoene synthase [Helianthus annuus]
  misc_feature (1)..(264): Homolog of NCBI NO: 6959860 NR Description: phytoene synthase [Citrus unshiu]
  misc_feature (1)..(264): Homolog of NCBI NO: 40456029 NR Description: phytoene synthase [Momordica charantia var.
  misc_feature (1)..(264): Homolog of NCBI NO: 585749 NR Description: Phytoene synthase, chloroplast precursor
  misc_feature (1)..(270): Homolog of NCBI NO: 21553694 NR Description: phytoene synthase [Arabidopsis thaliana]
  misc_feature (1)..(270): Homolog of NCBI NO: 15237933 NR Description: phytoene synthase
  misc_feature (1)..(270): Homolog of NCBI NO: 413732 NR Description: phytoene synthase
MTPERRKAIWAIYVWCRRTDELVDGPNASHITPMALDRWEARLEDLFRGRPFDMLDAALADTVARYPVDIQPFRDMIEGMRMDLKKSRYQNFDDLYLYCYYVAGTVGLMSVPVMGIDPKSKATTESVYNAALALGIANQLTNILRDVGEDARRGRVYLPQDELAQAGLSDEDIFAGKVTDKWRNFMKMQLKRARMFFDEAEKGVTELSAASRWPVWASLLLYRRILDEIEANDYNNFTKRAYVGKVKKIAALPLAYAKSVLKTSSSRLSI

SEQ ID NO: 29906 - DNA, 1303 bp, Arabidopsis thaliana
  misc_feature (1)..(1303): Ceres Seq. ID no. 12334147
  misc_feature: MA Experiment ID: 108434 Result: Up-regulated in Transcription
  misc_feature: MA Experiment 108434 PARAMETER Experiment Name: At_Root_Tips_cDNA_P Parameter: Tissue Value: Root Tips
  misc_feature: MA Experiment ID: 108463 Result: Down-regulated in Transcription
  misc_feature: MA Experiment 108463 PARAMETER Experiment Name: At_Germinating_Seeds_cDNA_P Parameter: Age (day) Value: 3 vs. 0
  misc_feature: MA Experiment 108463 PARAMETER Experiment Name: At_Germinating_Seeds_cDNA_P Parameter: Tissue Value: Germinating Seeds
  misc_feature: MA Experiment ID: 108595 Result: Up-regulated in Transcription
  misc_feature: MA Experiment 108595 PARAMETER Experiment Name: At_Ler-pi_Ovule_cDNA_P Parameter: Plant Line Value: null
  misc_feature: MA Experiment ID: 20000184 Result: Up-regulated in Transcription
  misc_feature: MA Experiment 20000184 PARAMETER Experiment Name: At_Shoots__P Parameter: Age (day) Value: 7
  misc_feature: MA Experiment 20000184 PARAMETER Experiment Name: At_Shoots__P Parameter: Tissue Value: Shoots vs. Whole Plant
  misc_feature: MA Experiment ID: 20000185 Result: Up-regulated in Transcription
  misc_feature: MA Experiment 20000185 PARAMETER Experiment Name: At_Roots__P Parameter: Age (day) Value: 7 vs. 21
  misc_feature: MA Experiment 20000185 PARAMETER Experiment Name: At_Roots__P Parameter: Organism Value: A. thaliana
  misc_feature: MA Experiment 20000185 PARAMETER Experiment Name: At_Roots__P Parameter: Tissue Value: Roots vs. Whole Plant
  misc_feature: MA Experiment ID: 20000438 Result: Up-regulated in Transcription
  misc_feature: MA Experiment 20000438 PARAMETER Experiment Name: At_Shoots__P Parameter: Age (day) Value: 14
  misc_feature: MA Experiment 20000438 PARAMETER Experiment Name: At_Shoots__P Parameter: Tissue Value: Shoots vs. Whole Plant
  misc_feature: MA Experiment ID: 20000439 Result: Up-regulated in Transcription
  misc_feature: MA Experiment 20000439 PARAMETER Experiment Name: At_Roots__P Parameter: Age (day) Value: 14 vs. 21
  misc_feature: MA Experiment 20000439 PARAMETER Experiment Name: At_Roots__P Parameter: Organism Value: A. thaliana
  misc_feature: MA Experiment 20000439 PARAMETER Experiment Name: At_Roots__P Parameter: Tissue Value: Roots vs. Whole Plant
  misc_feature: MA Experiment ID: 20001451 Result: Up-regulated in Transcription
  misc_feature: MA Experiment 20001451 PARAMETER Experiment Name: At_Far-red-induction_P Parameter: Age (day) Value: 7
  misc_feature: MA Experiment 20001451 PARAMETER Experiment Name: At_Far-red-induction_P Parameter: Light Value: Far-red vs. White
  misc_feature: MA Experiment 20001451 PARAMETER Experiment Name: At_Far-red-induction_P Parameter: Organism Value: A. thaliana
  misc_feature: MA Experiment 20001451 PARAMETER Experiment Name: At_Far-red-induction_P Parameter: Plant Line Value: Columbia
  misc_feature: MA Experiment 20001451 PARAMETER Experiment Name: At_Far-red-induction_P Parameter: Timepoint (hr) Value: 24
  misc_feature: MA Experiment 20001451 PARAMETER Experiment Name: At_Far-red-induction_P Parameter: Tissue Value: Whole Plant
attctttgtcgtgttcttttaattaaccttttgcaatttgtcttgtgtttctcacaacacaaaaacttgtaaaagtgttaaaaaatcaagatctgaaaaatcttatcaccgcttctaggtttttcagttttttttcttccttttcctgatctaaattaacttatatttcttagggtttcacttcttgaaacatttaatcagaattaattaacctctctagggctttcatggcgaatccatggtggacaggacaagtgaacctatccggcctcgaaacgacgccgcctggttcctctcagttaaagaaaccagatctccacatctccatgaacatggccatggactcaggtcacaataatcatcaccatcaccaagaagtcgataacaacaacaacgacgacgatagagacaacttgagtggagacgaccacgagccacgtgaaggagccgtagaagcccccacgcgccgtccacgtggacgtcctgctggttccaagaacaaaccaaagccaccgatcttcgtcactcgcgattctccaaatgctctcaagagccatgtcatggagatcgctagtgggactgacgtcatcgaaaccctagctacttttgctaggcggcgtcaacgtggcatctgcatcttgagcggaaatggcacagtggctaacgtcaccctccgtcaaccctcgaccgctgccgttgcggcggctcctggtggtgcggctgttttggctttacaagggaggtttgagattctttctttaaccggttctttcttgccaggaccggctccacctggttccaccggtttaacgatttacttagccggtggtcaaggtcaggttgttggaggaagcgtggtgggcccattgatggcagcaggtccggtgatgctgatcgccgccacgttctctaacgcgacttacgagagattgccattggaggaggaagaggcagcagagagaggcggtggtggaggcagcggaggagtggttccggggcagctcggaggcggaggttcgccactaagcagcggtgctggtggaggcgacggtaaccaaggacttccggtgtataatatgccgggaaatcttgtttctaatggtggcagtggtggaggaggacagatgagcggccaagaagcttatggttgggctcaagctaggtcaggattttaacgtgcgttaaaatggtttttaatttacagaagttaacaataagattataatgatgtttattatgatgttgaaaaccagtcagttgctacttgttactagtgagctatatagtttgtggacattatatt

SEQ ID NO: 29907 - protein, 315 aa, Arabidopsis thaliana
  peptide (1)..(315): Ceres Seq. ID no. 12334148
  misc_feature (246)..(302): Pfam Name: Herpesvirus polymerase accessory protein Pfam Description: Herpesvirus polymerase accessory protein
  misc_feature (79)..(264): Homolog of NCBI NO: 15225475 NR Description: putative AT-hook DNA-binding protein; protein id:
  misc_feature (55)..(286): Homolog of NCBI NO: 15223074 NR Description: unknown protein; protein id: At1g76500.1
  misc_feature (21)..(288): Homolog of NCBI NO: 15235815 NR Description: putative DNA binding protein; protein id:
  misc_feature (42)..(302): Homolog of NCBI NO: 15226945 NR Description: putative AT-hook DNA-binding protein; protein id:
  misc_feature (38)..(278): Homolog of NCBI NO: 15218067 NR Description: putative DNA-binding protein
  misc_feature (59)..(315): Homolog of NCBI NO: 38346718 NR Description: OSJNBa0086O06.16 [Oryza sativa (japonica
  misc_feature (24)..(295): Homolog of NCBI NO: 15236657 NR Description: hypothetical protein
  misc_feature (37)..(312): Homolog of NCBI NO: 21593180 NR Description: putative DNA-binding protein [Arabidopsis
  misc_feature (37)..(312): Homolog of NCBI NO: 18414224 NR Description: Expressed protein
  misc_feature (1)..(315): Homolog of NCBI NO: 18396925 NR Description: expressed protein
MANPWWTGQVNLSGLETTPPGSSQLKKPDLHISMNMAMDSGHNNHHHHQEVDNNNNDDDRDNLSGDDHEPREGAVEAPTRRPRGRPAGSKNKPKPPIFVTRDSPNALKSHVMEIASGTDVIETLATFARRRQRGICILSGNGTVANVTLRQPSTAAVAAAPGGAAVLALQGRFEILSLTGSFLPGPAPPGSTGLTIYLAGGQGQVVGGSVVGPLMAAGPVMLIAATFSNATYERLPLEEEEAAERGGGGGSGGVVPGQLGGGGSPLSSGAGGGDGNQGLPVYNMPGNLVSNGGSGGGGQMSGQEAYGWAQARSGF

SEQ ID NO: 29908 - protein, 282 aa, Arabidopsis thaliana
  peptide (1)..(282): Ceres Seq. ID no. 12334149
  misc_feature (213)..(269): Pfam Name: Herpesvirus polymerase accessory protein Pfam Description: Herpesvirus polymerase accessory protein
  misc_feature (46)..(231): Homolog of NCBI NO: 15225475 NR Description: putative AT-hook DNA-binding protein; protein id:
  misc_feature (22)..(253): Homolog of NCBI NO: 15223074 NR Description: unknown protein; protein id: At1g76500.1
  misc_feature (1)..(255): Homolog of NCBI NO: 15235815 NR Description: putative DNA binding protein; protein id:
  misc_feature (9)..(269): Homolog of NCBI NO: 15226945 NR Description: putative AT-hook DNA-binding protein; protein id:
  misc_feature (5)..(245): Homolog of NCBI NO: 15218067 NR Description: putative DNA-binding protein
  misc_feature (26)..(282): Homolog of NCBI NO: 38346718 NR Description: OSJNBa0086O06.16 [Oryza sativa (japonica
  misc_feature (1)..(262): Homolog of NCBI NO: 15236657 NR Description: hypothetical protein
  misc_feature (4)..(279): Homolog of NCBI NO: 21593180 NR Description: putative DNA-binding protein [Arabidopsis
  misc_feature (4)..(279): Homolog of NCBI NO: 18414224 NR Description: Expressed protein
  misc_feature (1)..(282): Homolog of NCBI NO: 18396925 NR Description: expressed protein
MNMAMDSGHNNHHHHQEVDNNNNDDDRDNLSGDDHEPREGAVEAPTRRPRGRPAGSKNKPKPPIFVTRDSPNALKSHVMEIASGTDVIETLATFARRRQRGICILSGNGTVANVTLRQPSTAAVAAAPGGAAVLALQGRFEILSLTGSFLPGPAPPGSTGLTIYLAGGQGQVVGGSVVGPLMAAGPVMLIAATFSNATYERLPLEEEEAAERGGGGGSGGVVPGQLGGGGSPLSSGAGGGDGNQGLPVYNMPGNLVSNGGSGGGGQMSGQEAYGWAQARSGF

SEQ ID NO: 29909 - protein, 280 aa, Arabidopsis thaliana
  peptide (1)..(280): Ceres Seq. ID no. 12334150
  misc_feature (211)..(267): Pfam Name: Herpesvirus polymerase accessory protein Pfam Description: Herpesvirus polymerase accessory protein
  misc_feature (44)..(229): Homolog of NCBI NO: 15225475 NR Description: putative AT-hook DNA-binding protein; protein id:
  misc_feature (20)..(251): Homolog of NCBI NO: 15223074 NR Description: unknown protein; protein id: At1g76500.1
  misc_feature (1)..(253): Homolog of NCBI NO: 15235815 NR Description: putative DNA binding protein; protein id:
  misc_feature (7)..(267): Homolog of NCBI NO: 15226945 NR Description: putative AT-hook DNA-binding protein; protein id:
  misc_feature (3)..(243): Homolog of NCBI NO: 15218067 NR Description: putative DNA-binding protein
  misc_feature (24)..(280): Homolog of NCBI NO: 38346718 NR Description: OSJNBa0086O06.16 [Oryza sativa (japonica
  misc_feature (1)..(260): Homolog of NCBI NO: 15236657 NR Description: hypothetical protein
  misc_feature (2)..(277): Homolog of NCBI NO: 21593180 NR Description: putative DNA-binding protein [Arabidopsis
  misc_feature (2)..(277): Homolog of NCBI NO: 18414224 NR Description: Expressed protein
  misc_feature (1)..(280): Homolog of NCBI NO: 18396925 NR Description: expressed protein
MAMDSGHNNHHHHQEVDNNNNDDDRDNLSGDDHEPREGAVEAPTRRPRGRPAGSKNKPKPPIFVTRDSPNALKSHVMEIASGTDVIETLATFARRRQRGICILSGNGTVANVTLRQPSTAAVAAAPGGAAVLALQGRFEILSLTGSFLPGPAPPGSTGLTIYLAGGQGQVVGGSVVGPLMAAGPVMLIAATFSNATYERLPLEEEEAAERGGGGGSGGVVPGQLGGGGSPLSSGAGGGDGNQGLPVYNMPGNLVSNGGSGGGGQMSGQEAYGWAQARSGF

SEQ ID NO: 29910 - DNA, 667 bp, Arabidopsis thaliana
  misc_feature (1)..(667): Ceres Seq. ID no. 12389141
  misc_feature: MA Experiment ID: 108434 Result: Up-regulated in Transcription
  misc_feature: MA Experiment 108434 PARAMETER Experiment Name: At_Root_Tips_cDNA_P Parameter: Tissue Value: Root Tips
  misc_feature: MA Experiment ID: 108435 Result: Up-regulated in Transcription
  misc_feature: MA Experiment 108435 PARAMETER Experiment Name: At_stm_Mutants_cDNA_P Parameter: Plant Line Value: wt Landsburg vs stm
  misc_feature: MA Experiment 108435 PARAMETER Experiment Name: At_stm_Mutants_cDNA_P Parameter: Tissue Value: Shoot Apical Meristem Region
  misc_feature: MA Experiment ID: 108462 Result: Down-regulated in Transcription
  misc_feature: MA Experiment 108462 PARAMETER Experiment Name: At_Germinating_Seeds_cDNA_P Parameter: Age (day) Value: 2 vs. 0
  misc_feature: MA Experiment 108462 PARAMETER Experiment Name: At_Germinating_Seeds_cDNA_P Parameter: Tissue Value: Germinating Seeds
  misc_feature: MA Experiment ID: 108463 Result: Down-regulated in Transcription
  misc_feature: MA Experiment 108463 PARAMETER Experiment Name: At_Germinating_Seeds_cDNA_P Parameter: Age (day) Value: 3 vs. 0
  misc_feature: MA Experiment 108463 PARAMETER Experiment Name: At_Germinating_Seeds_cDNA_P Parameter: Tissue Value: Germinating Seeds
  misc_feature: MA Experiment ID: 108464 Result: Down-regulated in Transcription
  misc_feature: MA Experiment 108464 PARAMETER Experiment Name: At_Germinating_Seeds_cDNA_P Parameter: Age (day) Value: 4 vs. 0
  misc_feature: MA Experiment 108464 PARAMETER Experiment Name: At_Germinating_Seeds_cDNA_P Parameter: Tissue Value: Germinating Seeds
  misc_feature: MA Experiment ID: 108573 Result: Down-regulated in Transcription
  misc_feature: MA Experiment 108573 PARAMETER Experiment Name: At_Drought_cDNA_P Parameter: Timepoint (hr) Value: 6
  misc_feature: MA Experiment 108573 PARAMETER Experiment Name: At_Drought_cDNA_P Parameter: Tissue Value: Aerial
  misc_feature: MA Experiment 108573 PARAMETER Experiment Name: At_Drought_cDNA_P Parameter: Treatment Value: Drought vs. No Drought
  misc_feature: MA Experiment ID: 20000112 Result: Down-regulated in Transcription
  misc_feature: MA Experiment 20000112 PARAMETER Experiment Name: At_42deg_Heat_cDNA_P Parameter: Temperature (deg C) Value: 42 vs. 22
  misc_feature: MA Experiment 20000112 PARAMETER Experiment Name: At_42deg_Heat_cDNA_P Parameter: Timepoint (hr) Value: 2
  misc_feature: MA Experiment 20000112 PARAMETER Experiment Name: At_42deg_Heat_cDNA_P Parameter: Tissue Value: Aerial
  misc_feature: MA Experiment ID: 20000117 Result: Down-regulated in Transcription
  misc_feature: MA Experiment 20000117 PARAMETER Experiment Name: At_100uM_ABA_Mutants_cDNA_P Parameter: Plant Line Value: Columbia
  misc_feature: MA Experiment 20000117 PARAMETER Experiment Name: At_100uM_ABA_Mutants_cDNA_P Parameter: Timepoint (hr) Value: 6
  misc_feature: MA Experiment 20000117 PARAMETER Experiment Name: At_100uM_ABA_Mutants_cDNA_P Parameter: Tissue Value: Aerial
  misc_feature: MA Experiment 20000117 PARAMETER Experiment Name: At_100uM_ABA_Mutants_cDNA_P Parameter: Treatment Value: 100uM ABA vs. No Treatment
  misc_feature: MA Experiment ID: 20000214 Result: Up-regulated in Transcription
  misc_feature: MA Experiment 20000214 PARAMETER Experiment Name: At_4deg_Cold_P Parameter: Timepoint (hr) Value: 6
  misc_feature: MA Experiment ID: 20000437 Result: Down-regulated in Transcription
  misc_feature: MA Experiment 20000437 PARAMETER Experiment Name: At_Drought_P Parameter: Age (day) Value: 8
  misc_feature: MA Experiment 20000437 PARAMETER Experiment Name: At_Drought_P Parameter: Organism Value: A. thaliana
  misc_feature: MA Experiment 20000437 PARAMETER Experiment Name: At_Drought_P Parameter: Plant Line Value: WS
  misc_feature: MA Experiment 20000437 PARAMETER Experiment Name: At_Drought_P Parameter: Timepoint (hr) Value: 24
  misc_feature: MA Experiment 20000437 PARAMETER Experiment Name: At_Drought_P Parameter: Tissue Value: Whole Plant
  misc_feature: MA Experiment 20000437 PARAMETER Experiment Name: At_Drought_P Parameter: Treatment Value: Drought vs. No Drought
  misc_feature: MA Experiment ID: 20000495 Result: Down-regulated in Transcription
  misc_feature: MA Experiment 20000495 PARAMETER Experiment Name: At_Guard_Cells_P Parameter: Harvest Date Value: 8/2/2002
  misc_feature: MA Experiment 20000495 PARAMETER Experiment Name: At_Guard_Cells_P Parameter: Organism Value: A. thaliana
  misc_feature: MA Experiment 20000495 PARAMETER Experiment Name: At_Guard_Cells_P Parameter: Tissue Value: Guard Cells vs. Leaves
  misc_feature: MA Experiment ID: 20000794 Result: Down-regulated in Transcription
  misc_feature: MA Experiment 20000794 PARAMETER Experiment Name: At_Petals_P Parameter: Age (day) Value: 23-25 days
  misc_feature: MA Experiment 20000794 PARAMETER Experiment Name: At_Petals_P Parameter: Plant Line Value: WS
  misc_feature: MA Experiment 20000794 PARAMETER Experiment Name: At_Petals_P Parameter: Tissue Value: Petals vs. Whole plant
  misc_feature: MA Experiment ID: 20001451 Result: Down-regulated in Transcription
  misc_feature: MA Experiment 20001451 PARAMETER Experiment Name: At_Far-red-induction_P Parameter: Age (day) Value: 7
  misc_feature: MA Experiment 20001451 PARAMETER Experiment Name: At_Far-red-induction_P Parameter: Light Value: Far-red vs. White
  misc_feature: MA Experiment 20001451 PARAMETER Experiment Name: At_Far-red-induction_P Parameter: Organism Value: A. thaliana
  misc_feature: MA Experiment 20001451 PARAMETER Experiment Name: At_Far-red-induction_P Parameter: Plant Line Value: Columbia
  misc_feature: MA Experiment 20001451 PARAMETER Experiment Name: At_Far-red-induction_P Parameter: Timepoint (hr) Value: 24
  misc_feature: MA Experiment 20001451 PARAMETER Experiment Name: At_Far-red-induction_P Parameter: Tissue Value: Whole Plant
  misc_feature: MA Experiment ID: 20001557 Result: Up-regulated in Transcription
  misc_feature: MA Experiment 20001557 PARAMETER Experiment Name: At_Drought_Soil_Dry_P Parameter: Age (day) Value: 27
  misc_feature: MA Experiment 20001557 PARAMETER Experiment Name: At_Drought_Soil_Dry_P Parameter: Organism Value: A. thaliana
  misc_feature: MA Experiment 20001557 PARAMETER Experiment Name: At_Drought_Soil_Dry_P Parameter: Plant Line Value: WS
  misc_feature: MA Experiment 20001557 PARAMETER Experiment Name: At_Drought_Soil_Dry_P Parameter: Post Timepoint (hr) Value: 3
  misc_feature: MA Experiment 20001557 PARAMETER Experiment Name: At_Drought_Soil_Dry_P Parameter: Post-Treatment Value: Re-Water vs. No Drought
  misc_feature: MA Experiment 20001557 PARAMETER Experiment Name: At_Drought_Soil_Dry_P Parameter: Timepoint (day) Value: 13
  misc_feature: MA Experiment 20001557 PARAMETER Experiment Name: At_Drought_Soil_Dry_P Parameter: Treatment Value: Drought vs. No Drought
  misc_feature: MA Experiment ID: 20001558 Result: Up-regulated in Transcription
  misc_feature: MA Experiment 20001558 PARAMETER Experiment Name: At_Drought_Soil_Dry_P Parameter: Age (day) Value: 27
  misc_feature: MA Experiment 20001558 PARAMETER Experiment Name: At_Drought_Soil_Dry_P Parameter: Organism Value: A. thaliana
  misc_feature: MA Experiment 20001558 PARAMETER Experiment Name: At_Drought_Soil_Dry_P Parameter: Plant Line Value: WS
  misc_feature: MA Experiment 20001558 PARAMETER Experiment Name: At_Drought_Soil_Dry_P Parameter: Post Timepoint (hr) Value: 6
  misc_feature: MA Experiment 20001558 PARAMETER Experiment Name: At_Drought_Soil_Dry_P Parameter: Post-Treatment Value: Re-Water vs. No Drought
  misc_feature: MA Experiment 20001558 PARAMETER Experiment Name: At_Drought_Soil_Dry_P Parameter: Timepoint (day) Value: 13
  misc_feature: MA Experiment 20001558 PARAMETER Experiment Name: At_Drought_Soil_Dry_P Parameter: Treatment Value: Drought vs. No Drought
  misc_feature: MA Experiment ID: 20001560 Result: Up-regulated in Transcription
  misc_feature: MA Experiment 20001560 PARAMETER Experiment Name: At_Drought_Soil_Dry_P Parameter: Age (day) Value: 28
  misc_feature: MA Experiment 20001560 PARAMETER Experiment Name: At_Drought_Soil_Dry_P Parameter: Organism Value: A. thaliana
  misc_feature: MA Experiment 20001560 PARAMETER Experiment Name: At_Drought_Soil_Dry_P Parameter: Plant Line Value: WS
  misc_feature: MA Experiment 20001560 PARAMETER Experiment Name: At_Drought_Soil_Dry_P Parameter: Post Timepoint (hr) Value: None
  misc_feature: MA Experiment 20001560 PARAMETER Experiment Name: At_Drought_Soil_Dry_P Parameter: Post-Treatment Value: None
  misc_feature: MA Experiment 20001560 PARAMETER Experiment Name: At_Drought_Soil_Dry_P Parameter: Timepoint (day) Value: 14
  misc_feature: MA Experiment 20001560 PARAMETER Experiment Name: At_Drought_Soil_Dry_P Parameter: Treatment Value: Drought vs. No Drought
  misc_feature: MA Experiment ID: 20001757 Result: Up-regulated in Transcription
  misc_feature: MA Experiment 20001757 PARAMETER Experiment Name: At_50mM_NH4NO3_L-to-H_P Parameter: Timepoint (hr) Value: 6
  misc_feature: MA Experiment 20001757 PARAMETER Experiment Name: At_50mM_NH4NO3_L-to-H_P Parameter: Tissue Value: Leaf
  misc_feature: MA Experiment 20001757 PARAMETER Experiment Name: At_50mM_NH4NO3_L-to-H_P Parameter: Treatment Value: 50mM NH4NO3 vs 100mM Mannitol
ctagccgcaaagagagaaagggagggaggagagtgtagcagatcggcgaaaatgacaaccagattcaagaagaacaggaagaagagaggtcacgtcagcgccggacatggacgtatcggtaagcaccgtaagcatcccggaggtcgtggtaacgctggaggtatgcatcaccacaggatcctcttcgacaagtaccatccaggttacttcggtaaagttggtatgaggtatttccacaagctgaggaacaagttcttctgcccaatcgttaacctcgacaagctttggtcactcgtccctgaagatgtgaaggcgaaatcaaccaaggacaatgttccgttgatcgatgtgactcaacatggtttcttcaaggttttgggtaaaggtcatttgcctgagaacaagccgttcgttgtgaaggcgaagcttatttcgaagactgctgagaagaagattaaggaagctggtggtgctgttgtgcttactgcttaagttaggtgaatttatttgcttaactctgtttttgaatcttctatggagttttatcatcttttgttgtcttttggattttggaaagagcgagatctctttaaagttagtagttttatgaaccttttgttggattttgataaatgtttggtattccgaattcagacttataattgcc

SEQ ID NO: 29911 - protein, 163 aa, Arabidopsis thaliana
  peptide (1)..(163): Ceres Seq. ID no. 12389142
  misc_feature (124)..(157): Pfam Name: Ribosomal protein L15 Pfam Description: Ribosomal protein L15
  misc_feature (18)..(163): Homolog of NCBI NO: 23491401 NR Description: ribosomal protein L27a [Plasmodium yoelii yoelii]
  misc_feature (18)..(163): Homolog of NCBI NO: 23612262 NR Description: 60S ribosomal protein L27a, putative [Plasmodium
  misc_feature (20)..(163): Homolog of NCBI NO: 22758850 NR Description: ribosomal protein L22 [Argopecten irradians]
  misc_feature (18)..(163): Homolog of NCBI NO: 23237917 NR Description: putative 60S ribosomal protein L27a
  misc_feature (18)..(163): Homolog of NCBI NO: 30017566 NR Description: putative ribosomal protein L27a
  misc_feature (18)..(163): Homolog of NCBI NO: 3608481 NR Description: ribosomal protein L27a [Petunia x hybrida]
  misc_feature (18)..(163): Homolog of NCBI NO: 7959355 NR Description: 60S ribosomal protein L27a [Panax ginseng]
  misc_feature (18)..(163): Homolog of NCBI NO: 15220698 NR Description: 60s ribosomal protein l27a.
  misc_feature (18)..(163): Homolog of NCBI NO: 21553702 NR Description: 60S ribosomal protein L27A [Arabidopsis thaliana]
  misc_feature (18)..(163): Homolog of NCBI NO: 15223190 NR Description: 60S ribosomal protein L27A
LAAKREREGGECSRSAKMTTRFKKNRKKRGHVSAGHGRIGKHRKHPGGRGNAGGMHHHRILFDKYHPGYFGKVGMRYFHKLRNKFFCPIVNLDKLWSLVPEDVKAKSTKDNVPLIDVTQHGFFKVLGKGHLPENKPFVVKAKLISKTAEKKIKEAGGAVVLTA

SEQ ID NO: 29912 - protein, 146 aa, Arabidopsis thaliana [sequence omitted]

SEQ ID NO: 29913 - protein, 109 aa, Arabidopsis thaliana
  peptide (1)..(109): Ceres Seq. ID no. 12389144
  misc_feature (70)..(103): Pfam Name: Ribosomal protein L15 Pfam Description: Ribosomal protein L15
  misc_feature (1)..(109): Homolog of NCBI NO: 23491401 NR Description: ribosomal protein L27a [Plasmodium yoelii yoelii]
  misc_feature (1)..(109): Homolog of NCBI NO: 23612262 NR Description: 60S ribosomal protein L27a, putative [Plasmodium
  misc_feature (1)..(109): Homolog of NCBI NO: 22758850 NR Description: ribosomal protein L22 [Argopecten irradians]
  misc_feature (1)..(109): Homolog of NCBI NO: 23237917 NR Description: putative 60S ribosomal protein L27a
  misc_feature (1)..(109): Homolog of NCBI NO: 30017566 NR Description: putative ribosomal protein L27a
  misc_feature (1)..(109): Homolog of NCBI NO: 3608481 NR Description: ribosomal protein L27a [Petunia x hybrida]
  misc_feature (1)..(109): Homolog of NCBI NO: 7959355 NR Description: 60S ribosomal protein L27a [Panax ginseng]
  misc_feature (1)..(109): Homolog of NCBI NO: 15220698 NR Description: 60s ribosomal protein l27a.
  misc_feature (1)..(109): Homolog of NCBI NO: 21553702 NR Description: 60S ribosomal protein L27A [Arabidopsis thaliana]
  misc_feature (1)..(109): Homolog of NCBI NO: 15223190 NR Description: 60S ribosomal protein L27A
MHHHRILFDKYHPGYFGKVGMRYFHKLRNKFFCPIVNLDKLWSLVPEDVKAKSTKDNVPLIDVTQHGFFKVLGKGHLPENKPFVVKAKLISKTAEKKIKEAGGAVVLTA

SEQ ID NO: 29914 - DNA, 969 bp, Arabidopsis thaliana
  misc_feature (1)..(969): Ceres Seq. ID no. 12421076
  misc_feature: MA Experiment ID: 108434 Result: Down-regulated in Transcription
  misc_feature: MA Experiment 108434 PARAMETER Experiment Name: At_Root_Tips_cDNA_P Parameter: Tissue Value: Root Tips
  misc_feature: MA Experiment ID: 108461 Result: Up-regulated in Transcription
  misc_feature: MA Experiment 108461 PARAMETER Experiment Name: At_Germinating_Seeds_cDNA_P Parameter: Age (day) Value: 1 vs. 0
  misc_feature: MA Experiment 108461 PARAMETER Experiment Name: At_Germinating_Seeds_cDNA_P Parameter: Tissue Value: Germinating Seeds
  misc_feature: MA Experiment ID: 108462 Result: Up-regulated in Transcription
  misc_feature: MA Experiment 108462 PARAMETER Experiment Name: At_Germinating_Seeds_cDNA_P Parameter: Age (day) Value: 2 vs. 0
  misc_feature: MA Experiment 108462 PARAMETER Experiment Name: At_Germinating_Seeds_cDNA_P Parameter: Tissue Value: Germinating Seeds
  misc_feature: MA Experiment ID: 108463 Result: Up-regulated in Transcription
  misc_feature: MA Experiment 108463 PARAMETER Experiment Name: At_Germinating_Seeds_cDNA_P Parameter: Age (day) Value: 3 vs. 0
  misc_feature: MA Experiment 108463 PARAMETER Experiment Name: At_Germinating_Seeds_cDNA_P Parameter: Tissue Value: Germinating Seeds
  misc_feature: MA Experiment ID: 108464 Result: Up-regulated in Transcription
  misc_feature: MA Experiment 108464 PARAMETER Experiment Name: At_Germinating_Seeds_cDNA_P Parameter: Age (day) Value: 4 vs. 0
  misc_feature: MA Experiment 108464 PARAMETER Experiment Name: At_Germinating_Seeds_cDNA_P Parameter: Tissue Value: Germinating Seeds
  misc_feature: MA Experiment ID: 108469 Result: Up-regulated in Transcription
  misc_feature: MA Experiment ID: 108488 Result: Down-regulated in Transcription
  misc_feature: MA Experiment ID: 108573 Result: Up-regulated in Transcription
  misc_feature: MA Experiment 108573 PARAMETER Experiment Name: At_Drought_cDNA_P Parameter: Timepoint (hr) Value: 6
  misc_feature: MA Experiment 108573 PARAMETER Experiment Name: At_Drought_cDNA_P Parameter: Tissue Value: Aerial
  misc_feature: MA Experiment 108573 PARAMETER Experiment Name: At_Drought_cDNA_P Parameter: Treatment Value: Drought vs. No Drought
  misc_feature: MA Experiment ID: 108668 Result: Up-regulated in Transcription
  misc_feature: MA Experiment 108668 PARAMETER Experiment Name: At_2mM_SA_cDNA_P Parameter: Plant Line Value: WS
  misc_feature: MA Experiment 108668 PARAMETER Experiment Name: At_2mM_SA_cDNA_P Parameter: Timepoint (hr) Value: 6
  misc_feature: MA Experiment 108668 PARAMETER Experiment Name: At_2mM_SA_cDNA_P Parameter: Treatment Value: 2mM SA vs. No Treatment
  misc_feature: MA Experiment ID: 20000090 Result: Up-regulated in Transcription
  misc_feature: MA Experiment ID: 20000173 Result: Down-regulated in Transcription
  misc_feature: MA Experiment 20000173 PARAMETER Experiment Name: At_42deg_Heat_P Parameter: Age (day) Value: 14
  misc_feature: MA Experiment 20000173 PARAMETER Experiment Name: At_42deg_Heat_P Parameter: Organism Value: A. thaliana
  misc_feature: MA Experiment 20000173 PARAMETER Experiment Name: At_42deg_Heat_P Parameter: Plant Line Value: WS
  misc_feature: MA Experiment 20000173 PARAMETER Experiment Name: At_42deg_Heat_P Parameter: Temperature (deg C) Value: 42 vs. 22
  misc_feature: MA Experiment 20000173 PARAMETER Experiment Name: At_42deg_Heat_P Parameter: Timepoint (hr) Value: 6
  misc_feature: MA Experiment 20000173 PARAMETER Experiment Name: At_42deg_Heat_P Parameter: Tissue Value: Aerial
  misc_feature: MA Experiment ID: 20000179 Result: Up-regulated in Transcription
  misc_feature: MA Experiment 20000179 PARAMETER Experiment Name: At_Germinating_Seeds_P Parameter: Age (hr) Value: 6 vs. 0
  misc_feature: MA Experiment 20000179 PARAMETER Experiment Name: At_Germinating_Seeds_P Parameter: Tissue Value: Germinating Seeds
  misc_feature: MA Experiment ID: 20000180 Result: Up-regulated in Transcription
  misc_feature: MA Experiment 20000180 PARAMETER Experiment Name: At_Germinating_Seeds_P Parameter: Age (hr) Value: 24 vs. 0
  misc_feature: MA Experiment 20000180 PARAMETER Experiment Name: At_Germinating_Seeds_P Parameter: Tissue Value: Germinating Seeds
  misc_feature: MA Experiment ID: 20000182 Result: Up-regulated in Transcription
  misc_feature: MA Experiment 20000182 PARAMETER Experiment Name: At_2mM_SA_P Parameter: Age (day) Value: 14
  misc_feature: MA Experiment 20000182 PARAMETER Experiment Name: At_2mM_SA_P Parameter: Organism Value: A. thaliana
  misc_feature: MA Experiment 20000182 PARAMETER Experiment Name: At_2mM_SA_P Parameter: Plant Line Value: WS
  misc_feature: MA Experiment 20000182 PARAMETER Experiment Name: At_2mM_SA_P Parameter: Timepoint (hr) Value: 6
  misc_feature: MA Experiment 20000182 PARAMETER Experiment Name: At_2mM_SA_P Parameter: Tissue Value: Aerial
  misc_feature: MA Experiment 20000182 PARAMETER Experiment Name: At_2mM_SA_P Parameter: Treatment Value: 2mM SA vs. No Treatment
  misc_feature: MA Experiment ID: 20000185 Result: Up-regulated in Transcription
  misc_feature: MA Experiment 20000185 PARAMETER Experiment Name: At_Roots__P Parameter: Age (day) Value: 7 vs. 21
  misc_feature: MA Experiment 20000185 PARAMETER Experiment Name: At_Roots__P Parameter: Organism Value: A. thaliana
  misc_feature: MA Experiment 20000185 PARAMETER Experiment Name: At_Roots__P Parameter: Tissue Value: Roots vs. Whole Plant
  misc_feature: MA Experiment ID: 20000439 Result: Up-regulated in Transcription
  misc_feature: MA Experiment 20000439 PARAMETER Experiment Name: At_Roots__P Parameter: Age (day) Value: 14 vs. 21
  misc_feature: MA Experiment 20000439 PARAMETER Experiment Name: At_Roots__P Parameter: Organism Value: A. thaliana
  misc_feature: MA Experiment 20000439 PARAMETER Experiment Name: At_Roots__P Parameter: Tissue Value: Roots vs. Whole Plant
  misc_feature: MA Experiment ID: 20001904 Result: Up-regulated in Transcription
  misc_feature: MA Experiment 20001904 PARAMETER Experiment Name: At_Drought_Reproduction_P Parameter: Age (day) Value: 37
  misc_feature: MA Experiment 20001904 PARAMETER Experiment Name: At_Drought_Reproduction_P Parameter: Organism Value: A. thaliana
  misc_feature: MA Experiment 20001904 PARAMETER Experiment Name: At_Drought_Reproduction_P Parameter: Plant Line Value: WS
  misc_feature: MA Experiment 20001904 PARAMETER Experiment Name: At_Drought_Reproduction_P Parameter: Timepoint (day) Value: 7
  misc_feature: MA Experiment 20001904 PARAMETER Experiment Name: At_Drought_Reproduction_P Parameter: Tissue Value: Rosettes
  misc_feature: MA Experiment 20001904 PARAMETER Experiment Name: At_Drought_Reproduction_P Parameter: Treatment Value: Drought vs. No Drought
  misc_feature: MA Experiment ID: 20001905 Result: Up-regulated in Transcription
  misc_feature: MA Experiment 20001905 PARAMETER Experiment Name: At_Drought_Reproduction_P Parameter: Age (day) Value: 40
  misc_feature: MA Experiment 20001905 PARAMETER Experiment Name: At_Drought_Reproduction_P Parameter: Organism Value: A. thaliana
  misc_feature: MA Experiment 20001905 PARAMETER Experiment Name: At_Drought_Reproduction_P Parameter: Plant Line Value: WS
  misc_feature: MA Experiment 20001905 PARAMETER Experiment Name: At_Drought_Reproduction_P Parameter: Timepoint (day) Value: 10
  misc_feature: MA Experiment 20001905 PARAMETER Experiment Name: At_Drought_Reproduction_P Parameter: Tissue Value: Rosettes
  misc_feature: MA Experiment 20001905 PARAMETER Experiment Name: At_Drought_Reproduction_P Parameter: Treatment Value: Drought vs. No Drought
agaagaagaaagaaacaatggagtctcccaaatctaacgtcgacgatggctaccagaacatcttcgtcatgcgtcacggtgatcgaatcgacaatttcaagccactctgggtttcaaccgccgagagaccttgggatccacctctggttcaagacggtatgattcgtgcgtttcgtaccggtcaaaggatccgatctcagatcgggtttccgattcaccgtgtcttcgtctcccctttcctccgatgtctccaaacagcttccgaagtcgtcgcagctctctccgccgtcaatgtcgatcctaacgccatgtcttccaaagacgtcccttccattgataaatctaagctcaaggtttctattgaattaggtttgtgtgagatgttgaactcagtggctataaggcgtgagcttgctcctaaagatgggaaatttgacttcactgtttcagatattgaaactatgtttcctgagggaatggttgatcataatgtggatatggtttataaagagttgcctaaatgggaagagtctgtggaaggttgcagagatcgatatgttaaagttgtaaaggctcttgctgataagtatcctgaagagaacttgctcttagtaacccacggggaaggagttggaactacattttcgacattctataaagatacaacagtgtacgaagtagactactgtgcttatgttgaaatgagaagacaagtctcaagtgaagatgggtctgttaaagctggggactatgaggtggttttgagtcatggtcaagctgggatcaggtttagtcatgatcctgtcagttatgaacctgtcataagccattcacctgtttagtcaaattgtcttcagtgtcctctgtttctgtacttttgattgtatttgaactgcttttgtatgaattatgaaacattgtttcaaagttttcattcaatcgaataagagtccaaagaaaacaaaaaaa

SEQ ID NO: 29915 - protein, 279 aa, Arabidopsis thaliana
  peptide (1)..(279): Ceres Seq. ID no. 12421077
  misc_feature (18)..(115): Pfam Name: Phosphoglycerate mutase family Pfam Description: Phosphoglycerate mutase family
  misc_feature (18)..(99): Homolog of NCBI NO: 17230464 NR Description: hypothetical protein [Nostoc sp. PCC 7120]
  misc_feature (18)..(99): Homolog of NCBI NO: 23042637 NR Description: hypothetical protein [Trichodesmium erythraeum
  misc_feature (116)..(212): Homolog of NCBI NO: 23042637 NR Description: hypothetical protein [Trichodesmium erythraeum
  misc_feature (41)..(263): Homolog of NCBI NO: 25347741 NR Description: pRIB5 protein [imported] - Ribes nigrum
  misc_feature (23)..(279): Homolog of NCBI NO: 21592687 NR Description: unknown [Arabidopsis thaliana]
  misc_feature (6)..(279): Homolog of NCBI NO: 15232324 NR Description: putative protein
  misc_feature (1)..(263): Homolog of NCBI NO: 15232326 NR Description: putative protein; protein id: At3g60430.1
  misc_feature (6)..(263): Homolog of NCBI NO: 15232328 NR Description: putative protein; protein id: At3g60440.1
  misc_feature (6)..(279): Homolog of NCBI NO: 15232331 NR Description: putative protein
  misc_feature (6)..(279): Homolog of NCBI NO: 21553703 NR Description: pRIB5 protein [Arabidopsis thaliana]
KKKETMESPKSNVDDGYQNIFVMRHGDRIDNFKPLWVSTAERPWDPPLVQDGMIRAFRTGQRIRSQIGFPIHRVFVSPFLRCLQTASEVVAALSAVNVDPNAMSSKDVPSIDKSKLKVSIELGLCEMLNSVAIRRELAPKDGKFDFTVSDIETMFPEGMVDHNVDMVYKELPKWEESVEGCRDRYVKVVKALADKYPEENLLLVTHGEGVGTTFSTFYKDTTVYEVDYCAYVEMRRQVSSEDGSVKAGDYEVVLSHGQAGIRFSHDPVSYEPVISHSPV

SEQ ID NO: 29916 - protein, 274 aa, Arabidopsis thaliana
  peptide (1)..(274): Ceres Seq. ID no. 12421078
  misc_feature (13)..(110): Pfam Name: Phosphoglycerate mutase family Pfam Description: Phosphoglycerate mutase family
  misc_feature (13)..(94): Homolog of NCBI NO: 17230464 NR Description: hypothetical protein [Nostoc sp. PCC 7120]
  misc_feature (13)..(94): Homolog of NCBI NO: 23042637 NR Description: hypothetical protein [Trichodesmium erythraeum
  misc_feature (111)..(207): Homolog of NCBI NO: 23042637 NR Description: hypothetical protein [Trichodesmium erythraeum
  misc_feature (36)..(258): Homolog of NCBI NO: 25347741 NR Description: pRIB5 protein [imported] - Ribes nigrum
  misc_feature (18)..(274): Homolog of NCBI NO: 21592687 NR Description: unknown [Arabidopsis thaliana]
  misc_feature (1)..(274): Homolog of NCBI NO: 15232324 NR Description: putative protein
  misc_feature (1)..(258): Homolog of NCBI NO: 15232326 NR Description: putative protein; protein id: At3g60430.1
  misc_feature (1)..(258): Homolog of NCBI NO: 15232328 NR Description: putative protein; protein id: At3g60440.1
  misc_feature (1)..(274): Homolog of NCBI NO: 15232331 NR Description: putative protein
  misc_feature (1)..(274): Homolog of NCBI NO: 21553703 NR Description: pRIB5 protein [Arabidopsis thaliana]
MESPKSNVDDGYQNIFVMRHGDRIDNFKPLWVSTAERPWDPPLVQDGMIRAFRTGQRIRSQIGFPIHRVFVSPFLRCLQTASEVVAALSAVNVDPNAMSSKDVPSIDKSKLKVSIELGLCEMLNSVAIRRELAPKDGKFDFTVSDIETMFPEGMVDHNVDMVYKELPKWEESVEGCRDRYVKVVKALADKYPEENLLLVTHGEGVGTTFSTFYKDTTVYEVDYCAYVEMRRQVSSEDGSVKAGDYEVVLSHGQAGIRFSHDPVSYEPVISHSPV

SEQ ID NO: 29917 - protein, 257 aa, Arabidopsis thaliana
  peptide (1)..(257): Ceres Seq. ID no. 12421079
  misc_feature (1)..(93): Pfam Name: Phosphoglycerate mutase family Pfam Description: Phosphoglycerate mutase family
  misc_feature (1)..(77): Homolog of NCBI NO: 17230464 NR Description: hypothetical protein [Nostoc sp. PCC 7120]
  misc_feature (1)..(77): Homolog of NCBI NO: 23042637 NR Description: hypothetical protein [Trichodesmium erythraeum
  misc_feature (94)..(190): Homolog of NCBI NO: 23042637 NR Description: hypothetical protein [Trichodesmium erythraeum
  misc_feature (19)..(241): Homolog of NCBI NO: 25347741 NR Description: pRIB5 protein [imported] - Ribes nigrum
  misc_feature (1)..(257): Homolog of NCBI NO: 21592687 NR Description: unknown [Arabidopsis thaliana]
  misc_feature (1)..(257): Homolog of NCBI NO: 15232324 NR Description: putative protein
  misc_feature (1)..(241): Homolog of NCBI NO: 15232326 NR Description: putative protein; protein id: At3g60430.1
  misc_feature (1)..(241): Homolog of NCBI NO: 15232328 NR Description: putative protein; protein id: At3g60440.1
  misc_feature (1)..(257): Homolog of NCBI NO: 15232331 NR Description: putative protein
  misc_feature (1)..(257): Homolog of NCBI NO: 21553703 NR Description: pRIB5 protein [Arabidopsis thaliana]
MRHGDRIDNFKPLWVSTAERPWDPPLVQDGMIRAFRTGQRIRSQIGFPIHRVFVSPFLRCLQTASEVVAALSAVNVDPNAMSSKDVPSIDKSKLKVSIELGLCEMLNSVAIRRELAPKDGKFDFTVSDIETMFPEGMVDHNVDMVYKELPKWEESVEGCRDRYVKVVKALADKYPEENLLLVTHGEGVGTTFSTFYKDTTVYEVDYCAYVEMRRQVSSEDGSVKAGDYEVVLSHGQAGIRFSHDPVSYEPVISHSPV

SEQ ID NO: 29918 - DNA, 617 bp, Arabidopsis thaliana
  misc_feature (1)..(617): Ceres Seq. ID no. 12333456
  misc_feature: MA Experiment ID: 108434 Result: Down-regulated in Transcription
  misc_feature: MA Experiment 108434 PARAMETER Experiment Name: At_Root_Tips_cDNA_P Parameter: Tissue Value: Root Tips
  misc_feature: MA Experiment ID: 108462 Result: Up-regulated in Transcription
  misc_feature: MA Experiment 108462 PARAMETER Experiment Name: At_Germinating_Seeds_cDNA_P Parameter: Age (day) Value: 2 vs. 0
  misc_feature: MA Experiment 108462 PARAMETER Experiment Name: At_Germinating_Seeds_cDNA_P Parameter: Tissue Value: Germinating Seeds
  misc_feature: MA Experiment ID: 108595 Result: Down-regulated in Transcription
  misc_feature: MA Experiment 108595 PARAMETER Experiment Name: At_Ler-pi_Ovule_cDNA_P Parameter: Plant Line Value: null
  misc_feature: MA Experiment ID: 20000179 Result: Up-regulated in Transcription
  misc_feature: MA Experiment 20000179 PARAMETER Experiment Name: At_Germinating_Seeds_P Parameter: Age (hr) Value: 6 vs. 0
  misc_feature: MA Experiment 20000179 PARAMETER Experiment Name: At_Germinating_Seeds_P Parameter: Tissue Value: Germinating Seeds
  misc_feature: MA Experiment ID: 20000180 Result: Up-regulated in Transcription
  misc_feature: MA Experiment 20000180 PARAMETER Experiment Name: At_Germinating_Seeds_P Parameter: Age (hr) Value: 24 vs. 0
  misc_feature: MA Experiment 20000180 PARAMETER Experiment Name: At_Germinating_Seeds_P Parameter: Tissue Value: Germinating Seeds
  misc_feature: MA Experiment ID: 20000185 Result: Up-regulated in Transcription
  misc_feature: MA Experiment 20000185 PARAMETER Experiment Name: At_Roots__P Parameter: Age (day) Value: 7 vs. 21
  misc_feature: MA Experiment 20000185 PARAMETER Experiment Name: At_Roots__P Parameter: Organism Value: A. thaliana
  misc_feature: MA Experiment 20000185 PARAMETER Experiment Name: At_Roots__P Parameter: Tissue Value: Roots vs. Whole Plant
  misc_feature: MA Experiment ID: 20000224 Result: Down-regulated in Transcription
  misc_feature: MA Experiment ID: 20000234 Result: Up-regulated in Transcription
  misc_feature: MA Experiment 20000234 PARAMETER Experiment Name: At_Siliques_P Parameter: Age (day) Value: 21
  misc_feature: MA Experiment 20000234 PARAMETER Experiment Name: At_Siliques_P Parameter: Organism Value: A. thaliana
  misc_feature: MA Experiment 20000234 PARAMETER Experiment Name: At_Siliques_P Parameter: Plant Line Value: WS
  misc_feature: MA Experiment 20000234 PARAMETER Experiment Name: At_Siliques_P Parameter: Tissue Value: Less Than 5mm Siliques vs. Whole Plant
  misc_feature: MA Experiment ID: 20000235 Result: Up-regulated in Transcription
  misc_feature: MA Experiment 20000235 PARAMETER Experiment Name: At_Siliques_P Parameter: Age (day) Value: 21
  misc_feature: MA Experiment 20000235 PARAMETER Experiment Name: At_Siliques_P Parameter: Organism Value: A. thaliana
  misc_feature: MA Experiment 20000235 PARAMETER Experiment Name: At_Siliques_P Parameter: Plant Line Value: WS
  misc_feature: MA Experiment 20000235 PARAMETER Experiment Name: At_Siliques_P Parameter: Tissue Value: 5-10mm Siliques vs. Whole Plant
  misc_feature: MA Experiment ID: 20000439 Result: Up-regulated in Transcription
  misc_feature: MA Experiment 20000439 PARAMETER Experiment Name: At_Roots__P Parameter: Age (day) Value: 14 vs. 21
  misc_feature: MA Experiment 20000439 PARAMETER Experiment Name: At_Roots__P Parameter: Organism Value: A. thaliana
  misc_feature: MA Experiment 20000439 PARAMETER Experiment Name: At_Roots__P Parameter: Tissue Value: Roots vs. Whole Plant
  misc_feature: MA Experiment ID: 20001555 Result: Down-regulated in Transcription
  misc_feature: MA Experiment 20001555 PARAMETER Experiment Name: At_Drought_Soil_Dry_P Parameter: Age (day) Value: 24
  misc_feature: MA Experiment 20001555 PARAMETER Experiment Name: At_Drought_Soil_Dry_P Parameter: Organism Value: A. thaliana
  misc_feature: MA Experiment 20001555 PARAMETER Experiment Name: At_Drought_Soil_Dry_P Parameter: Plant Line Value: WS
  misc_feature: MA Experiment 20001555 PARAMETER Experiment Name: At_Drought_Soil_Dry_P Parameter: Post Timepoint (hr) Value: None
  misc_feature: MA Experiment 20001555 PARAMETER Experiment Name: At_Drought_Soil_Dry_P Parameter: Post-Treatment Value: None
  misc_feature: MA Experiment 20001555 PARAMETER Experiment Name: At_Drought_Soil_Dry_P Parameter: Timepoint (day) Value: 10
  misc_feature: MA Experiment 20001555 PARAMETER Experiment Name: At_Drought_Soil_Dry_P Parameter: Treatment Value: Drought vs. No Drought
  misc_feature: MA Experiment ID: 20001556 Result: Down-regulated in Transcription
  misc_feature: MA Experiment 20001556 PARAMETER Experiment Name: At_Drought_Soil_Dry_P Parameter: Age (day) Value: 26
  misc_feature: MA Experiment 20001556 PARAMETER Experiment Name: At_Drought_Soil_Dry_P Parameter: Organism Value: A. thaliana
  misc_feature: MA Experiment 20001556 PARAMETER Experiment Name: At_Drought_Soil_Dry_P Parameter: Plant Line Value: WS
  misc_feature: MA Experiment 20001556 PARAMETER Experiment Name: At_Drought_Soil_Dry_P Parameter: Post Timepoint (hr) Value: None
  misc_feature: MA Experiment 20001556 PARAMETER Experiment Name: At_Drought_Soil_Dry_P Parameter: Post-Treatment Value: None
  misc_feature: MA Experiment 20001556 PARAMETER Experiment Name: At_Drought_Soil_Dry_P Parameter: Timepoint (day) Value: 12
  misc_feature: MA Experiment 20001556 PARAMETER Experiment Name: At_Drought_Soil_Dry_P Parameter: Treatment Value: Drought vs. No Drought
  misc_feature: MA Experiment ID: 20001560 Result: Up-regulated in Transcription
  misc_feature: MA Experiment 20001560 PARAMETER Experiment Name: At_Drought_Soil_Dry_P Parameter: Age (day) Value: 28
  misc_feature: MA Experiment 20001560 PARAMETER Experiment Name: At_Drought_Soil_Dry_P Parameter: Organism Value: A. thaliana
  misc_feature: MA Experiment 20001560 PARAMETER Experiment Name: At_Drought_Soil_Dry_P Parameter: Plant Line Value: WS
  misc_feature: MA Experiment 20001560 PARAMETER Experiment Name: At_Drought_Soil_Dry_P Parameter: Post Timepoint (hr) Value: None
  misc_feature: MA Experiment 20001560 PARAMETER Experiment Name: At_Drought_Soil_Dry_P Parameter: Post-Treatment Value: None
  misc_feature: MA Experiment 20001560 PARAMETER Experiment Name: At_Drought_Soil_Dry_P Parameter: Timepoint (day) Value: 14
  misc_feature: MA Experiment 20001560 PARAMETER Experiment Name: At_Drought_Soil_Dry_P Parameter: Treatment Value: Drought vs. No Drought
aaaatcagacaaaagcctcgcatctctctctcttgggatctgaatcttcaaattgaaaacaaaaagatcacaagagaaaaaaccaaaaaaaaatgcctcatggaactcttgaagttgttcttgtcagcgccaaaggtctcgaggacgcagattttctgaatcagaagagcaacgttgcagaaggaatggggacaactccggaatggaatgagacatttatcttcactgtgtctgaaggaactacagagttaaaagcgaaaatcttcgacaaagatgtcggtacagaggatgatgcggttggtgaagcaactattccgttggagccggttttcgtggaaggaagtattccaccaactgcatacaatgtggtgaaagatgaagagtacaaaggagagatttgggtggctctctccttcaagccctcggaaaaccgaagcaggggtatggacgaggagtcctatgggggctggaaaaactctgaagcatcatactaagagaagaaaccattgtgcgtgtcactgtttgatttgagtcttgggaacaaaattttgagttttcatttgaaagcgtattttttgttcagattgtttttaatgatttcataaactcgtgagatt

SEQ ID NO: 29919 - protein, 133 aa, Arabidopsis thaliana
  peptide (1)..(133): Ceres Seq. ID no. 12333457
  misc_feature (6)..(73): Pfam Name: C2 domain Pfam Description: C2 domain
  misc_feature (1)..(114): Homolog of NCBI NO: 5565983 NR Description: unknown [Zea mays]
  misc_feature (1)..(126): Homolog of NCBI NO: 7489756 NR Description: hypothetical protein - maize
  misc_feature (1)..(133): Homolog of NCBI NO: 3860331 NR Description: hypothetical protein [Cicer arietinum]
  misc_feature (1)..(126): Homolog of NCBI NO: 38345558 NR Description: OSJNBa0032F06.15 [Oryza sativa (japonica
  misc_feature (1)..(129): Homolog of NCBI NO: 11358958 NR Description: elicitor-responsive gene 3 [imported] - rice
  misc_feature (1)..(133): Homolog of NCBI NO: 21553977 NR Description: putative elicitor-responsive gene [Arabidopsis
  misc_feature (1)..(133): Homolog of NCBI NO: 15221718 NR Description: putative elicitor-responsive gene
MPHGTLEVVLVSAKGLEDADFLNQKSNVAEGMGTTPEWNETFIFTVSEGTTELKAKIFDKDVGTEDDAVGEATIPLEPVFVEGSIPPTAYNVVKDEEYKGEIWVALSFKPSENRSRGMDEESYGGWKNSEASY

SEQ ID NO: 29920 - protein, 102 aa, Arabidopsis thaliana
  peptide (1)..(102): Ceres Seq. ID no. 12333458
  misc_feature (1)..(83): Homolog of NCBI NO: 5565983 NR Description: unknown [Zea mays]
  misc_feature (1)..(95): Homolog of NCBI NO: 7489756 NR Description: hypothetical protein - maize
  misc_feature (1)..(102): Homolog of NCBI NO: 3860331 NR Description: hypothetical protein [Cicer arietinum]
  misc_feature (1)..(95): Homolog of NCBI NO: 38345558 NR Description: OSJNBa0032F06.15 [Oryza sativa (japonica
  misc_feature (1)..(98): Homolog of NCBI NO: 11358958 NR Description: elicitor-responsive gene 3 [imported] - rice
  misc_feature (1)..(102): Homolog of NCBI NO: 21553977 NR Description: putative elicitor-responsive gene [Arabidopsis
  misc_feature (1)..(102): Homolog of NCBI NO: 15221718 NR Description: putative elicitor-responsive gene
MGTTPEWNETFIFTVSEGTTELKAKIFDKDVGTEDDAVGEATIPLEPVFVEGSIPPTAYNVVKDEEYKGEIWVALSFKPSENRSRGMDEESYGGWKNSEASY

SEQ ID NO: 29921 - DNA, 1371 bp, Arabidopsis thaliana
  misc_feature (1)..(1371): Ceres Seq. ID no. 13497131
  misc_feature: MA Experiment ID: 108434 Result: Up-regulated in Transcription
  misc_feature: MA Experiment 108434 PARAMETER Experiment Name: At_Root_Tips_cDNA_P Parameter: Tissue Value: Root Tips
  misc_feature: MA Experiment ID: 108462 Result: Down-regulated in Transcription
  misc_feature: MA Experiment 108462 PARAMETER Experiment Name: At_Germinating_Seeds_cDNA_P Parameter: Age (day) Value: 2 vs. 0
  misc_feature: MA Experiment 108462 PARAMETER Experiment Name: At_Germinating_Seeds_cDNA_P Parameter: Tissue Value: Germinating Seeds
  misc_feature: MA Experiment ID: 108463 Result: Down-regulated in Transcription
  misc_feature: MA Experiment 108463 PARAMETER Experiment Name: At_Germinating_Seeds_cDNA_P Parameter: Age (day) Value: 3 vs. 0
  misc_feature: MA Experiment 108463 PARAMETER Experiment Name: At_Germinating_Seeds_cDNA_P Parameter: Tissue Value: Germinating Seeds
  misc_feature: MA Experiment ID: 108464 Result: Down-regulated in Transcription
  misc_feature: MA Experiment 108464 PARAMETER Experiment Name: At_Germinating_Seeds_cDNA_P Parameter: Age (day) Value: 4 vs. 0
  misc_feature: MA Experiment 108464 PARAMETER Experiment Name: At_Germinating_Seeds_cDNA_P Parameter: Tissue Value: Germinating Seeds
  misc_feature: MA Experiment ID: 108585 Result: Up-regulated in Transcription
  misc_feature: MA Experiment 108585 PARAMETER Experiment Name: At_5mM_NaNP_cDNA_P Parameter: Timepoint (hr) Value: 6
  misc_feature: MA Experiment 108585 PARAMETER Experiment Name: At_5mM_NaNP_cDNA_P Parameter: Tissue Value: Aerial
  misc_feature: MA Experiment 108585 PARAMETER Experiment Name: At_5mM_NaNP_cDNA_P Parameter: Treatment Value: null
  misc_feature: MA Experiment ID: 108595 Result: Down-regulated in Transcription
  misc_feature: MA Experiment 108595 PARAMETER Experiment Name: At_Ler-pi_Ovule_cDNA_P Parameter: Plant Line Value: null
  misc_feature: MA Experiment ID: 20000214 Result: Up-regulated in Transcription
  misc_feature: MA Experiment 20000214 PARAMETER Experiment Name: At_4deg_Cold_P Parameter: Timepoint (hr) Value: 6
  misc_feature: MA Experiment ID: 20000227 Result: Up-regulated in Transcription
  misc_feature: MA Experiment 20000227 PARAMETER Experiment Name: At_Root-Tips-vs-Tops_P Parameter: Tissue Value: Root Tips vs. Root Tops
  misc_feature: MA Experiment ID: 20001557 Result: Up-regulated in Transcription
  misc_feature: MA Experiment 20001557 PARAMETER Experiment Name: At_Drought_Soil_Dry_P Parameter: Age (day) Value: 27
  misc_feature: MA Experiment 20001557 PARAMETER Experiment Name: At_Drought_Soil_Dry_P Parameter: Organism Value: A. thaliana
  misc_feature: MA Experiment 20001557 PARAMETER Experiment Name: At_Drought_Soil_Dry_P Parameter: Plant Line Value: WS
  misc_feature: MA Experiment 20001557 PARAMETER Experiment Name: At_Drought_Soil_Dry_P Parameter: Post Timepoint (hr) Value: 3
  misc_feature: MA Experiment 20001557 PARAMETER Experiment Name: At_Drought_Soil_Dry_P Parameter: Post-Treatment Value: Re-Water vs. No Drought
  misc_feature: MA Experiment 20001557 PARAMETER Experiment Name: At_Drought_Soil_Dry_P Parameter: Timepoint (day) Value: 13
  misc_feature: MA Experiment 20001557 PARAMETER Experiment Name: At_Drought_Soil_Dry_P Parameter: Treatment Value: Drought vs. No Drought
  misc_feature: MA Experiment ID: 20001558 Result: Up-regulated in Transcription
  misc_feature: MA Experiment 20001558 PARAMETER Experiment Name: At_Drought_Soil_Dry_P Parameter: Age (day) Value: 27
  misc_feature: MA Experiment 20001558 PARAMETER Experiment Name: At_Drought_Soil_Dry_P Parameter: Organism Value: A. thaliana
  misc_feature: MA Experiment 20001558 PARAMETER Experiment Name: At_Drought_Soil_Dry_P Parameter: Plant Line Value: WS
  misc_feature: MA Experiment 20001558 PARAMETER Experiment Name: At_Drought_Soil_Dry_P Parameter: Post Timepoint (hr) Value: 6
  misc_feature: MA Experiment 20001558 PARAMETER Experiment Name: At_Drought_Soil_Dry_P Parameter: Post-Treatment Value: Re-Water vs. No Drought
  misc_feature: MA Experiment 20001558 PARAMETER Experiment Name: At_Drought_Soil_Dry_P Parameter: Timepoint (day) Value: 13
  misc_feature: MA Experiment 20001558 PARAMETER Experiment Name: At_Drought_Soil_Dry_P Parameter: Treatment Value: Drought vs. No Drought
  misc_feature: MA Experiment ID: 20001560 Result: Up-regulated in Transcription
  misc_feature: MA Experiment 20001560 PARAMETER Experiment Name: At_Drought_Soil_Dry_P Parameter: Age (day) Value: 28
  misc_feature: MA Experiment 20001560 PARAMETER Experiment Name: At_Drought_Soil_Dry_P Parameter: Organism Value: A. thaliana
  misc_feature: MA Experiment 20001560 PARAMETER Experiment Name: At_Drought_Soil_Dry_P Parameter: Plant Line Value: WS
  misc_feature: MA Experiment 20001560 PARAMETER Experiment Name: At_Drought_Soil_Dry_P Parameter: Post Timepoint (hr) Value: None
  misc_feature: MA Experiment 20001560 PARAMETER Experiment Name: At_Drought_Soil_Dry_P Parameter: Post-Treatment Value: None
  misc_feature: MA Experiment 20001560 PARAMETER Experiment Name: At_Drought_Soil_Dry_P Parameter: Timepoint (day) Value: 14
  misc_feature: MA Experiment 20001560 PARAMETER Experiment Name: At_Drought_Soil_Dry_P Parameter: Treatment Value: Drought vs. No Drought
aagctcaaagctcaagccgcttctatctctctacatttctctttctgcaatggcgagattagtgcgtgtggctagatcctcctccctctttggctttggtaaccgtttctactctacttcagccgaagctagccacgcgtcgtcgccttcgccgtttcttcacggcggcggagctagcagggttgctccgaaagatagaaatgttcagtgggtgtttttgggatgtcctggtgttggaaaaggaacttacgctagtagactatcaacccttctcggcgttcctcacatcgccaccggcgatctcgtccgtgaagagcttgcatcttctggacctctctctcaaaagctatcggagattgtaaatcagggaaaattggtttctgatgagatcattgtagacttattgtccaaaagacttgaggctggtgaagctagaggtgaatcagggtttatccttgatggctttcctcgtaccatgagacaagctgaaatactgggagatgtaactgacatcgatttggtggtgaatttgaagcttcctgaggaagttttggttgacaaatgccttggaaggagaacatgtagtcaatgtggcaagggttttaatgtagctcacatcaacttaaagggtgagaatggaagacctggaattagtatggatccacttctccctccacatcaatgtatgtcaaagcttgtcactcgagctgatgatactgaagaggtggtgaaagcaaggcttcgtatatacaatgaaacgagccagcctcttgaagaatactaccgtaccaagggaaagcttatggagtttgacttacctggaggcatcccagagtcatggccaaggctattggaagctttaaggcttgacgattacgaggagaaacagtctgtcgcagcataagttcactatcaaatcccggtatttaaaattctttgcatgtcgaatacatatgcgtaatcaattttgtgttggaaataaaagtaaaaagaaaaccttagattgtttttcacctcaatagaaataatcatacacacttgcgcaaactattatttttccaccagccggggattttggctccatgagagaaatatgatgtatcatgattgtttgagattgctagtgacattacaggaatgtatcaatacttctacaccacttgttatgcattgagtttaatcgttatgctcttgtgatatgttttttttggaaaatgtgatgaatgatgatattgcggctggccgagctggctggttaaagaactcaaccagacagtaaagtaaaacagccgcatagattaaacgggaacttataaccagctcttgactgtcctagcattggcggtgcgggatagaatcgttccttacatc

SEQ ID NO: 29922 - protein, 300 aa, Arabidopsis thaliana
  peptide (1)..(300): Ceres Seq. ID no. 13497132
  misc_feature (72)..(190): Pfam Name: Adenylate kinase Pfam Description: Adenylate kinase
  misc_feature (71)..(291): Homolog of NCBI NO: 26985214 NR Description: adenylate kinase [Thermotoga neapolitana]
  misc_feature (71)..(276): Homolog of NCBI NO: 23510140 NR Description: adenylate kinase 1 [Plasmodium falciparum 3D7]
  misc_feature (71)..(271): Homolog of NCBI NO: 28212159 NR Description: adenylate kinase [Clostridium tetani E88]
  misc_feature (71)..(295): Homolog of NCBI NO: 15644227 NR Description: adenylate kinase [Thermotoga maritima]
  misc_feature (71)..(287): Homolog of NCBI NO: 11498284 NR Description: adenylate kinase (adk) [Archaeoglobus fulgidus
  misc_feature (19)..(300): Homolog of NCBI NO: 30687836 NR Description: adenylate kinase -related [Arabidopsis thaliana]
  misc_feature (14)..(122): Homolog of NCBI NO: 6063552 NR Description: ESTs AU065232(E60855),C23624(S1554), correspond to a region of the predicted gene.~similar to putative
  misc_feature (113)..(300): Homolog of NCBI NO: 6063552 NR Description: ESTs AU065232(E60855),C23624(S1554), correspond to a region of the predicted gene.~similar to putative
  misc_feature (14)..(300): Homolog of NCBI NO: 29427816 NR Description: Adenylate kinase, chloroplast precursor (ATP-AMP
  misc_feature (17)..(300): Homolog of NCBI NO: 15228109 NR Description: adenylate kinase -related [Arabidopsis thaliana]
SSKLKPLLSLYISLSAMARLVRVARSSSLFGFGNRFYSTSAEASHASSPSPFLHGGGASRVAPKDRNVQWVFLGCPGVGKGTYASRLSTLLGVPHIATGDLVREELASSGPLSQKLSEIVNQGKLVSDEIIVDLLSKRLEAGEARGESGFILDGFPRTMRQAEILGDVTDIDLVVNLKLPEEVLVDKCLGRRTCSQCGKGFNVAHINLKGENGRPGISMDPLLPPHQCMSKLVTRADDTEEVVKARLRIYNETSQPLEEYYRTKGKLMEFDLPGGIPESWPRLLEALRLDDYEEKQSVAA

SEQ ID NO: 29923 - protein, 284 aa, Arabidopsis thaliana
  peptide (1)..(284): Ceres Seq. ID no. 13497133
  misc_feature (56)..(174): Pfam Name: Adenylate kinase Pfam Description: Adenylate kinase
  misc_feature (55)..(275): Homolog of NCBI NO: 26985214 NR Description: adenylate kinase [Thermotoga neapolitana]
  misc_feature (55)..(260): Homolog of NCBI NO: 23510140 NR Description: adenylate kinase 1 [Plasmodium falciparum 3D7]
  misc_feature (55)..(255): Homolog of NCBI NO: 28212159 NR Description: adenylate kinase [Clostridium tetani E88]
  misc_feature (55)..(279): Homolog of NCBI NO: 15644227 NR Description: adenylate kinase [Thermotoga maritima]
  misc_feature (55)..(271): Homolog of NCBI NO: 11498284 NR Description: adenylate kinase (adk) [Archaeoglobus fulgidus
  misc_feature (3)..(284): Homolog of NCBI NO: 30687836 NR Description: adenylate kinase -related [Arabidopsis thaliana]
  misc_feature (1)..(106): Homolog of NCBI NO: 6063552 NR Description: ESTs AU065232(E60855),C23624(S1554), correspond to a region of the predicted gene.~similar to putative
  misc_feature (97)..(284): Homolog of NCBI NO: 6063552 NR Description: ESTs AU065232(E60855),C23624(S1554), correspond to a region of the predicted gene.~similar to putative
  misc_feature (1)..(284): Homolog of NCBI NO: 29427816 NR Description: Adenylate kinase, chloroplast precursor (ATP-AMP
  misc_feature (1)..(284): Homolog of NCBI NO: 15228109 NR Description: adenylate kinase -related [Arabidopsis thaliana]
MARLVRVARSSSLFGFGNRFYSTSAEASHASSPSPFLHGGGASRVAPKDRNVQWVFLGCPGVGKGTYASRLSTLLGVPHIATGDLVREELASSGPLSQKLSEIVNQGKLVSDEIIVDLLSKRLEAGEARGESGFILDGFPRTMRQAEILGDVTDIDLVVNLKLPEEVLVDKCLGRRTCSQCGKGFNVAHINLKGENGRPGISMDPLLPPHQCMSKLVTRADDTEEVVKARLRIYNETSQPLEEYYRTKGKLMEFDLPGGIPESWPRLLEALRLDDYEEKQSVAA

SEQ ID NO: 29924 - DNA, 1609 bp, Arabidopsis thaliana
  misc_feature (1)..(1609): Ceres Seq. ID no. 12333595
  misc_feature: MA Experiment ID: 108473 Result: Down-regulated in Transcription
  misc_feature: MA Experiment 108473 PARAMETER Experiment Name: At_Drought_Flowers_cDNA_P Parameter: Timepoint (hr) Value: 7 d
  misc_feature: MA Experiment 108473 PARAMETER Experiment Name: At_Drought_Flowers_cDNA_P Parameter: Tissue Value: Flower
  misc_feature: MA Experiment 108473 PARAMETER Experiment Name: At_Drought_Flowers_cDNA_P Parameter: Treatment Value: Drought vs. No Drought
  misc_feature: MA Experiment ID: 108474 Result: Down-regulated in Transcription
  misc_feature: MA Experiment 108474 PARAMETER Experiment Name: At_Drought_Flowers_cDNA_P Parameter: Timepoint (hr) Value: null
  misc_feature: MA Experiment 108474 PARAMETER Experiment Name: At_Drought_Flowers_cDNA_P Parameter: Treatment Value: Drought vs. No Drought
  misc_feature: MA Experiment ID: 108501 Result: Down-regulated in Transcription
  misc_feature: MA Experiment 108501 PARAMETER Experiment Name: At_ap2_floral_buds_cDNA_P Parameter: Plant Line Value: ap2 (Ler.)
  misc_feature: MA Experiment 108501 PARAMETER Experiment Name: At_ap2_floral_buds_cDNA_P Parameter: Tissue Value: Closed Flower
  misc_feature: MA Experiment ID: 108595 Result: Up-regulated in Transcription
  misc_feature: MA Experiment 108595 PARAMETER Experiment Name: At_Ler-pi_Ovule_cDNA_P Parameter: Plant Line Value: null
  misc_feature: MA Experiment ID: 20000171 Result: Up-regulated in Transcription
  misc_feature: MA Experiment 20000171 PARAMETER Experiment Name: At_42deg_Heat_P Parameter: Age (day) Value: 14
  misc_feature: MA Experiment 20000171 PARAMETER Experiment Name: At_42deg_Heat_P Parameter: Organism Value: A. thaliana
  misc_feature: MA Experiment 20000171 PARAMETER Experiment Name: At_42deg_Heat_P Parameter: Plant Line Value: WS
  misc_feature: MA Experiment 20000171 PARAMETER Experiment Name: At_42deg_Heat_P Parameter: Temperature (deg C) Value: 42 vs. 22
  misc_feature: MA Experiment 20000171 PARAMETER Experiment Name: At_42deg_Heat_P Parameter: Timepoint (hr) Value: 1
  misc_feature: MA Experiment 20000171 PARAMETER Experiment Name: At_42deg_Heat_P Parameter: Tissue Value: Aerial
  misc_feature: MA Experiment ID: 20000173 Result: Up-regulated in Transcription
  misc_feature: MA Experiment 20000173 PARAMETER Experiment Name: At_42deg_Heat_P Parameter: Age (day) Value: 14
  misc_feature: MA Experiment 20000173 PARAMETER Experiment Name: At_42deg_Heat_P Parameter: Organism Value: A. thaliana
  misc_feature: MA Experiment 20000173 PARAMETER Experiment Name: At_42deg_Heat_P Parameter: Plant Line Value: WS
  misc_feature: MA Experiment 20000173 PARAMETER Experiment Name: At_42deg_Heat_P Parameter: Temperature (deg C) Value: 42 vs. 22
  misc_feature: MA Experiment 20000173 PARAMETER Experiment Name: At_42deg_Heat_P Parameter: Timepoint (hr) Value: 6
  misc_feature: MA Experiment 20000173 PARAMETER Experiment Name: At_42deg_Heat_P Parameter: Tissue Value: Aerial
  misc_feature: MA Experiment ID: 20000184 Result: Down-regulated in Transcription
  misc_feature: MA Experiment 20000184 PARAMETER Experiment Name: At_Shoots__P Parameter: Age (day) Value: 7
  misc_feature: MA Experiment 20000184 PARAMETER Experiment Name: At_Shoots__P Parameter: Tissue Value: Shoots vs. Whole Plant
  misc_feature: MA Experiment ID: 20000185 Result: Down-regulated in Transcription
  misc_feature: MA Experiment 20000185 PARAMETER Experiment Name: At_Roots__P Parameter: Age (day) Value: 7 vs. 21
  misc_feature: MA Experiment 20000185 PARAMETER Experiment Name: At_Roots__P Parameter: Organism Value: A. thaliana
  misc_feature: MA Experiment 20000185 PARAMETER Experiment Name: At_Roots__P Parameter: Tissue Value: Roots vs. Whole Plant
  misc_feature: MA Experiment ID: 20000234 Result: Up-regulated in Transcription
  misc_feature: MA Experiment 20000234 PARAMETER Experiment Name: At_Siliques_P Parameter: Age (day) Value: 21
  misc_feature: MA Experiment 20000234 PARAMETER Experiment Name: At_Siliques_P Parameter: Organism Value: A. thaliana
  misc_feature: MA Experiment 20000234 PARAMETER Experiment Name: At_Siliques_P Parameter: Plant Line Value: WS
  misc_feature: MA Experiment 20000234 PARAMETER Experiment Name: At_Siliques_P Parameter: Tissue Value: Less Than 5mm Siliques vs. Whole Plant
  misc_feature: MA Experiment ID: 20000235 Result: Up-regulated in Transcription
  misc_feature: MA Experiment 20000235 PARAMETER Experiment Name: At_Siliques_P Parameter: Age (day) Value: 21
  misc_feature: MA Experiment 20000235 PARAMETER Experiment Name: At_Siliques_P Parameter: Organism Value: A. thaliana
  misc_feature: MA Experiment 20000235 PARAMETER Experiment Name: At_Siliques_P Parameter: Plant Line Value: WS
  misc_feature: MA Experiment 20000235 PARAMETER Experiment Name: At_Siliques_P Parameter: Tissue Value: 5-10mm Siliques vs. Whole Plant
  misc_feature: MA Experiment ID: 20000265 Result: Up-regulated in Transcription
  misc_feature: MA Experiment 20000265 PARAMETER Experiment Name: At_Open_Flower_P Parameter: Age (day) Value: 21
  misc_feature: MA Experiment 20000265 PARAMETER Experiment Name: At_Open_Flower_P Parameter: Plant Line Value: WS
  misc_feature: MA Experiment 20000265 PARAMETER Experiment Name: At_Open_Flower_P Parameter: Tissue Value: Closed Flower vs. Whole Plant
  misc_feature: MA Experiment ID: 20000286 Result: Up-regulated in Transcription
  misc_feature: MA Experiment 20000286 PARAMETER Experiment Name: At_Open_Flower_P Parameter: Age (day) Value: 21
  misc_feature: MA Experiment 20000286 PARAMETER Experiment Name: At_Open_Flower_P Parameter: Plant Line Value: WS
  misc_feature: MA Experiment 20000286 PARAMETER Experiment Name: At_Open_Flower_P Parameter: Tissue Value: Half Open vs. Whole Plant
  misc_feature: MA Experiment ID: 20000438 Result: Down-regulated in Transcription
  misc_feature: MA Experiment 20000438 PARAMETER Experiment Name: At_Shoots__P Parameter: Age (day) Value: 14
  misc_feature: MA Experiment 20000438 PARAMETER Experiment Name: At_Shoots__P Parameter: Tissue Value: Shoots vs. Whole Plant
  misc_feature: MA Experiment ID: 20001760 Result: Up-regulated in Transcription
  misc_feature: MA Experiment 20001760 PARAMETER Experiment Name: At_50mM_NH4NO3_L-to-H_P Parameter: Timepoint (hr) Value: 2
  misc_feature: MA Experiment 20001760 PARAMETER Experiment Name: At_50mM_NH4NO3_L-to-H_P Parameter: Tissue Value: Siliques
  misc_feature: MA Experiment 20001760 PARAMETER Experiment Name: At_50mM_NH4NO3_L-to-H_P Parameter: Treatment Value: 50mM NH4NO3 vs 100mM Mannitol
  misc_feature: MA Experiment ID: 20001773 Result: Up-regulated in Transcription
  misc_feature: MA Experiment 20001773 PARAMETER Experiment Name: At_Far-red-enriched-adult_P Parameter: Age (day) Value: 30
  misc_feature: MA Experiment 20001773 PARAMETER Experiment Name: At_Far-red-enriched-adult_P Parameter: Light Value: Far-red enriched vs. White
  misc_feature: MA Experiment 20001773 PARAMETER Experiment Name: At_Far-red-enriched-adult_P Parameter: Organism Value: A. thaliana
  misc_feature: MA Experiment 20001773 PARAMETER Experiment Name: At_Far-red-enriched-adult_P Parameter: Plant Line Value: Columbia
  misc_feature: MA Experiment 20001773 PARAMETER Experiment Name: At_Far-red-enriched-adult_P Parameter: Timepoint (hr) Value: 48
  misc_feature: MA Experiment 20001773 PARAMETER Experiment Name: At_Far-red-enriched-adult_P Parameter: Tissue Value: Aerial
agccattctcttatttggctcattcgattattataggaggaaaccatggagctaaggaaatctcaagtggccatgcctgttttcttggcaataatgagtctaatggtgagtcaagtggtcttcgccgagaaagattcaggttcaatgtcccctcatgatcgggcattagcagaaatgcaagcccttaaagcttcattggttcggcgaaatctaccggctttggtatctcctcctcctacccctcctcaggccgtacccggtccgcgcgtgtaccaagtgatatcatatggtgccgatcccacagggaaattggatagcacggatgcaatattaaaagctatggaagaagcatttgatggtccaaatcatggagttttgatgcaaggtataaatgatctcggaggagcaagaattgatcttcaaggtcgaagctacttaatcagccgtcctctacggtttccctcagccggcgccggaaatcttcttataagcggaggtacattaagagcatcaaatgatttcccggtcgataggtacttaatcgaactcaaagacgaatcgtcaaagttacaatacatcttcgaatacataactctcagagatcttctcatcgattgcaactaccgcggcggagcaatcgccgtcatcaactctctccggacaagcatagacaactgttacatcacacggttcggagacacgaacgggattcttgtcaaaagtggacacgagacttatatccgaaactcgtttcttggtcaacacataaccgccggtggagacagaggagaaagaagcttttccggcaccgccatcaatttgatgggaaacgataacgccgttactgacaccgttatattctccgccaggatcggagtaatggtatcgggacaagctaacttattgtccggcgtgcattgatataacaaagcaaccggttttggaggaaccgggatttatttgagattacccggtttaactcagaaccggattgtgaattcgtatttggattataccggtatcgtcgcggaagatccggttcagttacagatttcagggacgttttttttgggagatgcgtttattttgttgaaatcgatagccggatatattcgtggggttagtattgttgacaatatgttttccgggtcgggtcatggggtccagattgttcaattggatcagaggaacactgcgtttgatgacgttggccaggtggtcgttgaccgtaacagtgtgaacggaatggtagagaaatcgacggtggctagaggttcggtagatggaaacgggacgtcttggaccgttgattttaacccggttttgttgttcccggatttaatcaaccacgtgcagtacacacttgtggcgagtgaagctggcgtgtttcctctgcacgcgctaaggaacgtttctgataaccgggtggtcgttgagacaaacgctcctgttactgggacagtttatgtaacagtgaatcaaggagtttaatgtcgtgtttttgccgtttaatggttttataattttataaaatgatttatacttgttggtttttatttgtaatttttcctgtaagggggaaatttattttttatacagctaataaatg

SEQ ID NO: 29925 - protein, 291 aa, Arabidopsis thaliana
  peptide (1)..(291): Ceres Seq. ID no. 12333596
  misc_feature (119)..(291): Homolog of NCBI NO: 18415427 NR Description: putative protein
  misc_feature (119)..(291): Homolog of NCBI NO: 7485728 NR Description: hypothetical protein F18F4.140 - Arabidopsis
  misc_feature (38)..(291): Homolog of NCBI NO: 38347355 NR Description: OSJNBa0070C17.16 [Oryza sativa (japonica
  misc_feature (1)..(291): Homolog of NCBI NO: 15235269 NR Description: putative protein; protein id: At4g20050.1
MELRKSQVAMPVFLAIMSLMVSQVVFAEKDSGSMSPHDRALAEMQALKASLVRRNLPALVSPPPTPPQAVPGPRVYQVISYGADPTGKLDSTDAILKAMEEAFDGPNHGVLMQGINDLGGARIDLQGRSYLISRPLRFPSAGAGNLLISGGTLRASNDFPVDRYLIELKDESSKLQYIFEYITLRDLLIDCNYRGGAIAVINSLRTSIDNCYITRFGDTNGILVKSGHETYIRNSFLGQHITAGGDRGERSFSGTAINLMGNDNAVTDTVIFSARIGVMVSGQANLLSGVH

SEQ ID NO: 29926 - protein, 282 aa, Arabidopsis thaliana
  peptide (1)..(282): Ceres Seq. ID no. 12333597
  misc_feature (110)..(282): Homolog of NCBI NO: 18415427 NR Description: putative protein
  misc_feature (110)..(282): Homolog of NCBI NO: 7485728 NR Description: hypothetical protein F18F4.140 - Arabidopsis
  misc_feature (29)..(282): Homolog of NCBI NO: 38347355 NR Description: OSJNBa0070C17.16 [Oryza sativa (japonica
  misc_feature (1)..(282): Homolog of NCBI NO: 15235269 NR Description: putative protein; protein id: At4g20050.1
MPVFLAIMSLMVSQVVFAEKDSGSMSPHDRALAEMQALKASLVRRNLPALVSPPPTPPQAVPGPRVYQVISYGADPTGKLDSTDAILKAMEEAFDGPNHGVLMQGINDLGGARIDLQGRSYLISRPLRFPSAGAGNLLISGGTLRASNDFPVDRYLIELKDESSKLQYIFEYITLRDLLIDCNYRGGAIAVINSLRTSIDNCYITRFGDTNGILVKSGHETYIRNSFLGQHITAGGDRGERSFSGTAINLMGNDNAVTDTVIFSARIGVMVSGQANLLSGVH

SEQ ID NO: 29927 - protein, 275 aa, Arabidopsis thaliana
  peptide (1)..(275): Ceres Seq. ID no. 12333598
  misc_feature (103)..(275): Homolog of NCBI NO: 18415427 NR Description: putative protein
  misc_feature (103)..(275): Homolog of NCBI NO: 7485728 NR Description: hypothetical protein F18F4.140 - Arabidopsis
  misc_feature (22)..(275): Homolog of NCBI NO: 38347355 NR Description: OSJNBa0070C17.16 [Oryza sativa (japonica
  misc_feature (1)..(275): Homolog of NCBI NO: 15235269 NR Description: putative protein; protein id: At4g20050.1
MSLMVSQVVFAEKDSGSMSPHDRALAEMQALKASLVRRNLPALVSPPPTPPQAVPGPRVYQVISYGADPTGKLDSTDAILKAMEEAFDGPNHGVLMQGINDLGGARIDLQGRSYLISRPLRFPSAGAGNLLISGGTLRASNDFPVDRYLIELKDESSKLQYIFEYITLRDLLIDCNYRGGAIAVINSLRTSIDNCYITRFGDTNGILVKSGHETYIRNSFLGQHITAGGDRGERSFSGTAINLMGNDNAVTDTVIFSARIGVMVSGQANLLSGVH

SEQ ID NO: 29928 - DNA, 1237 bp, Arabidopsis thaliana
  misc_feature (1)..(1237): Ceres Seq. ID no. 13580595
  misc_feature: MA Experiment ID: 108434 Result: Down-regulated in Transcription
  misc_feature: MA Experiment 108434 PARAMETER Experiment Name: At_Root_Tips_cDNA_P Parameter: Tissue Value: Root Tips
  misc_feature: MA Experiment ID: 108469 Result: Up-regulated in Transcription
  misc_feature: MA Experiment ID: 108572 Result: Down-regulated in Transcription
  misc_feature: MA Experiment 108572 PARAMETER Experiment Name: At_Drought_cDNA_P Parameter: Timepoint (hr) Value: 1
  misc_feature: MA Experiment 108572 PARAMETER Experiment Name: At_Drought_cDNA_P Parameter: Tissue Value: Aerial
  misc_feature: MA Experiment 108572 PARAMETER Experiment Name: At_Drought_cDNA_P Parameter: Treatment Value: Drought vs. No Drought
  misc_feature: MA Experiment ID: 108579 Result: Up-regulated in Transcription
  misc_feature: MA Experiment 108579 PARAMETER Experiment Name: At_4deg_Cold_cDNA_P Parameter: Temperature (deg C) Value: 4 vs. 22
  misc_feature: MA Experiment 108579 PARAMETER Experiment Name: At_4deg_Cold_cDNA_P Parameter: Timepoint (hr) Value: 6
  misc_feature: MA Experiment 108579 PARAMETER Experiment Name: At_4deg_Cold_cDNA_P Parameter: Tissue Value: Aerial
  misc_feature: MA Experiment ID: 108585 Result: Up-regulated in Transcription
  misc_feature: MA Experiment 108585 PARAMETER Experiment Name: At_5mM_NaNP_cDNA_P Parameter: Timepoint (hr) Value: 6
  misc_feature: MA Experiment 108585 PARAMETER Experiment Name: At_5mM_NaNP_cDNA_P Parameter: Tissue Value: Aerial
  misc_feature: MA Experiment 108585 PARAMETER Experiment Name: At_5mM_NaNP_cDNA_P Parameter: Treatment Value: null
  misc_feature: MA Experiment ID: 108594 Result: Up-regulated in Transcription
  misc_feature: MA Experiment 108594 PARAMETER Experiment Name: At_Ler-rhl_Root_cDNA_P Parameter: Plant Line Value: null
  misc_feature: MA Experiment ID: 108667 Result: Up-regulated in Transcription
  misc_feature: MA Experiment 108667 PARAMETER Experiment Name: At_2mM_SA_cDNA_P Parameter: Plant Line Value: WS
  misc_feature: MA Experiment 108667 PARAMETER Experiment Name: At_2mM_SA_cDNA_P Parameter: Timepoint (hr) Value: 1
  misc_feature: MA Experiment 108667 PARAMETER Experiment Name: At_2mM_SA_cDNA_P Parameter: Treatment Value: 2mM SA vs. No Treatment
  misc_feature: MA Experiment ID: 20000224 Result: Down-regulated in Transcription
  misc_feature: MA Experiment ID: 20000314 Result: Down-regulated in Transcription
  misc_feature: MA Experiment 20000314 PARAMETER Experiment Name: At_14day_Shoots-Roots_Sub_P Parameter: Age (day) Value: 14
  misc_feature: MA Experiment 20000314 PARAMETER Experiment Name: At_14day_Shoots-Roots_Sub_P Parameter: Organism Value: A. thaliana
  misc_feature: MA Experiment 20000314 PARAMETER Experiment Name: At_14day_Shoots-Roots_Sub_P Parameter: Plant Line Value: WS
  misc_feature: MA Experiment 20000314 PARAMETER Experiment Name: At_14day_Shoots-Roots_Sub_P Parameter: Tissue Value: Roots vs. Whole Plant
  misc_feature: MA Experiment ID: 20000315 Result: Down-regulated in Transcription
  misc_feature: MA Experiment 20000315 PARAMETER Experiment Name: At_14day_Shoots-Roots_Sub_P Parameter: Age (day) Value: 14
  misc_feature: MA Experiment 20000315 PARAMETER Experiment Name: At_14day_Shoots-Roots_Sub_P Parameter: Organism Value: A. thaliana
  misc_feature: MA Experiment 20000315 PARAMETER Experiment Name: At_14day_Shoots-Roots_Sub_P Parameter: Plant Line Value: WS
  misc_feature: MA Experiment 20000315 PARAMETER Experiment Name: At_14day_Shoots-Roots_Sub_P Parameter: Tissue Value: Shoots vs. Whole Plant
  misc_feature: MA Experiment ID: 20000347 Result: Up-regulated in Transcription
  misc_feature: MA Experiment 20000347 PARAMETER Experiment Name: At_2mM_SA_Sub_P Parameter: Age (day) Value: 14
  misc_feature: MA Experiment 20000347 PARAMETER Experiment Name: At_2mM_SA_Sub_P Parameter: Organism Value: A. thaliana
  misc_feature: MA Experiment 20000347 PARAMETER Experiment Name: At_2mM_SA_Sub_P Parameter: Plant Line Value: WS
  misc_feature: MA Experiment 20000347 PARAMETER Experiment Name: At_2mM_SA_Sub_P Parameter: Timepoint (hr) Value: 6
  misc_feature: MA Experiment 20000347 PARAMETER Experiment Name: At_2mM_SA_Sub_P Parameter: Tissue Value: Aerial
  misc_feature: MA Experiment 20000347 PARAMETER Experiment Name: At_2mM_SA_Sub_P Parameter: Treatment Value: 2mM SA vs. No Treatment
  misc_feature: MA Experiment ID: 20000355 Result: Down-regulated in Transcription
  misc_feature: MA Experiment 20000355 PARAMETER Experiment Name: At_Siliques_Sub_P Parameter: Age (day) Value: 21
  misc_feature: MA Experiment 20000355 PARAMETER Experiment Name: At_Siliques_Sub_P Parameter: Organism Value: A. thaliana
  misc_feature: MA Experiment 20000355 PARAMETER Experiment Name: At_Siliques_Sub_P Parameter: Plant Line Value: WS
  misc_feature: MA Experiment 20000355 PARAMETER Experiment Name: At_Siliques_Sub_P Parameter: Tissue Value: Less Than 5mm Siliques vs. Whole Plant
  misc_feature: MA Experiment ID: 20000440 Result: Down-regulated in Transcription
  misc_feature: MA Experiment 20000440 PARAMETER Experiment Name: At_Closed-Flower__Sub_P Parameter: Tissue Value: Closed Flower vs. Whole Plant
aaatattaacacttactgattgccgagagacgaaagacggaaaatcccaacaataaagagcaaaagatcttacagctcataatatttcgttaattatcaaattgctaataggagaaaaaaatgggtcaagctttgggttgtattcaagttgatcagtcgaatgtagcaatcaaagagacttttgggaagtttgacgaagttcttgagccgggttgtcactgtttgccatggtgtttgggaagtcaagtcgctggtcacctttctttacgtgttcaacagctcgcatgttcgctgcgagacaaagactaaggataatgtgtttgtcacggttgttgcttccattcaataccgtgccttagcggagagtgctcaagatgctttttacaagctcagcaacacaaggaatcagattcaagcttatgtctttgatgtgatccgagcaagtgtacctaagctggatctagactctacctttgagcaaaagaatgacattgcaaaaaccgttgagactgagctcgaaaagggctatgtcgcattacggatatgagattgttcagacactgattgtggatatcgagcctgatgtgcatgtcaagagggcaatgaatgagatcaatgctgcttctagaatgagagaggcagcgagtgagaaagctgaggcagagaaaattctgcagatcaagcgtgctgagggagaagctgaatcgaaatacctttcaggtatgggtatagcccgtcagagacaagccattgtggatggtctgaggaacagcgtactcgccttctctgagtctgttccaggaacatcttccaaagacgtgatggatatggttcttgtgactcagtactttgacacattgaaggaaattggtgcttcttcgaagtcaaactcggtgttcataccgcacggtccaggcgctgttagggacattgcttcacagatcagggatggtcttcttcagggtaactctgctgctgagtagagaaatgtctcaaagtacaaaaaggctttttcagggttttagagttgtgttgctacttgcttactcagtttatcttttagcggtttgctctatatgatgggttcttaaatttcttatcgtttctctcttctaggcttgtggacttgatccattgtcttgttttctggtggtttgtggatagagtttgggcttgaaaaacatccgagttattttgggttttaatgtcattattaatgtttaatacgacagtggtc

SEQ ID NO: 29929 - protein, 165 aa, Arabidopsis thaliana
  peptide (1)..(165): Ceres Seq. ID no. 13580596
  misc_feature (3)..(161): Homolog of NCBI NO: 7716468 NR Description: hypersensitive-induced response protein [Zea mays]
  misc_feature (12)..(159): Homolog of NCBI NO: 14150732 NR Description: hypersensitive-induced response protein [Oryza
  misc_feature (3)..(161): Homolog of NCBI NO: 7716466 NR Description: hypersensitive-induced response protein [Zea mays]
  misc_feature (3)..(163): Homolog of NCBI NO: 15241939 NR Description: hypersensitive-induced response protein
  misc_feature (3)..(162): Homolog of NCBI NO: 28476864 NR Description: hypersensitive-induced reaction protein 2
  misc_feature (13)..(164): Homolog of NCBI NO: 18395770 NR Description: expressed protein [Arabidopsis thaliana]
  misc_feature (12)..(165): Homolog of NCBI NO: 7716470 NR Description: hypersensitive-induced response protein [Zea mays]
  misc_feature (12)..(160): Homolog of NCBI NO: 23345042 NR Description: hypersensitive-induced reaction protein 1
  misc_feature (12)..(163): Homolog of NCBI NO: 3928150 NR Description: hypothetical protein [Cicer arietinum]
  misc_feature (3)..(165): Homolog of NCBI NO: 15222481 NR Description: expressed protein [Arabidopsis thaliana]
  misc_feature (3)..(161): Homolog of NCBI NO: 7716468 NR Description: hypersensitive-induced response protein [Zea mays]
  misc_feature (12)..(159): Homolog of NCBI NO: 14150732 NR Description: hypersensitive-induced response protein [Oryza
  misc_feature (3)..(161): Homolog of NCBI NO: 7716466 NR Description: hypersensitive-induced response protein [Zea mays]
  misc_feature (3)..(163): Homolog of NCBI NO: 15241939 NR Description: hypersensitive-induced response protein
  misc_feature (3)..(162): Homolog of NCBI NO: 28476864 NR Description: hypersensitive-induced reaction protein 2
  misc_feature (13)..(164): Homolog of NCBI NO: 18395770 NR Description: expressed protein [Arabidopsis thaliana]
  misc_feature (12)..(165): Homolog of NCBI NO: 7716470 NR Description: hypersensitive-induced response protein [Zea mays]
  misc_feature (12)..(160): Homolog of NCBI NO: 23345042 NR Description: hypersensitive-induced reaction protein 1
  misc_feature (12)..(163): Homolog of NCBI NO: 3928150 NR Description: hypothetical protein [Cicer arietinum]
  misc_feature (3)..(165): Homolog of NCBI NO: 15222481 NR Description: expressed protein [Arabidopsis thaliana]
MTLQKPLRLSSKRAMSHYGYEIVQTLIVDIEPDVHVKRAMNEINAASRMREAASEKAEAEKILQIKRAEGEAESKYLSGMGIARQRQAIVDGLRNSVLAFSESVPGTSSKDVMDMVLVTQYFDTLKEIGASSKSNSVFIPHGPGAVRDIASQIRDGLLQGNSAAE

SEQ ID NO: 29930 - protein, 151 aa, Arabidopsis thaliana; identical to SEQ ID NO: 23095
  peptide (1)..(151): Ceres Seq. ID no. 13580597
  misc_feature (1)..(147): Homolog of NCBI NO: 7716468 NR Description: hypersensitive-induced response protein [Zea mays]
  misc_feature (1)..(145): Homolog of NCBI NO: 14150732 NR Description: hypersensitive-induced response protein [Oryza
  misc_feature (1)..(147): Homolog of NCBI NO: 7716466 NR Description: hypersensitive-induced response protein [Zea mays]
  misc_feature (1)..(149): Homolog of NCBI NO: 15241939 NR Description: hypersensitive-induced response protein
  misc_feature (1)..(148): Homolog of NCBI NO: 28476864 NR Description: hypersensitive-induced reaction protein 2
  misc_feature (1)..(150): Homolog of NCBI NO: 18395770 NR Description: expressed protein [Arabidopsis thaliana]
  misc_feature (1)..(151): Homolog of NCBI NO: 7716470 NR Description: hypersensitive-induced response protein [Zea mays]
  misc_feature (1)..(146): Homolog of NCBI NO: 23345042 NR Description: hypersensitive-induced reaction protein 1
  misc_feature (1)..(149): Homolog of NCBI NO: 3928150 NR Description: hypothetical protein [Cicer arietinum]
  misc_feature (1)..(151): Homolog of NCBI NO: 15222481 NR Description: expressed protein [Arabidopsis thaliana]
  misc_feature (1)..(147): Homolog of NCBI NO: 7716468 NR Description: hypersensitive-induced response protein [Zea mays]
  misc_feature (1)..(145): Homolog of NCBI NO: 14150732 NR Description: hypersensitive-induced response protein [Oryza
  misc_feature (1)..(147): Homolog of NCBI NO: 7716466 NR Description: hypersensitive-induced response protein [Zea mays]
  misc_feature (1)..(149): Homolog of NCBI NO: 15241939 NR Description: hypersensitive-induced response protein
  misc_feature (1)..(148): Homolog of NCBI NO: 28476864 NR Description: hypersensitive-induced reaction protein 2
  misc_feature (1)..(150): Homolog of NCBI NO: 18395770 NR Description: expressed protein [Arabidopsis thaliana]
  misc_feature (1)..(151): Homolog of NCBI NO: 7716470 NR Description: hypersensitive-induced response protein [Zea mays]
  misc_feature (1)..(146): Homolog of NCBI NO: 23345042 NR Description: hypersensitive-induced reaction protein 1
  misc_feature (1)..(149): Homolog of NCBI NO: 3928150 NR Description: hypothetical protein [Cicer arietinum]
  misc_feature (1)..(151): Homolog of NCBI NO: 15222481 NR Description: expressed protein [Arabidopsis thaliana]

SEQ ID NO: 29931 - protein, 126 aa, Arabidopsis thaliana
  peptide (1)..(126): Ceres Seq. ID no. 13580598
  misc_feature (1)..(122): Homolog of NCBI NO: 7716468 NR Description: hypersensitive-induced response protein [Zea mays]
  misc_feature (1)..(120): Homolog of NCBI NO: 14150732 NR Description: hypersensitive-induced response protein [Oryza
  misc_feature (1)..(122): Homolog of NCBI NO: 7716466 NR Description: hypersensitive-induced response protein [Zea mays]
  misc_feature (1)..(124): Homolog of NCBI NO: 15241939 NR Description: hypersensitive-induced response protein
  misc_feature (1)..(123): Homolog of NCBI NO: 28476864 NR Description: hypersensitive-induced reaction protein 2
  misc_feature (1)..(125): Homolog of NCBI NO: 18395770 NR Description: expressed protein [Arabidopsis thaliana]
  misc_feature (1)..(126): Homolog of NCBI NO: 7716470 NR Description: hypersensitive-induced response protein [Zea mays]
  misc_feature (1)..(121): Homolog of NCBI NO: 23345042 NR Description: hypersensitive-induced reaction protein 1
  misc_feature (1)..(124): Homolog of NCBI NO: 3928150 NR Description: hypothetical protein [Cicer arietinum]
  misc_feature (1)..(126): Homolog of NCBI NO: 15222481 NR Description: expressed protein [Arabidopsis thaliana]
  misc_feature (1)..(122): Homolog of NCBI NO: 7716468 NR Description: hypersensitive-induced response protein [Zea mays]
  misc_feature (1)..(120): Homolog of NCBI NO: 14150732 NR Description: hypersensitive-induced response protein [Oryza
  misc_feature (1)..(122): Homolog of NCBI NO: 7716466 NR Description: hypersensitive-induced response protein [Zea mays]
  misc_feature (1)..(124): Homolog of NCBI NO: 15241939 NR Description: hypersensitive-induced response protein
  misc_feature (1)..(123): Homolog of NCBI NO: 28476864 NR Description: hypersensitive-induced reaction protein 2
  misc_feature (1)..(125): Homolog of NCBI NO: 18395770 NR Description: expressed protein [Arabidopsis thaliana]
  misc_feature (1)..(126): Homolog of NCBI NO: 7716470 NR Description: hypersensitive-induced response protein [Zea mays]
  misc_feature (1)..(121): Homolog of NCBI NO: 23345042 NR Description: hypersensitive-induced reaction protein 1
  misc_feature (1)..(124): Homolog of NCBI NO: 3928150 NR Description: hypothetical protein [Cicer arietinum]
  misc_feature (1)..(126): Homolog of NCBI NO: 15222481 NR Description: expressed protein [Arabidopsis thaliana]
MNEINAASRMREAASEKAEAEKILQIKRAEGEAESKYLSGMGIARQRQAIVDGLRNSVLAFSESVPGTSSKDVMDMVLVTQYFDTLKEIGASSKSNSVFIPHGPGAVRDIASQIRDGLLQGNSAAE

SEQ ID NO: 29932 - DNA, 740 bp, Arabidopsis thaliana
  misc_feature (1)..(740): Ceres Seq. ID no. 13494290
  misc_feature: MA Experiment ID: 108435 Result: Down-regulated in Transcription
  misc_feature: MA Experiment 108435 PARAMETER Experiment Name: At_stm_Mutants_cDNA_P Parameter: Plant Line Value: wt Landsburg vs stm
  misc_feature: MA Experiment 108435 PARAMETER Experiment Name: At_stm_Mutants_cDNA_P Parameter: Tissue Value: Shoot Apical Meristem Region
  misc_feature: MA Experiment ID: 108461 Result: Up-regulated in Transcription
  misc_feature: MA Experiment 108461 PARAMETER Experiment Name: At_Germinating_Seeds_cDNA_P Parameter: Age (day) Value: 1 vs. 0
  misc_feature: MA Experiment 108461 PARAMETER Experiment Name: At_Germinating_Seeds_cDNA_P Parameter: Tissue Value: Germinating Seeds
  misc_feature: MA Experiment ID: 108462 Result: Up-regulated in Transcription
  misc_feature: MA Experiment 108462 PARAMETER Experiment Name: At_Germinating_Seeds_cDNA_P Parameter: Age (day) Value: 2 vs. 0
  misc_feature: MA Experiment 108462 PARAMETER Experiment Name: At_Germinating_Seeds_cDNA_P Parameter: Tissue Value: Germinating Seeds
  misc_feature: MA Experiment ID: 108463 Result: Up-regulated in Transcription
  misc_feature: MA Experiment 108463 PARAMETER Experiment Name: At_Germinating_Seeds_cDNA_P Parameter: Age (day) Value: 3 vs. 0
  misc_feature: MA Experiment 108463 PARAMETER Experiment Name: At_Germinating_Seeds_cDNA_P Parameter: Tissue Value: Germinating Seeds
  misc_feature: MA Experiment ID: 108464 Result: Up-regulated in Transcription
  misc_feature: MA Experiment 108464 PARAMETER Experiment Name: At_Germinating_Seeds_cDNA_P Parameter: Age (day) Value: 4 vs. 0
  misc_feature: MA Experiment 108464 PARAMETER Experiment Name: At_Germinating_Seeds_cDNA_P Parameter: Tissue Value: Germinating Seeds
  misc_feature: MA Experiment ID: 108489 Result: Down-regulated in Transcription
  misc_feature: MA Experiment ID: 108573 Result: Down-regulated in Transcription
  misc_feature: MA Experiment 108573 PARAMETER Experiment Name: At_Drought_cDNA_P Parameter: Timepoint (hr) Value: 6
  misc_feature: MA Experiment 108573 PARAMETER Experiment Name: At_Drought_cDNA_P Parameter: Tissue Value: Aerial
  misc_feature: MA Experiment 108573 PARAMETER Experiment Name: At_Drought_cDNA_P Parameter: Treatment Value: Drought vs. No Drought
  misc_feature: MA Experiment ID: 108585 Result: Down-regulated in Transcription
  misc_feature: MA Experiment 108585 PARAMETER Experiment Name: At_5mM_NaNP_cDNA_P Parameter: Timepoint (hr) Value: 6
  misc_feature: MA Experiment 108585 PARAMETER Experiment Name: At_5mM_NaNP_cDNA_P Parameter: Tissue Value: Aerial
  misc_feature: MA Experiment 108585 PARAMETER Experiment Name: At_5mM_NaNP_cDNA_P Parameter: Treatment Value: null
  misc_feature: MA Experiment ID: 108595 Result: Down-regulated in Transcription
  misc_feature: MA Experiment 108595 PARAMETER Experiment Name: At_Ler-pi_Ovule_cDNA_P Parameter: Plant Line Value: null
  misc_feature: MA Experiment ID: 20000030 Result: Down-regulated in Transcription
  misc_feature: MA Experiment 20000030 PARAMETER Experiment Name: At_CS6630_Roots_cDNA_P Parameter: Plant Line Value: CS6630 vs. WS
  misc_feature: MA Experiment 20000030 PARAMETER Experiment Name: At_CS6630_Roots_cDNA_P Parameter: Tissue Value: Roots
  misc_feature: MA Experiment ID: 20000069 Result: Down-regulated in Transcription
  misc_feature: MA Experiment 20000069 PARAMETER Experiment Name: At_100uM_ABA_Mutants_cDNA_P Parameter: Plant Line Value: CS23
  misc_feature: MA Experiment 20000069 PARAMETER Experiment Name: At_100uM_ABA_Mutants_cDNA_P Parameter: Timepoint (hr) Value: 6
  misc_feature: MA Experiment 20000069 PARAMETER Experiment Name: At_100uM_ABA_Mutants_cDNA_P Parameter: Tissue Value: Aerial
  misc_feature: MA Experiment 20000069 PARAMETER Experiment Name: At_100uM_ABA_Mutants_cDNA_P Parameter: Treatment Value: 100uM ABA vs. No Treatment
  misc_feature: MA Experiment ID: 20000070 Result: Down-regulated in Transcription
  misc_feature: MA Experiment 20000070 PARAMETER Experiment Name: At_100uM_ABA_Mutants_cDNA_P Parameter: Plant Line Value: CS24
  misc_feature: MA Experiment 20000070 PARAMETER Experiment Name: At_100uM_ABA_Mutants_cDNA_P Parameter: Timepoint (hr) Value: 6
  misc_feature: MA Experiment 20000070 PARAMETER Experiment Name: At_100uM_ABA_Mutants_cDNA_P Parameter: Tissue Value: Aerial
  misc_feature: MA Experiment 20000070 PARAMETER Experiment Name: At_100uM_ABA_Mutants_cDNA_P Parameter: Treatment Value: 100uM ABA vs. No Treatment
  misc_feature: MA Experiment ID: 20000071 Result: Down-regulated in Transcription
  misc_feature: MA Experiment 20000071 PARAMETER Experiment Name: At_100uM_ABA_Mutants_cDNA_P Parameter: Plant Line Value: CS8104
  misc_feature: MA Experiment 20000071 PARAMETER Experiment Name: At_100uM_ABA_Mutants_cDNA_P Parameter: Timepoint (hr) Value: 6
  misc_feature: MA Experiment 20000071 PARAMETER Experiment Name: At_100uM_ABA_Mutants_cDNA_P Parameter: Tissue Value: Aerial
  misc_feature: MA Experiment 20000071 PARAMETER Experiment Name: At_100uM_ABA_Mutants_cDNA_P Parameter: Treatment Value: 100uM ABA vs. No Treatment
  misc_feature: MA Experiment ID: 20000072 Result: Down-regulated in Transcription
  misc_feature: MA Experiment 20000072 PARAMETER Experiment Name: At_100uM_ABA_Mutants_cDNA_P Parameter: Plant Line Value: CS8105
  misc_feature: MA Experiment 20000072 PARAMETER Experiment Name: At_100uM_ABA_Mutants_cDNA_P Parameter: Timepoint (hr) Value: 6
  misc_feature: MA Experiment 20000072 PARAMETER Experiment Name: At_100uM_ABA_Mutants_cDNA_P Parameter: Tissue Value: Aerial
  misc_feature: MA Experiment 20000072 PARAMETER Experiment Name: At_100uM_ABA_Mutants_cDNA_P Parameter: Treatment Value: 100uM ABA vs. No Treatment
  misc_feature: MA Experiment ID: 20000086 Result: Down-regulated in Transcription
  misc_feature: MA Experiment 20000086 PARAMETER Experiment Name: At_100uM_ABA_Mutants_cDNA_P Parameter: Plant Line Value: CS22
  misc_feature: MA Experiment 20000086 PARAMETER Experiment Name: At_100uM_ABA_Mutants_cDNA_P Parameter: Timepoint (hr) Value: 6
  misc_feature: MA Experiment 20000086 PARAMETER Experiment Name: At_100uM_ABA_Mutants_cDNA_P Parameter: Tissue Value: Aerial
  misc_feature: MA Experiment 20000086 PARAMETER Experiment Name: At_100uM_ABA_Mutants_cDNA_P Parameter: Treatment Value: 100uM ABA vs. No Treatment
  misc_feature: MA Experiment ID: 20000087 Result: Down-regulated in Transcription
  misc_feature: MA Experiment 20000087 PARAMETER Experiment Name: At_100uM_ABA_Mutants_cDNA_P Parameter: Plant Line Value: WS
  misc_feature: MA Experiment 20000087 PARAMETER Experiment Name: At_100uM_ABA_Mutants_cDNA_P Parameter: Timepoint (hr) Value: 6
  misc_feature: MA Experiment 20000087 PARAMETER Experiment Name: At_100uM_ABA_Mutants_cDNA_P Parameter: Tissue Value: Aerial
  misc_feature: MA Experiment 20000087 PARAMETER Experiment Name: At_100uM_ABA_Mutants_cDNA_P Parameter: Treatment Value: 100uM ABA vs. No Treatment
  misc_feature: MA Experiment ID: 20000088 Result: Down-regulated in Transcription
  misc_feature: MA Experiment 20000088 PARAMETER Experiment Name: At_100uM_ABA_Mutants_cDNA_P Parameter: Plant Line Value: Landsberg
  misc_feature: MA Experiment 20000088 PARAMETER Experiment Name: At_100uM_ABA_Mutants_cDNA_P Parameter: Timepoint (hr) Value: 6
  misc_feature: MA Experiment 20000088 PARAMETER Experiment Name: At_100uM_ABA_Mutants_cDNA_P Parameter: Tissue Value: Aerial
  misc_feature: MA Experiment 20000088 PARAMETER Experiment Name: At_100uM_ABA_Mutants_cDNA_P Parameter: Treatment Value: 100uM ABA vs. No Treatment
  misc_feature: MA Experiment ID: 20000090 Result: Down-regulated in Transcription
  misc_feature: MA Experiment ID: 20000117 Result: Down-regulated in Transcription
  misc_feature: MA Experiment 20000117 PARAMETER Experiment Name: At_100uM_ABA_Mutants_cDNA_P Parameter: Plant Line Value: Columbia
  misc_feature: MA Experiment 20000117 PARAMETER Experiment Name: At_100uM_ABA_Mutants_cDNA_P Parameter: Timepoint (hr) Value: 6
  misc_feature: MA Experiment 20000117 PARAMETER Experiment Name: At_100uM_ABA_Mutants_cDNA_P Parameter: Tissue Value: Aerial
  misc_feature: MA Experiment 20000117 PARAMETER Experiment Name: At_100uM_ABA_Mutants_cDNA_P Parameter: Treatment Value: 100uM ABA vs. No Treatment
  misc_feature: MA Experiment ID: 20000180 Result: Up-regulated in Transcription
  misc_feature: MA Experiment 20000180 PARAMETER Experiment Name: At_Germinating_Seeds_P Parameter: Age (hr) Value: 24 vs. 0
  misc_feature: MA Experiment 20000180 PARAMETER Experiment Name: At_Germinating_Seeds_P Parameter: Tissue Value: Germinating Seeds
  misc_feature: MA Experiment ID: 20000185 Result: Down-regulated in Transcription
  misc_feature: MA Experiment 20000185 PARAMETER Experiment Name: At_Roots__P Parameter: Age (day) Value: 7 vs. 21
  misc_feature: MA Experiment 20000185 PARAMETER Experiment Name: At_Roots__P Parameter: Organism Value: A. thaliana
  misc_feature: MA Experiment 20000185 PARAMETER Experiment Name: At_Roots__P Parameter: Tissue Value: Roots vs. Whole Plant
  misc_feature: MA Experiment ID: 20000224 Result: Up-regulated in Transcription
  misc_feature: MA Experiment ID: 20000264 Result: Down-regulated in Transcription
  misc_feature: MA Experiment 20000264 PARAMETER Experiment Name: At_Open_Flower_P Parameter: Age (day) Value: 21
  misc_feature: MA Experiment 20000264 PARAMETER Experiment Name: At_Open_Flower_P Parameter: Plant Line Value: WS
  misc_feature: MA Experiment 20000264 PARAMETER Experiment Name: At_Open_Flower_P Parameter: Tissue Value: Open Flower vs. Whole Plant
  misc_feature: MA Experiment ID: 20000438 Result: Up-regulated in Transcription
  misc_feature: MA Experiment 20000438 PARAMETER Experiment Name: At_Shoots__P Parameter: Age (day) Value: 14
  misc_feature: MA Experiment 20000438 PARAMETER Experiment Name: At_Shoots__P Parameter: Tissue Value: Shoots vs. Whole Plant
  misc_feature: MA Experiment ID: 20000439 Result: Down-regulated in Transcription
  misc_feature: MA Experiment 20000439 PARAMETER Experiment Name: At_Roots__P Parameter: Age (day) Value: 14 vs. 21
  misc_feature: MA Experiment 20000439 PARAMETER Experiment Name: At_Roots__P Parameter: Organism Value: A. thaliana
  misc_feature: MA Experiment 20000439 PARAMETER Experiment Name: At_Roots__P Parameter: Tissue Value: Roots vs. Whole Plant
  misc_feature: MA Experiment ID: 20000794 Result: Down-regulated in Transcription
  misc_feature: MA Experiment 20000794 PARAMETER Experiment Name: At_Petals_P Parameter: Age (day) Value: 23-25 days
  misc_feature: MA Experiment 20000794 PARAMETER Experiment Name: At_Petals_P Parameter: Plant Line Value: WS
  misc_feature: MA Experiment 20000794 PARAMETER Experiment Name: At_Petals_P Parameter: Tissue Value: Petals vs. Whole plant
  misc_feature: MA Experiment ID: 20001248 Result: Down-regulated in Transcription
  misc_feature: MA Experiment 20001248 PARAMETER Experiment Name: At_Far-red-induction_P Parameter: Age (day) Value: 7
  misc_feature: MA Experiment 20001248 PARAMETER Experiment Name: At_Far-red-induction_P Parameter: Light Value: Far-red vs. White
  misc_feature: MA Experiment 20001248 PARAMETER Experiment Name: At_Far-red-induction_P Parameter: Organism Value: A. thaliana
  misc_feature: MA Experiment 20001248 PARAMETER Experiment Name: At_Far-red-induction_P Parameter: Plant Line Value: Columbia
  misc_feature: MA Experiment 20001248 PARAMETER Experiment Name: At_Far-red-induction_P Parameter: Timepoint (hr) Value: 4
  misc_feature: MA Experiment 20001248 PARAMETER Experiment Name: At_Far-red-induction_P Parameter: Tissue Value: Whole Plant
  misc_feature: MA Experiment ID: 20001557 Result: Down-regulated in Transcription
  misc_feature: MA Experiment 20001557 PARAMETER Experiment Name: At_Drought_Soil_Dry_P Parameter: Age (day) Value: 27
  misc_feature: MA Experiment 20001557 PARAMETER Experiment Name: At_Drought_Soil_Dry_P Parameter: Organism Value: A. thaliana
  misc_feature: MA Experiment 20001557 PARAMETER Experiment Name: At_Drought_Soil_Dry_P Parameter: Plant Line Value: WS
  misc_feature: MA Experiment 20001557 PARAMETER Experiment Name: At_Drought_Soil_Dry_P Parameter: Post Timepoint (hr) Value: 3
  misc_feature: MA Experiment 20001557 PARAMETER Experiment Name: At_Drought_Soil_Dry_P Parameter: Post-Treatment Value: Re-Water vs. No Drought
  misc_feature: MA Experiment 20001557 PARAMETER Experiment Name: At_Drought_Soil_Dry_P Parameter: Timepoint (day) Value: 13
  misc_feature: MA Experiment 20001557 PARAMETER Experiment Name: At_Drought_Soil_Dry_P Parameter: Treatment Value: Drought vs. No Drought
  misc_feature: MA Experiment ID: 20001904 Result: Down-regulated in Transcription
  misc_feature: MA Experiment 20001904 PARAMETER Experiment Name: At_Drought_Reproduction_P Parameter: Age (day) Value: 37
  misc_feature: MA Experiment 20001904 PARAMETER Experiment Name: At_Drought_Reproduction_P Parameter: Organism Value: A. thaliana
  misc_feature: MA Experiment 20001904 PARAMETER Experiment Name: At_Drought_Reproduction_P Parameter: Plant Line Value: WS
  misc_feature: MA Experiment 20001904 PARAMETER Experiment Name: At_Drought_Reproduction_P Parameter: Timepoint (day) Value: 7
  misc_feature: MA Experiment 20001904 PARAMETER Experiment Name: At_Drought_Reproduction_P Parameter: Tissue Value: Rosettes
  misc_feature: MA Experiment 20001904 PARAMETER Experiment Name: At_Drought_Reproduction_P Parameter: Treatment Value: Drought vs. No Drought
  misc_feature: MA Experiment ID: 20001906 Result: Down-regulated in Transcription
  misc_feature: MA Experiment 20001906 PARAMETER Experiment Name: At_Drought_Reproduction_P Parameter: Age (day) Value: 35
  misc_feature: MA Experiment 20001906 PARAMETER Experiment Name: At_Drought_Reproduction_P Parameter: Organism Value: A. thaliana
  misc_feature: MA Experiment 20001906 PARAMETER Experiment Name: At_Drought_Reproduction_P Parameter: Plant Line Value: WS
  misc_feature: MA Experiment 20001906 PARAMETER Experiment Name: At_Drought_Reproduction_P Parameter: Timepoint (day) Value: 5
  misc_feature: MA Experiment 20001906 PARAMETER Experiment Name: At_Drought_Reproduction_P Parameter: Tissue Value: Siliques
  misc_feature: MA Experiment 20001906 PARAMETER Experiment Name: At_Drought_Reproduction_P Parameter: Treatment Value: Drought vs. No Drought
  misc_feature: MA Experiment ID: 20001908 Result: Down-regulated in Transcription
  misc_feature: MA Experiment 20001908 PARAMETER Experiment Name: At_Drought_Reproduction_P Parameter: Age (day) Value: 40
  misc_feature: MA Experiment 20001908 PARAMETER Experiment Name: At_Drought_Reproduction_P Parameter: Organism Value: A. thaliana
  misc_feature: MA Experiment 20001908 PARAMETER Experiment Name: At_Drought_Reproduction_P Parameter: Plant Line Value: WS
  misc_feature: MA Experiment 20001908 PARAMETER Experiment Name: At_Drought_Reproduction_P Parameter: Timepoint (day) Value: 10
  misc_feature: MA Experiment 20001908 PARAMETER Experiment Name: At_Drought_Reproduction_P Parameter: Tissue Value: Siliques
  misc_feature: MA Experiment 20001908 PARAMETER Experiment Name: At_Drought_Reproduction_P Parameter: Treatment Value: Drought vs. No Drought
gcggtcttatcccgaaactccaagaacacagaaaaaaaaaattcttggtggcctctccaatggctttctcagctaccctgtctcagctttcttctctttcgtccatctcctcttcattaccaatttcttctagaagacttcctcatcgatctcttcctcaattcacagtcaaagcagaagcagagaaagagaaacagagcgcacaggctaagtctgatggggaagcatcaccagctgcaaccaaaacccctaaaactcttcccaagaaaccggtttactcgatgaaaaagggccaaatagttcgtgtagaaaaagagaagtacctcaacagcatcaattacttatcagttggacatcctcctttctacaaaggacttgattacatatacgaagatcgcggcgaggtcttggaccttcgtgtctttgagacaggagagtatgcacttgttggatgggttggtatccccaccgcaccagcttggctcccaacagatatgctcatcaagtgtgagaaacttgtttacgagcgaatgtagagccaagaaggttccaacaagaatcctttggaatgcaactgatataccaaggattgtgttaagctgagatgaacgataacaatggcgcaccatcatgatcatgtgttcaagagtttgacaaagtatcaacgttacaattagttacaaaaactgttgtggagtgtggaatatgtcatcagactcctataataagaatgcagcttc

SEQ ID NO: 29933 - protein, 177 aa, Arabidopsis thaliana
  peptide (1)..(177): Ceres Seq. ID no. 13494291
  misc_feature (24)..(166): Homolog of NCBI NO: 34905786 NR Description: P0401G10.19 [Oryza sativa (japonica
  misc_feature (20)..(177): Homolog of NCBI NO: 18410719 NR Description: expressed protein [Arabidopsis thaliana]
GLIPKLQEHRKKKFLVASPMAFSATLSQLSSLSSISSSLPISSRRLPHRSLPQFTVKAEAEKEKQSAQAKSDGEASPAATKTPKTLPKKPVYSMKKGQIVRVEKEKYLNSINYLSVGHPPFYKGLDYIYEDRGEVLDLRVFETGEYALVGWVGIPTAPAWLPTDMLIKCEKLVYERM

SEQ ID NO: 29934 - protein, 158 aa, Arabidopsis thaliana
  peptide (1)..(158): Ceres Seq. ID no. 13494292
  misc_feature (5)..(147): Homolog of NCBI NO: 34905786 NR Description: P0401G10.19 [Oryza sativa (japonica
  misc_feature (1)..(158): Homolog of NCBI NO: 18410719 NR Description: expressed protein [Arabidopsis thaliana]
MAFSATLSQLSSLSSISSSLPISSRRLPHRSLPQFTVKAEAEKEKQSAQAKSDGEASPAATKTPKTLPKKPVYSMKKGQIVRVEKEKYLNSINYLSVGHPPFYKGLDYIYEDRGEVLDLRVFETGEYALVGWVGIPTAPAWLPTDMLIKCEKLVYERM

SEQ ID NO: 29935 - protein, 94 aa, Arabidopsis thaliana
  peptide (1)..(94): Ceres Seq. ID no. 13494293
AVLSRNSKNTEKKNSWWPLQWLSQLPCLSFLLFRPSPLHYQFLLEDFLIDLFLNSQSKQKQRKRNRAHRLSLMGKHHQLQPKPLKLFPRNRFTR

SEQ ID NO: 29936 - DNA, 1758 bp, Arabidopsis thaliana; identical to SEQ ID NO: 25899
  misc_feature (1)..(1758): Ceres Seq. ID no. 13490176
  misc_feature: MA Experiment ID: 108577 Result: Up-regulated in Transcription
  misc_feature: MA Experiment 108577 PARAMETER Experiment Name: At_42deg_Heat_cDNA_P Parameter: Temperature (deg C) Value: 42 vs. 22
  misc_feature: MA Experiment 108577 PARAMETER Experiment Name: At_42deg_Heat_cDNA_P Parameter: Timepoint (hr) Value: 6
  misc_feature: MA Experiment 108577 PARAMETER Experiment Name: At_42deg_Heat_cDNA_P Parameter: Tissue Value: Aerial
  misc_feature: MA Experiment ID: 20000111 Result: Up-regulated in Transcription
  misc_feature: MA Experiment 20000111 PARAMETER Experiment Name: At_42deg_Heat_cDNA_P Parameter: Temperature (deg C) Value: 42 vs. 22
  misc_feature: MA Experiment 20000111 PARAMETER Experiment Name: At_42deg_Heat_cDNA_P Parameter: Timepoint (hr) Value: 6
  misc_feature: MA Experiment 20000111 PARAMETER Experiment Name: At_42deg_Heat_cDNA_P Parameter: Tissue Value: Aerial
  misc_feature: MA Experiment ID: 20000112 Result: Up-regulated in Transcription
  misc_feature: MA Experiment 20000112 PARAMETER Experiment Name: At_42deg_Heat_cDNA_P Parameter: Temperature (deg C) Value: 42 vs. 22
  misc_feature: MA Experiment 20000112 PARAMETER Experiment Name: At_42deg_Heat_cDNA_P Parameter: Timepoint (hr) Value: 2
  misc_feature: MA Experiment 20000112 PARAMETER Experiment Name: At_42deg_Heat_cDNA_P Parameter: Tissue Value: Aerial
  misc_feature: MA Experiment ID: 20000173 Result: Up-regulated in Transcription
  misc_feature: MA Experiment 20000173 PARAMETER Experiment Name: At_42deg_Heat_P Parameter: Age (day) Value: 14
  misc_feature: MA Experiment 20000173 PARAMETER Experiment Name: At_42deg_Heat_P Parameter: Organism Value: A. thaliana
  misc_feature: MA Experiment 20000173 PARAMETER Experiment Name: At_42deg_Heat_P Parameter: Plant Line Value: WS
  misc_feature: MA Experiment 20000173 PARAMETER Experiment Name: At_42deg_Heat_P Parameter: Temperature (deg C) Value: 42 vs. 22
  misc_feature: MA Experiment 20000173 PARAMETER Experiment Name: At_42deg_Heat_P Parameter: Timepoint (hr) Value: 6
  misc_feature: MA Experiment 20000173 PARAMETER Experiment Name: At_42deg_Heat_P Parameter: Tissue Value: Aerial

SEQ ID NO: 29937 - protein, 524 aa, Arabidopsis thaliana; identical to SEQ ID NO: 25900
  peptide (1)..(524): Ceres Seq. ID no. 13490177
  misc_feature (133)..(344): Pfam Name: DEAD/DEAH box helicase Pfam Description: DEAD/DEAH box helicase
  misc_feature (133)..(344): Pfam Name: DEAD/DEAH box helicase Pfam Description: DEAD/DEAH box helicase
  misc_feature (68)..(510): Homolog of NCBI NO: 33186912 NR Description: DEAD (aspartate-glutamate-alanine-aspartate) box
  misc_feature (34)..(510): Homolog of NCBI NO: 28436904 NR Description: Similar to DEAD/H (Asp-Glu-Ala-Asp/His) box
  misc_feature (27)..(510): Homolog of NCBI NO: 38511935 NR Description: DEAD (Asp-Glu-Ala-As) box polypeptide 19
  misc_feature (68)..(510): Homolog of NCBI NO: 30749194 NR Description: gonadotropin-regulated testicular RNA helicase;
  misc_feature (29)..(518): Homolog of NCBI NO: 6324620 NR Description: Dead-Box protein 5; Dbp5p [Saccharomyces
  misc_feature (68)..(510): Homolog of NCBI NO: 33186912 NR Description: DEAD (aspartate-glutamate-alanine-aspartate) box
  misc_feature (27)..(510): Homolog of NCBI NO: 38511935 NR Description: DEAD (Asp-Glu-Ala-As) box polypeptide 19
  misc_feature (29)..(518): Homolog of NCBI NO: 6324620 NR Description: Dead-Box protein 5; Dbp5p [Saccharomyces
  misc_feature (29)..(524): Homolog of NCBI NO: 15231748 NR Description: DEAD/DEAH box helicase, putative [Arabidopsis
  misc_feature (29)..(524): Homolog of NCBI NO: 15982881 NR Description: AT3g53110/T4D2_40 [Arabidopsis thaliana]
  misc_feature (27)..(284): Homolog of NCBI NO: 22773229 NR Description: Putative DEAD/DEAH box RNA helicase protein
  misc_feature (277)..(523): Homolog of NCBI NO: 22773229 NR Description: Putative DEAD/DEAH box RNA helicase protein
  misc_feature (28)..(519): Homolog of NCBI NO: 19112808 NR Description: putative ATP-dependent cytosolic RNA helicase,
  misc_feature (68)..(510): Homolog of NCBI NO: 30749194 NR Description: gonadotropin-regulated testicular RNA helicase;
  misc_feature (34)..(510): Homolog of NCBI NO: 28436904 NR Description: Similar to DEAD/H (Asp-Glu-Ala-Asp/His) box
  misc_feature (28)..(519): Homolog of NCBI NO: 19112808 NR Description: putative ATP-dependent cytosolic RNA helicase,
  misc_feature (277)..(523): Homolog of NCBI NO: 22773229 NR Description: Putative DEAD/DEAH box RNA helicase protein
  misc_feature (27)..(284): Homolog of NCBI NO: 22773229 NR Description: Putative DEAD/DEAH box RNA helicase protein
  misc_feature (29)..(524): Homolog of NCBI NO: 15982881 NR Description: AT3g53110/T4D2_40 [Arabidopsis thaliana]
  misc_feature (29)..(524): Homolog of NCBI NO: 15231748 NR Description: DEAD/DEAH box helicase, putative [Arabidopsis

SEQ ID NO: 29938 - protein, 496 aa, Arabidopsis thaliana; identical to SEQ ID NO: 25901
  peptide (1)..(496): Ceres Seq. ID no. 13490178
  misc_feature (105)..(316): Pfam Name: DEAD/DEAH box helicase Pfam Description: DEAD/DEAH box helicase
  misc_feature (105)..(316): Pfam Name: DEAD/DEAH box helicase Pfam Description: DEAD/DEAH box helicase
  misc_feature (40)..(482): Homolog of NCBI NO: 33186912 NR Description: DEAD (aspartate-glutamate-alanine-aspartate) box
  misc_feature (6)..(482): Homolog of NCBI NO: 28436904 NR Description: Similar to DEAD/H (Asp-Glu-Ala-Asp/His) box
  misc_feature (1)..(482): Homolog of NCBI NO: 38511935 NR Description: DEAD (Asp-Glu-Ala-As) box polypeptide 19
  misc_feature (40)..(482): Homolog of NCBI NO: 30749194 NR Description: gonadotropin-regulated testicular RNA helicase;
  misc_feature (1)..(490): Homolog of NCBI NO: 6324620 NR Description: Dead-Box protein 5; Dbp5p [Saccharomyces
  misc_feature (40)..(482): Homolog of NCBI NO: 33186912 NR Description: DEAD (aspartate-glutamate-alanine-aspartate) box
  misc_feature (1)..(482): Homolog of NCBI NO: 38511935 NR Description: DEAD (Asp-Glu-Ala-As) box polypeptide 19
  misc_feature (1)..(490): Homolog of NCBI NO: 6324620 NR Description: Dead-Box protein 5; Dbp5p [Saccharomyces
  misc_feature (1)..(496): Homolog of NCBI NO: 15231748 NR Description: DEAD/DEAH box helicase, putative [Arabidopsis
  misc_feature (1)..(496): Homolog of NCBI NO: 15982881 NR Description: AT3g53110/T4D2_40 [Arabidopsis thaliana]
  misc_feature (1)..(256): Homolog of NCBI NO: 22773229 NR Description: Putative DEAD/DEAH box RNA helicase protein
  misc_feature (249)..(495): Homolog of NCBI NO: 22773229 NR Description: Putative DEAD/DEAH box RNA helicase protein
  misc_feature (1)..(491): Homolog of NCBI NO: 19112808 NR Description: putative ATP-dependent cytosolic RNA helicase,
  misc_feature (40)..(482): Homolog of NCBI NO: 30749194 NR Description: gonadotropin-regulated testicular RNA helicase;
  misc_feature (6)..(482): Homolog of NCBI NO: 28436904 NR Description: Similar to DEAD/H (Asp-Glu-Ala-Asp/His) box
  misc_feature (1)..(491): Homolog of NCBI NO: 19112808 NR Description: putative ATP-dependent cytosolic RNA helicase,
  misc_feature (249)..(495): Homolog of NCBI NO: 22773229 NR Description: Putative DEAD/DEAH box RNA helicase protein
  misc_feature (1)..(256): Homolog of NCBI NO: 22773229 NR Description: Putative DEAD/DEAH box RNA helicase protein
  misc_feature (1)..(496): Homolog of NCBI NO: 15982881 NR Description: AT3g53110/T4D2_40 [Arabidopsis thaliana]
  misc_feature (1)..(496): Homolog of NCBI NO: 15231748 NR Description: DEAD/DEAH box helicase, putative [Arabidopsis

SEQ ID NO: 29939 - protein, 394 aa, Arabidopsis thaliana; identical to SEQ ID NO: 25902
  peptide (1)..(394): Ceres Seq. ID no. 13490179
  misc_feature (3)..(214): Pfam Name: DEAD/DEAH box helicase Pfam Description: DEAD/DEAH box helicase
  misc_feature (3)..(214): Pfam Name: DEAD/DEAH box helicase Pfam Description: DEAD/DEAH box helicase
  misc_feature (1)..(380): Homolog of NCBI NO: 33186912 NR Description: DEAD (aspartate-glutamate-alanine-aspartate) box
  misc_feature (1)..(380): Homolog of NCBI NO: 28436904 NR Description: Similar to DEAD/H (Asp-Glu-Ala-Asp/His) box
  misc_feature (1)..(380): Homolog of NCBI NO: 38511935 NR Description: DEAD (Asp-Glu-Ala-As) box polypeptide 19
  misc_feature (1)..(380): Homolog of NCBI NO: 30749194 NR Description: gonadotropin-regulated testicular RNA helicase;
  misc_feature (1)..(388): Homolog of NCBI NO: 6324620 NR Description: Dead-Box protein 5; Dbp5p [Saccharomyces
  misc_feature (1)..(380): Homolog of NCBI NO: 33186912 NR Description: DEAD (aspartate-glutamate-alanine-aspartate) box
  misc_feature (1)..(380): Homolog of NCBI NO: 38511935 NR Description: DEAD (Asp-Glu-Ala-As) box polypeptide 19
  misc_feature (1)..(388): Homolog of NCBI NO: 6324620 NR Description: Dead-Box protein 5; Dbp5p [Saccharomyces
  misc_feature (1)..(394): Homolog of NCBI NO: 15231748 NR Description: DEAD/DEAH box helicase, putative [Arabidopsis
  misc_feature (1)..(394): Homolog of NCBI NO: 15982881 NR Description: AT3g53110/T4D2_40 [Arabidopsis thaliana]
  misc_feature (1)..(154): Homolog of NCBI NO: 22773229 NR Description: Putative DEAD/DEAH box RNA helicase protein
  misc_feature (147)..(393): Homolog of NCBI NO: 22773229 NR Description: Putative DEAD/DEAH box RNA helicase protein
  misc_feature (1)..(389): Homolog of NCBI NO: 19112808 NR Description: putative ATP-dependent cytosolic RNA helicase,
  misc_feature (1)..(380): Homolog of NCBI NO: 30749194 NR Description: gonadotropin-regulated testicular RNA helicase;
  misc_feature (1)..(380): Homolog of NCBI NO: 28436904 NR Description: Similar to DEAD/H (Asp-Glu-Ala-Asp/His) box
  misc_feature (1)..(389): Homolog of NCBI NO: 19112808 NR Description: putative ATP-dependent cytosolic RNA helicase,
  misc_feature (147)..(393): Homolog of NCBI NO: 22773229 NR Description: Putative DEAD/DEAH box RNA helicase protein
  misc_feature (1)..(154): Homolog of NCBI NO: 22773229 NR Description: Putative DEAD/DEAH box RNA helicase protein
  misc_feature (1)..(394): Homolog of NCBI NO: 15982881 NR Description: AT3g53110/T4D2_40 [Arabidopsis thaliana]
  misc_feature (1)..(394): Homolog of NCBI NO: 15231748 NR Description: DEAD/DEAH box helicase, putative [Arabidopsis

SEQ ID NO: 29940 - DNA, 2360 bp, Arabidopsis thaliana
  misc_feature (1)..(2360): Ceres Seq. ID no. 12339318
  misc_feature: MA Experiment ID: 108434 Result: Up-regulated in Transcription
  misc_feature: MA Experiment 108434 PARAMETER Experiment Name: At_Root_Tips_cDNA_P Parameter: Tissue Value: Root Tips
  misc_feature: MA Experiment ID: 108573 Result: Up-regulated in Transcription
  misc_feature: MA Experiment 108573 PARAMETER Experiment Name: At_Drought_cDNA_P Parameter: Timepoint (hr) Value: 6
  misc_feature: MA Experiment 108573 PARAMETER Experiment Name: At_Drought_cDNA_P Parameter: Tissue Value: Aerial
  misc_feature: MA Experiment 108573 PARAMETER Experiment Name: At_Drought_cDNA_P Parameter: Treatment Value: Drought vs. No Drought
  misc_feature: MA Experiment ID: 108577 Result: Down-regulated in Transcription
  misc_feature: MA Experiment 108577 PARAMETER Experiment Name: At_42deg_Heat_cDNA_P Parameter: Temperature (deg C) Value: 42 vs. 22
  misc_feature: MA Experiment 108577 PARAMETER Experiment Name: At_42deg_Heat_cDNA_P Parameter: Timepoint (hr) Value: 6
  misc_feature: MA Experiment 108577 PARAMETER Experiment Name: At_42deg_Heat_cDNA_P Parameter: Tissue Value: Aerial
  misc_feature: MA Experiment ID: 108579 Result: Down-regulated in Transcription
  misc_feature: MA Experiment 108579 PARAMETER Experiment Name: At_4deg_Cold_cDNA_P Parameter: Temperature (deg C) Value: 4 vs. 22
  misc_feature: MA Experiment 108579 PARAMETER Experiment Name: At_4deg_Cold_cDNA_P Parameter: Timepoint (hr) Value: 6
  misc_feature: MA Experiment 108579 PARAMETER Experiment Name: At_4deg_Cold_cDNA_P Parameter: Tissue Value: Aerial
  misc_feature: MA Experiment ID: 108585 Result: Up-regulated in Transcription
  misc_feature: MA Experiment 108585 PARAMETER Experiment Name: At_5mM_NaNP_cDNA_P Parameter: Timepoint (hr) Value: 6
  misc_feature: MA Experiment 108585 PARAMETER Experiment Name: At_5mM_NaNP_cDNA_P Parameter: Tissue Value: Aerial
  misc_feature: MA Experiment 108585 PARAMETER Experiment Name: At_5mM_NaNP_cDNA_P Parameter: Treatment Value: null
  misc_feature: MA Experiment ID: 108595 Result: Down-regulated in Transcription
  misc_feature: MA Experiment 108595 PARAMETER Experiment Name: At_Ler-pi_Ovule_cDNA_P Parameter: Plant Line Value: null
  misc_feature: MA Experiment ID: 20000087 Result: Down-regulated in Transcription
  misc_feature: MA Experiment 20000087 PARAMETER Experiment Name: At_100uM_ABA_Mutants_cDNA_P Parameter: Plant Line Value: WS
  misc_feature: MA Experiment 20000087 PARAMETER Experiment Name: At_100uM_ABA_Mutants_cDNA_P Parameter: Timepoint (hr) Value: 6
  misc_feature: MA Experiment 20000087 PARAMETER Experiment Name: At_100uM_ABA_Mutants_cDNA_P Parameter: Tissue Value: Aerial
  misc_feature: MA Experiment 20000087 PARAMETER Experiment Name: At_100uM_ABA_Mutants_cDNA_P Parameter: Treatment Value: 100uM ABA vs. No Treatment
  misc_feature: MA Experiment ID: 20000113 Result: Down-regulated in Transcription
  misc_feature: MA Experiment 20000113 PARAMETER Experiment Name: At_42deg_Heat_cDNA_P Parameter: Temperature (deg C) Value: 42 vs. 22
  misc_feature: MA Experiment 20000113 PARAMETER Experiment Name: At_42deg_Heat_cDNA_P Parameter: Timepoint (hr) Value: 8
  misc_feature: MA Experiment 20000113 PARAMETER Experiment Name: At_42deg_Heat_cDNA_P Parameter: Tissue Value: Aerial
  misc_feature: MA Experiment ID: 20000224 Result: Down-regulated in Transcription
  misc_feature: MA Experiment ID: 20001451 Result: Up-regulated in Transcription
  misc_feature: MA Experiment 20001451 PARAMETER Experiment Name: At_Far-red-induction_P Parameter: Age (day) Value: 7
  misc_feature: MA Experiment 20001451 PARAMETER Experiment Name: At_Far-red-induction_P Parameter: Light Value: Far-red vs. White
  misc_feature: MA Experiment 20001451 PARAMETER Experiment Name: At_Far-red-induction_P Parameter: Organism Value: A. thaliana
  misc_feature: MA Experiment 20001451 PARAMETER Experiment Name: At_Far-red-induction_P Parameter: Plant Line Value: Columbia
  misc_feature: MA Experiment 20001451 PARAMETER Experiment Name: At_Far-red-induction_P Parameter: Timepoint (hr) Value: 24
  misc_feature: MA Experiment 20001451 PARAMETER Experiment Name: At_Far-red-induction_P Parameter: Tissue Value: Whole Plant
atccttttctcttctcttcccactctctctctctctctctatctatcttcttcatctttgtttcagcttctcctttgaaactagattatctccgttaatggcgcctcagatctaaccttgggagttatatatatatacttgttcaactcttcttcgaacgctgtccaacttcttcctctggttcgatcatcgagatctcgaggttatttggccgcaatgcagaagcgaatagccttgtcgtttccagaagaggtactagagcatgtgttctcgtttattcagctggataaggataggaactcagtctctctggtgtgcaagtcatggtacgagatcgagcggtggtgcaggaggaaagtcttcatcgggaactgctacgccgtgagtccagcgacggtgattaggaggttcccgaaagtgagatccgtggagcttaaaggaaaacctcactttgctgactttaatttggtacctgacggatggggaggttacgtgtatccatggattgaggccatgtcttcgtcttacacgtggcttgaagagataaggctgaagaggatggtggtcaccgacgattgcttggagctcatagccaagtcttttaagaattttaaggttcttgtgctttcttcctgcgaaggcttctccaccgatggtctcgctgctatcgctgccacttgcaggaatctgaaagagcttgacttacgagagagtgatgttgacgacgttagtggccactggcttagccatttcccagatacatacacttctttggtatcactcaatatatcttgcttagcatctgaggtcagtttctctgctctggaaaggctggtgactaggtgtcccaatctcaagtctctcaagcttaaccgagctgttccacttgaaaaattggctactttacttcaaagagcacctcaattggaggaattgggcactggtgggtacactgcagaagtgcgaccagatgtttactctggtttatctgtagcgctctctgggtgcaaggaattgaggtgcttatctggattttgggatgctgttcctgcctatcttccagcagtttattcggtttgcagtcggcttacaactttgaatctgagttatgcaacagtccagagctatgatcttgtcaagcttctttgtcaatgccctaaactgcagcgcctctgggtgcttgactacatcgaggatgctggtcttgaggtgcttgcttcaacctgcaaggacctacgcgagctgagagtgtttccgtccgagccttttgtcatggaaccaaatgtggcattgacggaacaggggcttgtctccgtctccatgggctgtccaaaactcgagtcggttctctacttctgccgtcaaatgaccaatgctgcattgataaccattgctaggaaccgtcccaacatgactcgcttccgtttgtgcatcattgagccaaaagccccagactatctgactctagagccactggatattggatttggagccatagtagagcactgcaaggatctccgtcgcctctctctatctggcctcttgaccgacaaggtttttgaatacattgggacatatgccaagaagatggaaatgctctcagtggcatttgcaggagacagtgacttaggcatgcatcatgttttgtccgggtgcgatagcttgaggaaactagagataagggactgcccgtttggagacaaggcgcttttggccaatgcttcaaagctggagacaatgcgatccctttggatgtcttcttgttccgtgagttttggagcctgcaagttactaggacagaagatgccaaagctgaatgtggaagtcatcgatgaacggggtgcaccggactcgagaccagagagctgccctgttgagagagtcttcatataccgaacagtggctggtcctcgatttgacatgcctggcttcgtctggaacatggaccaagactcaacaatgaggttttccaggcaaatcattactactaacggattataagacaaagaaacgaggtacatttttcattaatccttgttcatcatcccatataatcgtgttccggtttaggaacatgagagagctcggtcgccaataatttgaatctcggctgcttcatataaccatcaagctcatgagcaatgaataagtggagagagagaaagagagatctaagagagctttgttttatttatgtaagaattattgattgttgtatgtttatttggctacttacactgagagatcctggtggggtatttttcttaagaggataagagatttttttaaaagacaatgtcaaaaatgtaactgttctacttgttttgtttggactcttttatccttttaaatgttttcta

SEQ ID NO: 29941 - protein, 594 aa, Arabidopsis thaliana
  peptide (1)..(594): Ceres Seq. ID no. 12339319
  misc_feature (11)..(573): Homolog of NCBI NO: 7487322 NR Description: hypothetical protein T22A6.220 - Arabidopsis
  misc_feature (11)..(573): Homolog of NCBI NO: 18423092 NR Description: transport inhibitor response 1 (TIR1), putative
  misc_feature (11)..(573): Homolog of NCBI NO: 13249030 NR Description: F-box containing protein TIR1
  misc_feature (9)..(573): Homolog of NCBI NO: 18391439 NR Description: transport inhibitor response 1 (TIR1), putative
  misc_feature (9)..(574): Homolog of NCBI NO: 18405102 NR Description: transport inhibitor response 1 (TIR1), putative
  misc_feature (9)..(573): Homolog of NCBI NO: 21740736 NR Description: OSJNBa0072K14.1 [Oryza sativa (japonica
  misc_feature (8)..(573): Homolog of NCBI NO: 12083523 NR Description: similar to Arabidopsis thaliana transport
  misc_feature (5)..(579): Homolog of NCBI NO: 15027885 NR Description: putative F-box protein GRR1 protein 1, AtFBL18
  misc_feature (5)..(579): Homolog of NCBI NO: 12658970 NR Description: GRR1-like protein 1 [Arabidopsis thaliana]
  misc_feature (5)..(579): Homolog of NCBI NO: 18412177 NR Description: F-box protein GRR1-like protein 1, AtFBL18
MQKRIALSFPEEVLEHVFSFIQLDKDRNSVSLVCKSWYEIERWCRRKVFIGNCYAVSPATVIRRFPKVRSVELKGKPHFADFNLVPDGWGGYVYPWIEAMSSSYTWLEEIRLKRMVVTDDCLELIAKSFKNFKVLVLSSCEGFSTDGLAAIAATCRNLKELDLRESDVDDVSGHWLSHFPDTYTSLVSLNISCLASEVSFSALERLVTRCPNLKSLKLNRAVPLEKLATLLQRAPQLEELGTGGYTAEVRPDVYSGLSVALSGCKELRCLSGFWDAVPAYLPAVYSVCSRLTTLNLSYATVQSYDLVKLLCQCPKLQRLWVLDYIEDAGLEVLASTCKDLRELRVFPSEPFVMEPNVALTEQGLVSVSMGCPKLESVLYFCRQMTNAALITIARNRPNMTRFRLCIIEPKAPDYLTLEPLDIGFGAIVEHCKDLRRLSLSGLLTDKVFEYIGTYAKKMEMLSVAFAGDSDLGMHHVLSGCDSLRKLEIRDCPFGDKALLANASKLETMRSLWMSSCSVSFGACKLLGQKMPKLNVEVIDERGAPDSRPESCPVERVFIYRTVAGPRFDMPGFVWNMDQDSTMRFSRQIITTNGL

SEQ ID NO: 29942 - protein, 495 aa, Arabidopsis thaliana
  peptide (1)..(495): Ceres Seq. ID no. 12339320
  misc_feature (1)..(474): Homolog of NCBI NO: 7487322 NR Description: hypothetical protein T22A6.220 - Arabidopsis
  misc_feature (1)..(474): Homolog of NCBI NO: 18423092 NR Description: transport inhibitor response 1 (TIR1), putative
  misc_feature (1)..(474): Homolog of NCBI NO: 13249030 NR Description: F-box containing protein TIR1
  misc_feature (1)..(474): Homolog of NCBI NO: 18391439 NR Description: transport inhibitor response 1 (TIR1), putative
  misc_feature (1)..(475): Homolog of NCBI NO: 18405102 NR Description: transport inhibitor response 1 (TIR1), putative
  misc_feature (1)..(474): Homolog of NCBI NO: 21740736 NR Description: OSJNBa0072K14.1 [Oryza sativa (japonica
  misc_feature (1)..(474): Homolog of NCBI NO: 12083523 NR Description: similar to Arabidopsis thaliana transport
  misc_feature (1)..(480): Homolog of NCBI NO: 15027885 NR Description: putative F-box protein GRR1 protein 1, AtFBL18
  misc_feature (1)..(480): Homolog of NCBI NO: 12658970 NR Description: GRR1-like protein 1 [Arabidopsis thaliana]
  misc_feature (1)..(480): Homolog of NCBI NO: 18412177 NR Description: F-box protein GRR1-like protein 1, AtFBL18
MSSSYTWLEEIRLKRMVVTDDCLELIAKSFKNFKVLVLSSCEGFSTDGLAAIAATCRNLKELDLRESDVDDVSGHWLSHFPDTYTSLVSLNISCLASEVSFSALERLVTRCPNLKSLKLNRAVPLEKLATLLQRAPQLEELGTGGYTAEVRPDVYSGLSVALSGCKELRCLSGFWDAVPAYLPAVYSVCSRLTTLNLSYATVQSYDLVKLLCQCPKLQRLWVLDYIEDAGLEVLASTCKDLRELRVFPSEPFVMEPNVALTEQGLVSVSMGCPKLESVLYFCRQMTNAALITIARNRPNMTRFRLCIIEPKAPDYLTLEPLDIGFGAIVEHCKDLRRLSLSGLLTDKVFEYIGTYAKKMEMLSVAFAGDSDLGMHHVLSGCDSLRKLEIRDCPFGDKALLANASKLETMRSLWMSSCSVSFGACKLLGQKMPKLNVEVIDERGAPDSRPESCPVERVFIYRTVAGPRFDMPGFVWNMDQDSTMRFSRQIITTNGL

SEQ ID NO: 29943 - protein, 480 aa, Arabidopsis thaliana
  peptide (1)..(480): Ceres Seq. ID no. 12339322
  misc_feature (1)..(459): Homolog of NCBI NO: 7487322 NR Description: hypothetical protein T22A6.220 - Arabidopsis
  misc_feature (1)..(459): Homolog of NCBI NO: 18423092 NR Description: transport inhibitor response 1 (TIR1), putative
  misc_feature (1)..(459): Homolog of NCBI NO: 13249030 NR Description: F-box containing protein TIR1
  misc_feature (1)..(459): Homolog of NCBI NO: 18391439 NR Description: transport inhibitor response 1 (TIR1), putative
  misc_feature (1)..(460): Homolog of NCBI NO: 18405102 NR Description: transport inhibitor response 1 (TIR1), putative
  misc_feature (1)..(459): Homolog of NCBI NO: 21740736 NR Description: OSJNBa0072K14.1 [Oryza sativa (japonica
  misc_feature (1)..(459): Homolog of NCBI NO: 12083523 NR Description: similar to Arabidopsis thaliana transport
  misc_feature (1)..(465): Homolog of NCBI NO: 15027885 NR Description: putative F-box protein GRR1 protein 1, AtFBL18
  misc_feature (1)..(465): Homolog of NCBI NO: 12658970 NR Description: GRR1-like protein 1 [Arabidopsis thaliana]
  misc_feature (1)..(465): Homolog of NCBI NO: 18412177 NR Description: F-box protein GRR1-like protein 1, AtFBL18
MVVTDDCLELIAKSFKNFKVLVLSSCEGFSTDGLAAIAATCRNLKELDLRESDVDDVSGHWLSHFPDTYTSLVSLNISCLASEVSFSALERLVTRCPNLKSLKLNRAVPLEKLATLLQRAPQLEELGTGGYTAEVRPDVYSGLSVALSGCKELRCLSGFWDAVPAYLPAVYSVCSRLTTLNLSYATVQSYDLVKLLCQCPKLQRLWVLDYIEDAGLEVLASTCKDLRELRVFPSEPFVMEPNVALTEQGLVSVSMGCPKLESVLYFCRQMTNAALITIARNRPNMTRFRLCIIEPKAPDYLTLEPLDIGFGAIVEHCKDLRRLSLSGLLTDKVFEYIGTYAKKMEMLSVAFAGDSDLGMHHVLSGCDSLRKLEIRDCPFGDKALLANASKLETMRSLWMSSCSVSFGACKLLGQKMPKLNVEVIDERGAPDSRPESCPVERVFIYRTVAGPRFDMPGFVWNMDQDSTMRFSRQIITTNGL

SEQ ID NO: 29944 - DNA, 727 bp, Arabidopsis thaliana
  misc_feature (1)..(727): Ceres Seq. ID no. 12738409
  misc_feature: MA Experiment ID: 108434 Result: Up-regulated in Transcription
  misc_feature: MA Experiment 108434 PARAMETER Experiment Name: At_Root_Tips_cDNA_P Parameter: Tissue Value: Root Tips
  misc_feature: MA Experiment ID: 108462 Result: Down-regulated in Transcription
  misc_feature: MA Experiment 108462 PARAMETER Experiment Name: At_Germinating_Seeds_cDNA_P Parameter: Age (day) Value: 2 vs. 0
  misc_feature: MA Experiment 108462 PARAMETER Experiment Name: At_Germinating_Seeds_cDNA_P Parameter: Tissue Value: Germinating Seeds
  misc_feature: MA Experiment ID: 108463 Result: Down-regulated in Transcription
  misc_feature: MA Experiment 108463 PARAMETER Experiment Name: At_Germinating_Seeds_cDNA_P Parameter: Age (day) Value: 3 vs. 0
  misc_feature: MA Experiment 108463 PARAMETER Experiment Name: At_Germinating_Seeds_cDNA_P Parameter: Tissue Value: Germinating Seeds
  misc_feature: MA Experiment ID: 108464 Result: Down-regulated in Transcription
  misc_feature: MA Experiment 108464 PARAMETER Experiment Name: At_Germinating_Seeds_cDNA_P Parameter: Age (day) Value: 4 vs. 0
  misc_feature: MA Experiment 108464 PARAMETER Experiment Name: At_Germinating_Seeds_cDNA_P Parameter: Tissue Value: Germinating Seeds
  misc_feature: MA Experiment ID: 108489 Result: Up-regulated in Transcription
  misc_feature: MA Experiment ID: 108561 Result: Down-regulated in Transcription
  misc_feature: MA Experiment 108561 PARAMETER Experiment Name: At_100uM_ABA_cDNA_P Parameter: Timepoint (hr) Value: 6
  misc_feature: MA Experiment 108561 PARAMETER Experiment Name: At_100uM_ABA_cDNA_P Parameter: Tissue Value: Aerial
  misc_feature: MA Experiment 108561 PARAMETER Experiment Name: At_100uM_ABA_cDNA_P Parameter: Treatment Value: 100uM ABA vs. No Treatment
  misc_feature: MA Experiment ID: 108573 Result: Down-regulated in Transcription
  misc_feature: MA Experiment 108573 PARAMETER Experiment Name: At_Drought_cDNA_P Parameter: Timepoint (hr) Value: 6
  misc_feature: MA Experiment 108573 PARAMETER Experiment Name: At_Drought_cDNA_P Parameter: Tissue Value: Aerial
  misc_feature: MA Experiment 108573 PARAMETER Experiment Name: At_Drought_cDNA_P Parameter: Treatment Value: Drought vs. No Drought
  misc_feature: MA Experiment ID: 108595 Result: Down-regulated in Transcription
  misc_feature: MA Experiment 108595 PARAMETER Experiment Name: At_Ler-pi_Ovule_cDNA_P Parameter: Plant Line Value: null
  misc_feature: MA Experiment ID: 108605 Result: Down-regulated in Transcription
  misc_feature: MA Experiment 108605 PARAMETER Experiment Name: At_100uM_ABA_cDNA_P Parameter: Timepoint (hr) Value: 6
  misc_feature: MA Experiment 108605 PARAMETER Experiment Name: At_100uM_ABA_cDNA_P Parameter: Tissue Value: Aerial
  misc_feature: MA Experiment 108605 PARAMETER Experiment Name: At_100uM_ABA_cDNA_P Parameter: Treatment Value: 100uM ABA vs. No Treatment
  misc_feature: MA Experiment ID: 108609 Result: Down-regulated in Transcription
  misc_feature: MA Experiment 108609 PARAMETER Experiment Name: At_100uM_ABA_cDNA_P Parameter: Timepoint (hr) Value: 24
  misc_feature: MA Experiment 108609 PARAMETER Experiment Name: At_100uM_ABA_cDNA_P Parameter: Tissue Value: Aerial
  misc_feature: MA Experiment 108609 PARAMETER Experiment Name: At_100uM_ABA_cDNA_P Parameter: Treatment Value: 100uM ABA vs. No Treatment
  misc_feature: MA Experiment ID: 20000069 Result: Down-regulated in Transcription
  misc_feature: MA Experiment 20000069 PARAMETER Experiment Name: At_100uM_ABA_Mutants_cDNA_P Parameter: Plant Line Value: CS23
  misc_feature: MA Experiment 20000069 PARAMETER Experiment Name: At_100uM_ABA_Mutants_cDNA_P Parameter: Timepoint (hr) Value: 6
  misc_feature: MA Experiment 20000069 PARAMETER Experiment Name: At_100uM_ABA_Mutants_cDNA_P Parameter: Tissue Value: Aerial
  misc_feature: MA Experiment 20000069 PARAMETER Experiment Name: At_100uM_ABA_Mutants_cDNA_P Parameter: Treatment Value: 100uM ABA vs. No Treatment
  misc_feature: MA Experiment ID: 20000070 Result: Down-regulated in Transcription
  misc_feature: MA Experiment 20000070 PARAMETER Experiment Name: At_100uM_ABA_Mutants_cDNA_P Parameter: Plant Line Value: CS24
  misc_feature: MA Experiment 20000070 PARAMETER Experiment Name: At_100uM_ABA_Mutants_cDNA_P Parameter: Timepoint (hr) Value: 6
  misc_feature: MA Experiment 20000070 PARAMETER Experiment Name: At_100uM_ABA_Mutants_cDNA_P Parameter: Tissue Value: Aerial
  misc_feature: MA Experiment 20000070 PARAMETER Experiment Name: At_100uM_ABA_Mutants_cDNA_P Parameter: Treatment Value: 100uM ABA vs. No Treatment
  misc_feature: MA Experiment ID: 20000071 Result: Down-regulated in Transcription
  misc_feature: MA Experiment 20000071 PARAMETER Experiment Name: At_100uM_ABA_Mutants_cDNA_P Parameter: Plant Line Value: CS8104
  misc_feature: MA Experiment 20000071 PARAMETER Experiment Name: At_100uM_ABA_Mutants_cDNA_P Parameter: Timepoint (hr) Value: 6
  misc_feature: MA Experiment 20000071 PARAMETER Experiment Name: At_100uM_ABA_Mutants_cDNA_P Parameter: Tissue Value: Aerial
  misc_feature: MA Experiment 20000071 PARAMETER Experiment Name: At_100uM_ABA_Mutants_cDNA_P Parameter: Treatment Value: 100uM ABA vs. No Treatment
  misc_feature: MA Experiment ID: 20000087 Result: Down-regulated in Transcription
  misc_feature: MA Experiment 20000087 PARAMETER Experiment Name: At_100uM_ABA_Mutants_cDNA_P Parameter: Plant Line Value: WS
  misc_feature: MA Experiment 20000087 PARAMETER Experiment Name: At_100uM_ABA_Mutants_cDNA_P Parameter: Timepoint (hr) Value: 6
  misc_feature: MA Experiment 20000087 PARAMETER Experiment Name: At_100uM_ABA_Mutants_cDNA_P Parameter: Tissue Value: Aerial
  misc_feature: MA Experiment 20000087 PARAMETER Experiment Name: At_100uM_ABA_Mutants_cDNA_P Parameter: Treatment Value: 100uM ABA vs. No Treatment
  misc_feature: MA Experiment ID: 20000093 Result: Up-regulated in Transcription
  misc_feature: MA Experiment 20000093 PARAMETER Experiment Name: At_42deg_Heat_cDNA_P Parameter: Temperature (deg C) Value: 42 vs. 22
  misc_feature: MA Experiment 20000093 PARAMETER Experiment Name: At_42deg_Heat_cDNA_P Parameter: Timepoint (hr) Value: 0.5
  misc_feature: MA Experiment 20000093 PARAMETER Experiment Name: At_42deg_Heat_cDNA_P Parameter: Tissue Value: Aerial
  misc_feature: MA Experiment ID: 20000117 Result: Down-regulated in Transcription
  misc_feature: MA Experiment 20000117 PARAMETER Experiment Name: At_100uM_ABA_Mutants_cDNA_P Parameter: Plant Line Value: Columbia
  misc_feature: MA Experiment 20000117 PARAMETER Experiment Name: At_100uM_ABA_Mutants_cDNA_P Parameter: Timepoint (hr) Value: 6
  misc_feature: MA Experiment 20000117 PARAMETER Experiment Name: At_100uM_ABA_Mutants_cDNA_P Parameter: Tissue Value: Aerial
  misc_feature: MA Experiment 20000117 PARAMETER Experiment Name: At_100uM_ABA_Mutants_cDNA_P Parameter: Treatment Value: 100uM ABA vs. No Treatment
  misc_feature: MA Experiment ID: 20000169 Result: Down-regulated in Transcription
  misc_feature: MA Experiment 20000169 PARAMETER Experiment Name: At_100uM_ABA_P Parameter: Age (day) Value: 14
  misc_feature: MA Experiment 20000169 PARAMETER Experiment Name: At_100uM_ABA_P Parameter: Organism Value: A. thaliana
  misc_feature: MA Experiment 20000169 PARAMETER Experiment Name: At_100uM_ABA_P Parameter: Plant Line Value: WS
  misc_feature: MA Experiment 20000169 PARAMETER Experiment Name: At_100uM_ABA_P Parameter: Timepoint (hr) Value: 6
  misc_feature: MA Experiment 20000169 PARAMETER Experiment Name: At_100uM_ABA_P Parameter: Tissue Value: Aerial
  misc_feature: MA Experiment 20000169 PARAMETER Experiment Name: At_100uM_ABA_P Parameter: Treatment Value: 100uM ABA vs. No Treatment
  misc_feature: MA Experiment ID: 20000185 Result: Down-regulated in Transcription
  misc_feature: MA Experiment 20000185 PARAMETER Experiment Name: At_Roots__P Parameter: Age (day) Value: 7 vs. 21
  misc_feature: MA Experiment 20000185 PARAMETER Experiment Name: At_Roots__P Parameter: Organism Value: A. thaliana
  misc_feature: MA Experiment 20000185 PARAMETER Experiment Name: At_Roots__P Parameter: Tissue Value: Roots vs. Whole Plant
  misc_feature: MA Experiment ID: 20000224 Result: Up-regulated in Transcription
  misc_feature: MA Experiment ID: 20000234 Result: Up-regulated in Transcription
  misc_feature: MA Experiment 20000234 PARAMETER Experiment Name: At_Siliques_P Parameter: Age (day) Value: 21
  misc_feature: MA Experiment 20000234 PARAMETER Experiment Name: At_Siliques_P Parameter: Organism Value: A. thaliana
  misc_feature: MA Experiment 20000234 PARAMETER Experiment Name: At_Siliques_P Parameter: Plant Line Value: WS
  misc_feature: MA Experiment 20000234 PARAMETER Experiment Name: At_Siliques_P Parameter: Tissue Value: Less Than 5mm Siliques vs. Whole Plant
  misc_feature: MA Experiment ID: 20000436 Result: Down-regulated in Transcription
  misc_feature: MA Experiment 20000436 PARAMETER Experiment Name: At_Drought_P Parameter: Age (day) Value: 7
  misc_feature: MA Experiment 20000436 PARAMETER Experiment Name: At_Drought_P Parameter: Organism Value: A. thaliana
  misc_feature: MA Experiment 20000436 PARAMETER Experiment Name: At_Drought_P Parameter: Plant Line Value: WS
  misc_feature: MA Experiment 20000436 PARAMETER Experiment Name: At_Drought_P Parameter: Timepoint (hr) Value: 12
  misc_feature: MA Experiment 20000436 PARAMETER Experiment Name: At_Drought_P Parameter: Tissue Value: Whole Plant
  misc_feature: MA Experiment 20000436 PARAMETER Experiment Name: At_Drought_P Parameter: Treatment Value: Drought vs. No Drought
  misc_feature: MA Experiment ID: 20000437 Result: Down-regulated in Transcription
  misc_feature: MA Experiment 20000437 PARAMETER Experiment Name: At_Drought_P Parameter: Age (day) Value: 8
  misc_feature: MA Experiment 20000437 PARAMETER Experiment Name: At_Drought_P Parameter: Organism Value: A. thaliana
  misc_feature: MA Experiment 20000437 PARAMETER Experiment Name: At_Drought_P Parameter: Plant Line Value: WS
  misc_feature: MA Experiment 20000437 PARAMETER Experiment Name: At_Drought_P Parameter: Timepoint (hr) Value: 24
  misc_feature: MA Experiment 20000437 PARAMETER Experiment Name: At_Drought_P Parameter: Tissue Value: Whole Plant
  misc_feature: MA Experiment 20000437 PARAMETER Experiment Name: At_Drought_P Parameter: Treatment Value: Drought vs. No Drought
  misc_feature: MA Experiment ID: 20000439 Result: Down-regulated in Transcription
  misc_feature: MA Experiment 20000439 PARAMETER Experiment Name: At_Roots__P Parameter: Age (day) Value: 14 vs. 21
  misc_feature: MA Experiment 20000439 PARAMETER Experiment Name: At_Roots__P Parameter: Organism Value: A. thaliana
  misc_feature: MA Experiment 20000439 PARAMETER Experiment Name: At_Roots__P Parameter: Tissue Value: Roots vs. Whole Plant
  misc_feature: MA Experiment ID: 20000453 Result: Down-regulated in Transcription
  misc_feature: MA Experiment 20000453 PARAMETER Experiment Name: At_100uM_ABA_P Parameter: Age (day) Value: 15
  misc_feature: MA Experiment 20000453 PARAMETER Experiment Name: At_100uM_ABA_P Parameter: Organism Value: A. thaliana
  misc_feature: MA Experiment 20000453 PARAMETER Experiment Name: At_100uM_ABA_P Parameter: Plant Line Value: WS
  misc_feature: MA Experiment 20000453 PARAMETER Experiment Name: At_100uM_ABA_P Parameter: Timepoint (hr) Value: 24
  misc_feature: MA Experiment 20000453 PARAMETER Experiment Name: At_100uM_ABA_P Parameter: Tissue Value: Aerial
  misc_feature: MA Experiment 20000453 PARAMETER Experiment Name: At_100uM_ABA_P Parameter: Treatment Value: 100uM ABA vs. No Treatment
  misc_feature: MA Experiment ID: 20000794 Result: Down-regulated in Transcription
  misc_feature: MA Experiment 20000794 PARAMETER Experiment Name: At_Petals_P Parameter: Age (day) Value: 23-25 days
  misc_feature: MA Experiment 20000794 PARAMETER Experiment Name: At_Petals_P Parameter: Plant Line Value: WS
  misc_feature: MA Experiment 20000794 PARAMETER Experiment Name: At_Petals_P Parameter: Tissue Value: Petals vs. Whole plant
  misc_feature: MA Experiment ID: 20001450 Result: Down-regulated in Transcription
  misc_feature: MA Experiment 20001450 PARAMETER Experiment Name: At_Far-red-induction_P Parameter: Age (day) Value: 7
  misc_feature: MA Experiment 20001450 PARAMETER Experiment Name: At_Far-red-induction_P Parameter: Light Value: Far-red vs. White
  misc_feature: MA Experiment 20001450 PARAMETER Experiment Name: At_Far-red-induction_P Parameter: Organism Value: A. thaliana
  misc_feature: MA Experiment 20001450 PARAMETER Experiment Name: At_Far-red-induction_P Parameter: Plant Line Value: Columbia
  misc_feature: MA Experiment 20001450 PARAMETER Experiment Name: At_Far-red-induction_P Parameter: Timepoint (hr) Value: 8
  misc_feature: MA Experiment 20001450 PARAMETER Experiment Name: At_Far-red-induction_P Parameter: Tissue Value: Whole Plant
  misc_feature: MA Experiment ID: 20001451 Result: Down-regulated in Transcription
  misc_feature: MA Experiment 20001451 PARAMETER Experiment Name: At_Far-red-induction_P Parameter: Age (day) Value: 7
  misc_feature: MA Experiment 20001451 PARAMETER Experiment Name: At_Far-red-induction_P Parameter: Light Value: Far-red vs. White
  misc_feature: MA Experiment 20001451 PARAMETER Experiment Name: At_Far-red-induction_P Parameter: Organism Value: A. thaliana
  misc_feature: MA Experiment 20001451 PARAMETER Experiment Name: At_Far-red-induction_P Parameter: Plant Line Value: Columbia
  misc_feature: MA Experiment 20001451 PARAMETER Experiment Name: At_Far-red-induction_P Parameter: Timepoint (hr) Value: 24
  misc_feature: MA Experiment 20001451 PARAMETER Experiment Name: At_Far-red-induction_P Parameter: Tissue Value: Whole Plant
  misc_feature: MA Experiment ID: 20001458 Result: Up-regulated in Transcription
  misc_feature: MA Experiment 20001458 PARAMETER Experiment Name: At_50mM_NH4NO3_L-to-H_P Parameter: Age (day) Value: Undefined
  misc_feature: MA Experiment 20001458 PARAMETER Experiment Name: At_50mM_NH4NO3_L-to-H_P Parameter: Organism Value: Undefined
  misc_feature: MA Experiment 20001458 PARAMETER Experiment Name: At_50mM_NH4NO3_L-to-H_P Parameter: Plant Line Value: Undefined
  misc_feature: MA Experiment 20001458 PARAMETER Experiment Name: At_50mM_NH4NO3_L-to-H_P Parameter: Timepoint (hr) Value: 2
  misc_feature: MA Experiment 20001458 PARAMETER Experiment Name: At_50mM_NH4NO3_L-to-H_P Parameter: Tissue Value: Siliques
  misc_feature: MA Experiment 20001458 PARAMETER Experiment Name: At_50mM_NH4NO3_L-to-H_P Parameter: Treatment Value: 50mM NH4NO3 vs. 100mM Manitol
  misc_feature: MA Experiment ID: 20001556 Result: Up-regulated in Transcription
  misc_feature: MA Experiment 20001556 PARAMETER Experiment Name: At_Drought_Soil_Dry_P Parameter: Age (day) Value: 26
  misc_feature: MA Experiment 20001556 PARAMETER Experiment Name: At_Drought_Soil_Dry_P Parameter: Organism Value: A. thaliana
  misc_feature: MA Experiment 20001556 PARAMETER Experiment Name: At_Drought_Soil_Dry_P Parameter: Plant Line Value: WS
  misc_feature: MA Experiment 20001556 PARAMETER Experiment Name: At_Drought_Soil_Dry_P Parameter: Post Timepoint (hr) Value: None
  misc_feature: MA Experiment 20001556 PARAMETER Experiment Name: At_Drought_Soil_Dry_P Parameter: Post-Treatment Value: None
  misc_feature: MA Experiment 20001556 PARAMETER Experiment Name: At_Drought_Soil_Dry_P Parameter: Timepoint (day) Value: 12
  misc_feature: MA Experiment 20001556 PARAMETER Experiment Name: At_Drought_Soil_Dry_P Parameter: Treatment Value: Drought vs. No Drought
  misc_feature: MA Experiment ID: 20001558 Result: Up-regulated in Transcription
  misc_feature: MA Experiment 20001558 PARAMETER Experiment Name: At_Drought_Soil_Dry_P Parameter: Age (day) Value: 27
  misc_feature: MA Experiment 20001558 PARAMETER Experiment Name: At_Drought_Soil_Dry_P Parameter: Organism Value: A. thaliana
  misc_feature: MA Experiment 20001558 PARAMETER Experiment Name: At_Drought_Soil_Dry_P Parameter: Plant Line Value: WS
  misc_feature: MA Experiment 20001558 PARAMETER Experiment Name: At_Drought_Soil_Dry_P Parameter: Post Timepoint (hr) Value: 6
  misc_feature: MA Experiment 20001558 PARAMETER Experiment Name: At_Drought_Soil_Dry_P Parameter: Post-Treatment Value: Re-Water vs. No Drought
  misc_feature: MA Experiment 20001558 PARAMETER Experiment Name: At_Drought_Soil_Dry_P Parameter: Timepoint (day) Value: 13
  misc_feature: MA Experiment 20001558 PARAMETER Experiment Name: At_Drought_Soil_Dry_P Parameter: Treatment Value: Drought vs. No Drought
  misc_feature: MA Experiment ID: 20001757 Result: Up-regulated in Transcription
  misc_feature: MA Experiment 20001757 PARAMETER Experiment Name: At_50mM_NH4NO3_L-to-H_P Parameter: Timepoint (hr) Value: 6
  misc_feature: MA Experiment 20001757 PARAMETER Experiment Name: At_50mM_NH4NO3_L-to-H_P Parameter: Tissue Value: Leaf
  misc_feature: MA Experiment 20001757 PARAMETER Experiment Name: At_50mM_NH4NO3_L-to-H_P Parameter: Treatment Value: 50mM NH4NO3 vs 100mM Mannitol
  misc_feature: MA Experiment ID: 20001905 Result: Down-regulated in Transcription
  misc_feature: MA Experiment 20001905 PARAMETER Experiment Name: At_Drought_Reproduction_P Parameter: Age (day) Value: 40
  misc_feature: MA Experiment 20001905 PARAMETER Experiment Name: At_Drought_Reproduction_P Parameter: Organism Value: A. thaliana
  misc_feature: MA Experiment 20001905 PARAMETER Experiment Name: At_Drought_Reproduction_P Parameter: Plant Line Value: WS
  misc_feature: MA Experiment 20001905 PARAMETER Experiment Name: At_Drought_Reproduction_P Parameter: Timepoint (day) Value: 10
  misc_feature: MA Experiment 20001905 PARAMETER Experiment Name: At_Drought_Reproduction_P Parameter: Tissue Value: Rosettes
  misc_feature: MA Experiment 20001905 PARAMETER Experiment Name: At_Drought_Reproduction_P Parameter: Treatment Value: Drought vs. No Drought
  misc_feature: MA Experiment ID: 20001906 Result: Down-regulated in Transcription
  misc_feature: MA Experiment 20001906 PARAMETER Experiment Name: At_Drought_Reproduction_P Parameter: Age (day) Value: 35
  misc_feature: MA Experiment 20001906 PARAMETER Experiment Name: At_Drought_Reproduction_P Parameter: Organism Value: A. thaliana
  misc_feature: MA Experiment 20001906 PARAMETER Experiment Name: At_Drought_Reproduction_P Parameter: Plant Line Value: WS
  misc_feature: MA Experiment 20001906 PARAMETER Experiment Name: At_Drought_Reproduction_P Parameter: Timepoint (day) Value: 5
  misc_feature: MA Experiment 20001906 PARAMETER Experiment Name: At_Drought_Reproduction_P Parameter: Tissue Value: Siliques
  misc_feature: MA Experiment 20001906 PARAMETER Experiment Name: At_Drought_Reproduction_P Parameter: Treatment Value: Drought vs. No Drought
agtgaaaaagcgtgttacacagattaaaaatcttattgagcaagcggagcaagattacgagaaggagaaactcaatgagagaattgcaaagctctctggtggagttgctgtgattcaggttggagcacaaactgagacagaactcaaagagaagaagttgagagttgaagatgctcttaatgcaacaaaggccgctgtcgaggaaggtattgttgttggtggtggttgcactctgcttcgtcttgcttccaaggttgatgccattaaagccacgcttgataatgatgaagaaaaggttggagcggatatagttaaaagagcactaagttaccccctaaaactaatcgccaagaatgctggtgttaatggaagtgtagttagcgagaaggtgctttccaacgataacgtgaaattcggttacaatgctgcaaccggcaagtacgaggatttgatggctgcaggaatcatcgatccaacaaaggttgtgagatgttgcttggaacacgcagcttcggttgcaaagactttcttgatgtcggactgcgttgttgttgagatcaaggaacctgaaccagttcccgtcggcaacccaatggacaactcaggatatggatactaagaggagataggctaatattgaaacggattactttagcttgcgagtgtaatgattttgaacaagagaatgtgtaatgtgaaactgaaattttgaattaatcatcatatg

SEQ ID NO: 29945 - protein, 205 aa, Arabidopsis thaliana
  peptide (1)..(205): Ceres Seq. ID no. 12738410
  misc_feature (29)..(205): Homolog of NCBI NO: 81600 NR Description: chaperonin 60 beta (clone bX) - Arabidopsis
  misc_feature (1)..(205): Homolog of NCBI NO: 2493650 NR Description: RUBISCO SUBUNIT BINDING-PROTEIN BETA SUBUNIT (60
  misc_feature (1)..(205): Homolog of NCBI NO: 34897924 NR Description: ESTs C99033(E4350),C99032(E4350),D46006(S10372), correspond to a region of the predicted gene.~Similar to
  misc_feature (1)..(204): Homolog of NCBI NO: 2506277 NR Description: RuBisCO subunit binding-protein beta subunit,
  misc_feature (1)..(205): Homolog of NCBI NO: 7443855 NR Description: probable chaperonin 60 beta chain precursor,
  misc_feature (1)..(193): Homolog of NCBI NO: 134104 NR Description: RuBisCO subunit binding-protein beta subunit,
  misc_feature (1)..(205): Homolog of NCBI NO: 30696748 NR Description: chaperonin, putative [Arabidopsis thaliana]
  misc_feature (1)..(205): Homolog of NCBI NO: 15231255 NR Description: chaperonin 60 beta, putative; protein id:
  misc_feature (1)..(205): Homolog of NCBI NO: 81601 NR Description: chaperonin 60 beta precursor - Arabidopsis
  misc_feature (1)..(205): Homolog of NCBI NO: 15222729 NR Description: Rubisco subunit binding-protein beta subunit
VKKRVTQIKNLIEQAEQDYEKEKLNERIAKLSGGVAVIQVGAQTETELKEKKLRVEDALNATKAAVEEGIVVGGGCTLLRLASKVDAIKATLDNDEEKVGADIVKRALSYPLKLIAKNAGVNGSVVSEKVLSNDNVKFGYNAATGKYEDLMAAGIIDPTKVVRCCLEHAASVAKTFLMSDCVVVEIKEPEPVPVGNPMDNSGYGY

SEQ ID NO: 29946 - DNA, 1261 bp, Arabidopsis thaliana
  misc_feature (1)..(1261): Ceres Seq. ID no. 12482789
  misc_feature: MA Experiment ID: 108434 Result: Down-regulated in Transcription
  misc_feature: MA Experiment 108434 PARAMETER Experiment Name: At_Root_Tips_cDNA_P Parameter: Tissue Value: Root Tips
  misc_feature: MA Experiment ID: 108461 Result: Up-regulated in Transcription
  misc_feature: MA Experiment 108461 PARAMETER Experiment Name: At_Germinating_Seeds_cDNA_P Parameter: Age (day) Value: 1 vs. 0
  misc_feature: MA Experiment 108461 PARAMETER Experiment Name: At_Germinating_Seeds_cDNA_P Parameter: Tissue Value: Germinating Seeds
  misc_feature: MA Experiment ID: 108462 Result: Up-regulated in Transcription
  misc_feature: MA Experiment 108462 PARAMETER Experiment Name: At_Germinating_Seeds_cDNA_P Parameter: Age (day) Value: 2 vs. 0
  misc_feature: MA Experiment 108462 PARAMETER Experiment Name: At_Germinating_Seeds_cDNA_P Parameter: Tissue Value: Germinating Seeds
  misc_feature: MA Experiment ID: 108561 Result: Up-regulated in Transcription
  misc_feature: MA Experiment 108561 PARAMETER Experiment Name: At_100uM_ABA_cDNA_P Parameter: Timepoint (hr) Value: 6
  misc_feature: MA Experiment 108561 PARAMETER Experiment Name: At_100uM_ABA_cDNA_P Parameter: Tissue Value: Aerial
  misc_feature: MA Experiment 108561 PARAMETER Experiment Name: At_100uM_ABA_cDNA_P Parameter: Treatment Value: 100uM ABA vs. No Treatment
  misc_feature: MA Experiment ID: 108573 Result: Up-regulated in Transcription
  misc_feature: MA Experiment 108573 PARAMETER Experiment Name: At_Drought_cDNA_P Parameter: Timepoint (hr) Value: 6
  misc_feature: MA Experiment 108573 PARAMETER Experiment Name: At_Drought_cDNA_P Parameter: Tissue Value: Aerial
  misc_feature: MA Experiment 108573 PARAMETER Experiment Name: At_Drought_cDNA_P Parameter: Treatment Value: Drought vs. No Drought
  misc_feature: MA Experiment ID: 108595 Result: Up-regulated in Transcription
  misc_feature: MA Experiment 108595 PARAMETER Experiment Name: At_Ler-pi_Ovule_cDNA_P Parameter: Plant Line Value: null
  misc_feature: MA Experiment ID: 108605 Result: Up-regulated in Transcription
  misc_feature: MA Experiment 108605 PARAMETER Experiment Name: At_100uM_ABA_cDNA_P Parameter: Timepoint (hr) Value: 6
  misc_feature: MA Experiment 108605 PARAMETER Experiment Name: At_100uM_ABA_cDNA_P Parameter: Tissue Value: Aerial
  misc_feature: MA Experiment 108605 PARAMETER Experiment Name: At_100uM_ABA_cDNA_P Parameter: Treatment Value: 100uM ABA vs. No Treatment
  misc_feature: MA Experiment ID: 108607 Result: Up-regulated in Transcription
  misc_feature: MA Experiment 108607 PARAMETER Experiment Name: At_100uM_ABA_cDNA_P Parameter: Timepoint (hr) Value: 4
  misc_feature: MA Experiment 108607 PARAMETER Experiment Name: At_100uM_ABA_cDNA_P Parameter: Tissue Value: Aerial
  misc_feature: MA Experiment 108607 PARAMETER Experiment Name: At_100uM_ABA_cDNA_P Parameter: Treatment Value: 100uM ABA vs. No Treatment
  misc_feature: MA Experiment ID: 20000069 Result: Up-regulated in Transcription
  misc_feature: MA Experiment 20000069 PARAMETER Experiment Name: At_100uM_ABA_Mutants_cDNA_P Parameter: Plant Line Value: CS23
  misc_feature: MA Experiment 20000069 PARAMETER Experiment Name: At_100uM_ABA_Mutants_cDNA_P Parameter: Timepoint (hr) Value: 6
  misc_feature: MA Experiment 20000069 PARAMETER Experiment Name: At_100uM_ABA_Mutants_cDNA_P Parameter: Tissue Value: Aerial
  misc_feature: MA Experiment 20000069 PARAMETER Experiment Name: At_100uM_ABA_Mutants_cDNA_P Parameter: Treatment Value: 100uM ABA vs. No Treatment
  misc_feature: MA Experiment ID: 20000070 Result: Up-regulated in Transcription
  misc_feature: MA Experiment 20000070 PARAMETER Experiment Name: At_100uM_ABA_Mutants_cDNA_P Parameter: Plant Line Value: CS24
  misc_feature: MA Experiment 20000070 PARAMETER Experiment Name: At_100uM_ABA_Mutants_cDNA_P Parameter: Timepoint (hr) Value: 6
  misc_feature: MA Experiment 20000070 PARAMETER Experiment Name: At_100uM_ABA_Mutants_cDNA_P Parameter: Tissue Value: Aerial
  misc_feature: MA Experiment 20000070 PARAMETER Experiment Name: At_100uM_ABA_Mutants_cDNA_P Parameter: Treatment Value: 100uM ABA vs. No Treatment
  misc_feature: MA Experiment ID: 20000071 Result: Up-regulated in Transcription
  misc_feature: MA Experiment 20000071 PARAMETER Experiment Name: At_100uM_ABA_Mutants_cDNA_P Parameter: Plant Line Value: CS8104
  misc_feature: MA Experiment 20000071 PARAMETER Experiment Name: At_100uM_ABA_Mutants_cDNA_P Parameter: Timepoint (hr) Value: 6
  misc_feature: MA Experiment 20000071 PARAMETER Experiment Name: At_100uM_ABA_Mutants_cDNA_P Parameter: Tissue Value: Aerial
  misc_feature: MA Experiment 20000071 PARAMETER Experiment Name: At_100uM_ABA_Mutants_cDNA_P Parameter: Treatment Value: 100uM ABA vs. No Treatment
  misc_feature: MA Experiment ID: 20000072 Result: Up-regulated in Transcription
  misc_feature: MA Experiment 20000072 PARAMETER Experiment Name: At_100uM_ABA_Mutants_cDNA_P Parameter: Plant Line Value: CS8105
  misc_feature: MA Experiment 20000072 PARAMETER Experiment Name: At_100uM_ABA_Mutants_cDNA_P Parameter: Timepoint (hr) Value: 6
  misc_feature: MA Experiment 20000072 PARAMETER Experiment Name: At_100uM_ABA_Mutants_cDNA_P Parameter: Tissue Value: Aerial
  misc_feature: MA Experiment 20000072 PARAMETER Experiment Name: At_100uM_ABA_Mutants_cDNA_P Parameter: Treatment Value: 100uM ABA vs. No Treatment
  misc_feature: MA Experiment ID: 20000087 Result: Up-regulated in Transcription
  misc_feature: MA Experiment 20000087 PARAMETER Experiment Name: At_100uM_ABA_Mutants_cDNA_P Parameter: Plant Line Value: WS
  misc_feature: MA Experiment 20000087 PARAMETER Experiment Name: At_100uM_ABA_Mutants_cDNA_P Parameter: Timepoint (hr) Value: 6
  misc_feature: MA Experiment 20000087 PARAMETER Experiment Name: At_100uM_ABA_Mutants_cDNA_P Parameter: Tissue Value: Aerial
  misc_feature: MA Experiment 20000087 PARAMETER Experiment Name: At_100uM_ABA_Mutants_cDNA_P Parameter: Treatment Value: 100uM ABA vs. No Treatment
  misc_feature: MA Experiment ID: 20000117 Result: Up-regulated in Transcription
  misc_feature: MA Experiment 20000117 PARAMETER Experiment Name: At_100uM_ABA_Mutants_cDNA_P Parameter: Plant Line Value: Columbia
  misc_feature: MA Experiment 20000117 PARAMETER Experiment Name: At_100uM_ABA_Mutants_cDNA_P Parameter: Timepoint (hr) Value: 6
  misc_feature: MA Experiment 20000117 PARAMETER Experiment Name: At_100uM_ABA_Mutants_cDNA_P Parameter: Tissue Value: Aerial
  misc_feature: MA Experiment 20000117 PARAMETER Experiment Name: At_100uM_ABA_Mutants_cDNA_P Parameter: Treatment Value: 100uM ABA vs. No Treatment
  misc_feature: MA Experiment ID: 20000169 Result: Up-regulated in Transcription
  misc_feature: MA Experiment 20000169 PARAMETER Experiment Name: At_100uM_ABA_P Parameter: Age (day) Value: 14
  misc_feature: MA Experiment 20000169 PARAMETER Experiment Name: At_100uM_ABA_P Parameter: Organism Value: A. thaliana
  misc_feature: MA Experiment 20000169 PARAMETER Experiment Name: At_100uM_ABA_P Parameter: Plant Line Value: WS
  misc_feature: MA Experiment 20000169 PARAMETER Experiment Name: At_100uM_ABA_P Parameter: Timepoint (hr) Value: 6
  misc_feature: MA Experiment 20000169 PARAMETER Experiment Name: At_100uM_ABA_P Parameter: Tissue Value: Aerial
  misc_feature: MA Experiment 20000169 PARAMETER Experiment Name: At_100uM_ABA_P Parameter: Treatment Value: 100uM ABA vs. No Treatment
  misc_feature: MA Experiment ID: 20000179 Result: Up-regulated in Transcription
  misc_feature: MA Experiment 20000179 PARAMETER Experiment Name: At_Germinating_Seeds_P Parameter: Age (hr) Value: 6 vs. 0
  misc_feature: MA Experiment 20000179 PARAMETER Experiment Name: At_Germinating_Seeds_P Parameter: Tissue Value: Germinating Seeds
  misc_feature: MA Experiment ID: 20000180 Result: Up-regulated in Transcription
  misc_feature: MA Experiment 20000180 PARAMETER Experiment Name: At_Germinating_Seeds_P Parameter: Age (hr) Value: 24 vs. 0
  misc_feature: MA Experiment 20000180 PARAMETER Experiment Name: At_Germinating_Seeds_P Parameter: Tissue Value: Germinating Seeds
  misc_feature: MA Experiment ID: 20000182 Result: Up-regulated in Transcription
  misc_feature: MA Experiment 20000182 PARAMETER Experiment Name: At_2mM_SA_P Parameter: Age (day) Value: 14
  misc_feature: MA Experiment 20000182 PARAMETER Experiment Name: At_2mM_SA_P Parameter: Organism Value: A. thaliana
  misc_feature: MA Experiment 20000182 PARAMETER Experiment Name: At_2mM_SA_P Parameter: Plant Line Value: WS
  misc_feature: MA Experiment 20000182 PARAMETER Experiment Name: At_2mM_SA_P Parameter: Timepoint (hr) Value: 6
  misc_feature: MA Experiment 20000182 PARAMETER Experiment Name: At_2mM_SA_P Parameter: Tissue Value: Aerial
  misc_feature: MA Experiment 20000182 PARAMETER Experiment Name: At_2mM_SA_P Parameter: Treatment Value: 2mM SA vs. No Treatment
  misc_feature: MA Experiment ID: 20000184 Result: Down-regulated in Transcription
  misc_feature: MA Experiment 20000184 PARAMETER Experiment Name: At_Shoots__P Parameter: Age (day) Value: 7
  misc_feature: MA Experiment 20000184 PARAMETER Experiment Name: At_Shoots__P Parameter: Tissue Value: Shoots vs. Whole Plant
  misc_feature: MA Experiment ID: 20000436 Result: Up-regulated in Transcription
  misc_feature: MA Experiment 20000436 PARAMETER Experiment Name: At_Drought_P Parameter: Age (day) Value: 7
  misc_feature: MA Experiment 20000436 PARAMETER Experiment Name: At_Drought_P Parameter: Organism Value: A. thaliana
  misc_feature: MA Experiment 20000436 PARAMETER Experiment Name: At_Drought_P Parameter: Plant Line Value: WS
  misc_feature: MA Experiment 20000436 PARAMETER Experiment Name: At_Drought_P Parameter: Timepoint (hr) Value: 12
  misc_feature: MA Experiment 20000436 PARAMETER Experiment Name: At_Drought_P Parameter: Tissue Value: Whole Plant
  misc_feature: MA Experiment 20000436 PARAMETER Experiment Name: At_Drought_P Parameter: Treatment Value: Drought vs. No Drought
  misc_feature: MA Experiment ID: 20000437 Result: Up-regulated in Transcription
  misc_feature: MA Experiment 20000437 PARAMETER Experiment Name: At_Drought_P Parameter: Age (day) Value: 8
  misc_feature: MA Experiment 20000437 PARAMETER Experiment Name: At_Drought_P Parameter: Organism Value: A. thaliana
  misc_feature: MA Experiment 20000437 PARAMETER Experiment Name: At_Drought_P Parameter: Plant Line Value: WS
  misc_feature: MA Experiment 20000437 PARAMETER Experiment Name: At_Drought_P Parameter: Timepoint (hr) Value: 24
  misc_feature: MA Experiment 20000437 PARAMETER Experiment Name: At_Drought_P Parameter: Tissue Value: Whole Plant
  misc_feature: MA Experiment 20000437 PARAMETER Experiment Name: At_Drought_P Parameter: Treatment Value: Drought vs. No Drought
  misc_feature: MA Experiment ID: 20000453 Result: Up-regulated in Transcription
  misc_feature: MA Experiment 20000453 PARAMETER Experiment Name: At_100uM_ABA_P Parameter: Age (day) Value: 15
  misc_feature: MA Experiment 20000453 PARAMETER Experiment Name: At_100uM_ABA_P Parameter: Organism Value: A. thaliana
  misc_feature: MA Experiment 20000453 PARAMETER Experiment Name: At_100uM_ABA_P Parameter: Plant Line Value: WS
  misc_feature: MA Experiment 20000453 PARAMETER Experiment Name: At_100uM_ABA_P Parameter: Timepoint (hr) Value: 24
  misc_feature: MA Experiment 20000453 PARAMETER Experiment Name: At_100uM_ABA_P Parameter: Tissue Value: Aerial
  misc_feature: MA Experiment 20000453 PARAMETER Experiment Name: At_100uM_ABA_P Parameter: Treatment Value: 100uM ABA vs. No Treatment
  misc_feature: MA Experiment ID: 20001556 Result: Up-regulated in Transcription
  misc_feature: MA Experiment 20001556 PARAMETER Experiment Name: At_Drought_Soil_Dry_P Parameter: Age (day) Value: 26
  misc_feature: MA Experiment 20001556 PARAMETER Experiment Name: At_Drought_Soil_Dry_P Parameter: Organism Value: A. thaliana
  misc_feature: MA Experiment 20001556 PARAMETER Experiment Name: At_Drought_Soil_Dry_P Parameter: Plant Line Value: WS
  misc_feature: MA Experiment 20001556 PARAMETER Experiment Name: At_Drought_Soil_Dry_P Parameter: Post Timepoint (hr) Value: None
  misc_feature: MA Experiment 20001556 PARAMETER Experiment Name: At_Drought_Soil_Dry_P Parameter: Post-Treatment Value: None
  misc_feature: MA Experiment 20001556 PARAMETER Experiment Name: At_Drought_Soil_Dry_P Parameter: Timepoint (day) Value: 12
  misc_feature: MA Experiment 20001556 PARAMETER Experiment Name: At_Drought_Soil_Dry_P Parameter: Treatment Value: Drought vs. No Drought
  misc_feature: MA Experiment ID: 20001904 Result: Up-regulated in Transcription
  misc_feature: MA Experiment 20001904 PARAMETER Experiment Name: At_Drought_Reproduction_P Parameter: Age (day) Value: 37
  misc_feature: MA Experiment 20001904 PARAMETER Experiment Name: At_Drought_Reproduction_P Parameter: Organism Value: A. thaliana
  misc_feature: MA Experiment 20001904 PARAMETER Experiment Name: At_Drought_Reproduction_P Parameter: Plant Line Value: WS
  misc_feature: MA Experiment 20001904 PARAMETER Experiment Name: At_Drought_Reproduction_P Parameter: Timepoint (day) Value: 7
  misc_feature: MA Experiment 20001904 PARAMETER Experiment Name: At_Drought_Reproduction_P Parameter: Tissue Value: Rosettes
  misc_feature: MA Experiment 20001904 PARAMETER Experiment Name: At_Drought_Reproduction_P Parameter: Treatment Value: Drought vs. No Drought
  misc_feature: MA Experiment ID: 20001906 Result: Up-regulated in Transcription
  misc_feature: MA Experiment 20001906 PARAMETER Experiment Name: At_Drought_Reproduction_P Parameter: Age (day) Value: 35
  misc_feature: MA Experiment 20001906 PARAMETER Experiment Name: At_Drought_Reproduction_P Parameter: Organism Value: A. thaliana
  misc_feature: MA Experiment 20001906 PARAMETER Experiment Name: At_Drought_Reproduction_P Parameter: Plant Line Value: WS
  misc_feature: MA Experiment 20001906 PARAMETER Experiment Name: At_Drought_Reproduction_P Parameter: Timepoint (day) Value: 5
  misc_feature: MA Experiment 20001906 PARAMETER Experiment Name: At_Drought_Reproduction_P Parameter: Tissue Value: Siliques
  misc_feature: MA Experiment 20001906 PARAMETER Experiment Name: At_Drought_Reproduction_P Parameter: Treatment Value: Drought vs. No Drought
acgatttcgatttctcctgaaaatctcaatttcaacaaaacccttaagatttttcgattttggattcccaattctcccggagttctgatgcagatcgccggagataagtaatctcgagtttactaatgccgcggcttccgtcgtctcgtcgcggtgtcgtgtggtttcgatggaagatactcatcactatctccaccgcattatgcatcctcgctctcttctgtatcaaccgtcagtctaattccactgcgacgacgacgacactgtcttcgtctctctccgtcgcgagatctcgtatccctctcgttaaatactccggcgatcgtcccaaactcgccttccttttcctcgctcgacgtgatttgccacttgattttctctgggacagattcttcaagagtgcagatcagaggaatttctcaatctatgtacattcaatacctggtttcgtattcgatgaatcatccacaagatcacatttcttctacaatcgtcaattgaagaatagcattgaggtagtttggggagaatcaagcatgattgcagcagaaagattgttgcttgcatctgctttggaagatccttctaatcaaagatttgttcttttgtctgatagctgtgttccgttatacgactttggttacatttacagatatctagtttcttcaccaaagagttttgtagacagcttccttgataaagataatcgctacactatgaaaatgtttcctgttatacggaaagaaaaatggcgaaaaggatctcagtggatatcattgatcagaagccatgcagaggtcattgtaatgatgatactgtgttccctgtttttcagaaattttgcaagcgatctctacctctggatcccagaaagaattggctatatcttaaaaagaggcgacacaactgtatccctgatgaacactacgtgcaaactctactaacaatgcgtggcttggaaaatgaaatggaacggagaacagtgacatacaccacatggaacctatcagcaaaaaaagctgaagctaaatcttggcatcctctcactttcacatctgacaattgcggaccagaggaaatagaaggaataaagaaaatcaaccatgtatattatgaatcggagtatcgaacagaatggtgcagagcgaattcaaaacccgtcccgtgctttctgtttgcgaggaagttcactagaggagccgcaatgcgtcttttgagtgaaggattaatagaatcctcaatagatacaacaaccttttag

SEQ ID NO: 29947 - protein, 272 aa, Arabidopsis thaliana
  peptide (1)..(272): Ceres Seq. ID no. 12482790
  misc_feature (108)..(216): Pfam Name: Arabidopsis protein of unknown function, DUF266 Pfam Description: Arabidopsis protein of unknown function, DUF266
  misc_feature (68)..(239): Homolog of NCBI NO: 26452247 NR Description: unknown protein [Arabidopsis thaliana]
  misc_feature (59)..(239): Homolog of NCBI NO: 38346557 NR Description: OSJNBa0035M09.18 [Oryza sativa (japonica
  misc_feature (54)..(239): Homolog of NCBI NO: 37531372 NR Description: hypothetical protein [Oryza sativa (japonica
  misc_feature (14)..(227): Homolog of NCBI NO: 30684956 NR Description: expressed protein [Arabidopsis thaliana]
  misc_feature (64)..(227): Homolog of NCBI NO: 34911442 NR Description: P0431H09.21 [Oryza sativa (japonica
  misc_feature (14)..(227): Homolog of NCBI NO: 15241437 NR Description: putative protein; protein id: At5g14550.1
  misc_feature (1)..(91): Homolog of NCBI NO: 22330381 NR Description: hypothetical protein; protein id: At1g62305.1
  misc_feature (130)..(227): Homolog of NCBI NO: 22330381 NR Description: hypothetical protein; protein id: At1g62305.1
  misc_feature (5)..(272): Homolog of NCBI NO: 25402693 NR Description: hypothetical protein [imported] - Arabidopsis
  misc_feature (5)..(227): Homolog of NCBI NO: 30682534 NR Description: expressed protein [Arabidopsis thaliana]
MPRLPSSRRGVVWFRWKILITISTALCILALFCINRQSNSTATTTTLSSSLSVARSRIPLVKYSGDRPKLAFLFLARRDLPLDFLWDRFFKSADQRNFSIYVHSIPGFVFDESSTRSHFFYNRQLKNSIEVVWGESSMIAAERLLLASALEDPSNQRFVLLSDSCVPLYDFGYIYRYLVSSPKSFVDSFLDKDNRYTMKMFPVIRKEKWRKGSQWISLIRSHAEVIVMMILCSLFFRNFASDLYLWIPERIGYILKRGDTTVSLMNTTCKLY

SEQ ID NO: 29948 - protein, 170 aa, Arabidopsis thaliana
  peptide (1)..(170): Ceres Seq. ID no. 12482791
  misc_feature (51)..(147): Homolog of NCBI NO: 37531372 NR Description: hypothetical protein [Oryza sativa (japonica
  misc_feature (9)..(115): Homolog of NCBI NO: 30684956 NR Description: expressed protein [Arabidopsis thaliana]
  misc_feature (49)..(115): Homolog of NCBI NO: 34911442 NR Description: P0431H09.21 [Oryza sativa (japonica
  misc_feature (9)..(161): Homolog of NCBI NO: 15241437 NR Description: putative protein; protein id: At5g14550.1
  misc_feature (20)..(36): Homolog of NCBI NO: 22330381 NR Description: hypothetical protein; protein id: At1g62305.1
  misc_feature (64)..(168): Homolog of NCBI NO: 25402693 NR Description: hypothetical protein [imported] - Arabidopsis
  misc_feature (20)..(168): Homolog of NCBI NO: 30682534 NR Description: expressed protein [Arabidopsis thaliana]
MAKRISVDIIDQKPCRGHCNDDTVFPVFQKFCKRSLPLDPRKNWLYLKKRRHNCIPDEHYVQTLLTMRGLENEMERRTVTYTTWNLSAKKAEAKSWHPLTFTSDNCGPEEIEGIKKINHVYYESEYRTEWCRANSKPVPCFLFARKFTRGAAMRLLSEGLIESSIDTTTF

SEQ ID NO: 29949 - DNA, 997 bp, Arabidopsis thaliana
  misc_feature (1)..(997): Ceres Seq. ID no. 12396633
  misc_feature: MA Experiment ID: 20000180 Result: Up-regulated in Transcription
  misc_feature: MA Experiment 20000180 PARAMETER Experiment Name: At_Germinating_Seeds_P Parameter: Age (hr) Value: 24 vs. 0
  misc_feature: MA Experiment 20000180 PARAMETER Experiment Name: At_Germinating_Seeds_P Parameter: Tissue Value: Germinating Seeds
  misc_feature: MA Experiment ID: 20000234 Result: Down-regulated in Transcription
  misc_feature: MA Experiment 20000234 PARAMETER Experiment Name: At_Siliques_P Parameter: Age (day) Value: 21
  misc_feature: MA Experiment 20000234 PARAMETER Experiment Name: At_Siliques_P Parameter: Organism Value: A. thaliana
  misc_feature: MA Experiment 20000234 PARAMETER Experiment Name: At_Siliques_P Parameter: Plant Line Value: WS
  misc_feature: MA Experiment 20000234 PARAMETER Experiment Name: At_Siliques_P Parameter: Tissue Value: Less Than 5mm Siliques vs. Whole Plant
  misc_feature: MA Experiment ID: 20000265 Result: Down-regulated in Transcription
  misc_feature: MA Experiment 20000265 PARAMETER Experiment Name: At_Open_Flower_P Parameter: Age (day) Value: 21
  misc_feature: MA Experiment 20000265 PARAMETER Experiment Name: At_Open_Flower_P Parameter: Plant Line Value: WS
  misc_feature: MA Experiment 20000265 PARAMETER Experiment Name: At_Open_Flower_P Parameter: Tissue Value: Closed Flower vs. Whole Plant
  misc_feature: MA Experiment ID: 20001557 Result: Down-regulated in Transcription
  misc_feature: MA Experiment 20001557 PARAMETER Experiment Name: At_Drought_Soil_Dry_P Parameter: Age (day) Value: 27
  misc_feature: MA Experiment 20001557 PARAMETER Experiment Name: At_Drought_Soil_Dry_P Parameter: Organism Value: A. thaliana
  misc_feature: MA Experiment 20001557 PARAMETER Experiment Name: At_Drought_Soil_Dry_P Parameter: Plant Line Value: WS
  misc_feature: MA Experiment 20001557 PARAMETER Experiment Name: At_Drought_Soil_Dry_P Parameter: Post Timepoint (hr) Value: 3
  misc_feature: MA Experiment 20001557 PARAMETER Experiment Name: At_Drought_Soil_Dry_P Parameter: Post-Treatment Value: Re-Water vs. No Drought
  misc_feature: MA Experiment 20001557 PARAMETER Experiment Name: At_Drought_Soil_Dry_P Parameter: Timepoint (day) Value: 13
  misc_feature: MA Experiment 20001557 PARAMETER Experiment Name: At_Drought_Soil_Dry_P Parameter: Treatment Value: Drought vs. No Drought
  misc_feature: MA Experiment ID: 20001558 Result: Down-regulated in Transcription
  misc_feature: MA Experiment 20001558 PARAMETER Experiment Name: At_Drought_Soil_Dry_P Parameter: Age (day) Value: 27
  misc_feature: MA Experiment 20001558 PARAMETER Experiment Name: At_Drought_Soil_Dry_P Parameter: Organism Value: A. thaliana
  misc_feature: MA Experiment 20001558 PARAMETER Experiment Name: At_Drought_Soil_Dry_P Parameter: Plant Line Value: WS
  misc_feature: MA Experiment 20001558 PARAMETER Experiment Name: At_Drought_Soil_Dry_P Parameter: Post Timepoint (hr) Value: 6
  misc_feature: MA Experiment 20001558 PARAMETER Experiment Name: At_Drought_Soil_Dry_P Parameter: Post-Treatment Value: Re-Water vs. No Drought
  misc_feature: MA Experiment 20001558 PARAMETER Experiment Name: At_Drought_Soil_Dry_P Parameter: Timepoint (day) Value: 13
  misc_feature: MA Experiment 20001558 PARAMETER Experiment Name: At_Drought_Soil_Dry_P Parameter: Treatment Value: Drought vs. No Drought
  misc_feature: MA Experiment ID: 20001560 Result: Down-regulated in Transcription
  misc_feature: MA Experiment 20001560 PARAMETER Experiment Name: At_Drought_Soil_Dry_P Parameter: Age (day) Value: 28
  misc_feature: MA Experiment 20001560 PARAMETER Experiment Name: At_Drought_Soil_Dry_P Parameter: Organism Value: A. thaliana
  misc_feature: MA Experiment 20001560 PARAMETER Experiment Name: At_Drought_Soil_Dry_P Parameter: Plant Line Value: WS
  misc_feature: MA Experiment 20001560 PARAMETER Experiment Name: At_Drought_Soil_Dry_P Parameter: Post Timepoint (hr) Value: None
  misc_feature: MA Experiment 20001560 PARAMETER Experiment Name: At_Drought_Soil_Dry_P Parameter: Post-Treatment Value: None
  misc_feature: MA Experiment 20001560 PARAMETER Experiment Name: At_Drought_Soil_Dry_P Parameter: Timepoint (day) Value: 14
  misc_feature: MA Experiment 20001560 PARAMETER Experiment Name: At_Drought_Soil_Dry_P Parameter: Treatment Value: Drought vs. No Drought
attcgtctcagaggccgaggttgaagattaatcggacaaaggagattagaagagtagaaaaaacgacaagaagaaagaaacacagttgcaggagagaaagagatatggctgtccggataaacgcgatggcggtgacgtttgtggcgcacgcgctggcggtaatagcggcgattatggtactggtttggagtatcagttacagaggtggattggcctgggaagctactaacaagaatctcatcttcaatctgcatcctgttctgatgctcatcggatttataatcttgggaggagaagccatcataagttacaaatcgcttccgctggagaaaccagtgaagaagttgatccaccttatactccatgccattgctctggctcttgggatatttggcatctgtgcagcctttaagaaccacaatgaaagccatatccctaatctctacagtctccattcctggattggtattggagtcatttctctttatggcttccagtgggtgtacagcttcatagtgttcttcttcccaggaggatcaacaaatttgaaaagcggattgcttccgtggcacgcaatgcttggcctgtttgtttacatacttgctgtcgggaatgcagctttagggtttctggaaaagctgactttcttggagaatggagggcttgacaagtatggatccgaagcatttcttatcaacttcacggccattatcactattctctttggtgcctttgtggtactcactgcttctgctgagtctccttctccttctccttccgtctccaatgatgatagtgttgacttcagttattctgctatataaaacactttctacattccacgttacatctgtatcgccccttgtactctcaaaactccatttatgtatgatgcatttgtagcgaaaagctttgtgtgttacggctttgctacttctggtgtgtaaaatcttcaatgatattgatgaatcttttaaatcattttcttttcttttct

SEQ ID NO: 29950 - protein, 273 aa, Arabidopsis thaliana
  peptide (1)..(273): Ceres Seq. ID no. 12396634
  misc_feature (35)..(247): Homolog of NCBI NO: 15240965 NR Description: cytochrome b-561 (gb|AAD45585.1)
  misc_feature (47)..(253): Homolog of NCBI NO: 38637027 NR Description: putative cytochrome b561 [Oryza sativa (japonica
  misc_feature (35)..(251): Homolog of NCBI NO: 37535830 NR Description: putative cytochrome b-561
  misc_feature (39)..(221): Homolog of NCBI NO: 6822123 NR Description: putative cytochrome B 561 [Craterostigma
  misc_feature (39)..(258): Homolog of NCBI NO: 38346996 NR Description: OSJNBb0039L24.15 [Oryza sativa (japonica
  misc_feature (35)..(273): Homolog of NCBI NO: 21553731 NR Description: cytochrome b561 [Arabidopsis thaliana]
  misc_feature (35)..(273): Homolog of NCBI NO: 12597245 NR Description: cytochrome b561 [Arabidopsis thaliana]
  misc_feature (35)..(273): Homolog of NCBI NO: 18416576 NR Description: putative protein
  misc_feature (1)..(273): Homolog of NCBI NO: 25407597 NR Description: hypothetical protein AT4g25570 [imported] -
  misc_feature (1)..(273): Homolog of NCBI NO: 7486819 NR Description: hypothetical protein M7J2.60 - Arabidopsis
SSQRPRLKINRTKEIRRVEKTTRRKKHSCRRERDMAVRINAMAVTFVAHALAVIAAIMVLVWSISYRGGLAWEATNKNLIFNLHPVLMLIGFIILGGEAIISYKSLPLEKPVKKLIHLILHAIALALGIFGICAAFKNHNESHIPNLYSLHSWIGIGVISLYGFQWVYSFIVFFFPGGSTNLKSGLLPWHAMLGLFVYILAVGNAALGFLEKLTFLENGGLDKYGSEAFLINFTAIITILFGAFVVLTASAESPSPSPSVSNDDSVDFSYSAI

SEQ ID NO: 29951 - protein, 239 aa, Arabidopsis thaliana
  peptide (1)..(239): Ceres Seq. ID no. 12396635
  misc_feature (1)..(213): Homolog of NCBI NO: 15240965 NR Description: cytochrome b-561 (gb|AAD45585.1)
  misc_feature (13)..(219): Homolog of NCBI NO: 38637027 NR Description: putative cytochrome b561 [Oryza sativa (japonica
  misc_feature (1)..(217): Homolog of NCBI NO: 37535830 NR Description: putative cytochrome b-561
  misc_feature (5)..(187): Homolog of NCBI NO: 6822123 NR Description: putative cytochrome B 561 [Craterostigma
  misc_feature (5)..(224): Homolog of NCBI NO: 38346996 NR Description: OSJNBb0039L24.15 [Oryza sativa (japonica
  misc_feature (1)..(239): Homolog of NCBI NO: 21553731 NR Description: cytochrome b561 [Arabidopsis thaliana]
  misc_feature (1)..(239): Homolog of NCBI NO: 12597245 NR Description: cytochrome b561 [Arabidopsis thaliana]
  misc_feature (1)..(239): Homolog of NCBI NO: 18416576 NR Description: putative protein
  misc_feature (1)..(239): Homolog of NCBI NO: 25407597 NR Description: hypothetical protein AT4g25570 [imported] -
  misc_feature (1)..(239): Homolog of NCBI NO: 7486819 NR Description: hypothetical protein M7J2.60 - Arabidopsis
MAVRINAMAVTFVAHALAVIAAIMVLVWSISYRGGLAWEATNKNLIFNLHPVLMLIGFIILGGEAIISYKSLPLEKPVKKLIHLILHAIALALGIFGICAAFKNHNESHIPNLYSLHSWIGIGVISLYGFQWVYSFIVFFFPGGSTNLKSGLLPWHAMLGLFVYILAVGNAALGFLEKLTFLENGGLDKYGSEAFLINFTAIITILFGAFVVLTASAESPSPSPSVSNDDSVDFSYSAI

SEQ ID NO: 29952 - protein, 232 aa, Arabidopsis thaliana
  peptide (1)..(232): Ceres Seq. ID no. 12396636
  misc_feature (1)..(206): Homolog of NCBI NO: 15240965 NR Description: cytochrome b-561 (gb|AAD45585.1)
  misc_feature (6)..(212): Homolog of NCBI NO: 38637027 NR Description: putative cytochrome b561 [Oryza sativa (japonica
  misc_feature (1)..(210): Homolog of NCBI NO: 37535830 NR Description: putative cytochrome b-561
  misc_feature (1)..(180): Homolog of NCBI NO: 6822123 NR Description: putative cytochrome B 561 [Craterostigma
  misc_feature (1)..(217): Homolog of NCBI NO: 38346996 NR Description: OSJNBb0039L24.15 [Oryza sativa (japonica
  misc_feature (1)..(232): Homolog of NCBI NO: 21553731 NR Description: cytochrome b561 [Arabidopsis thaliana]
  misc_feature (1)..(232): Homolog of NCBI NO: 12597245 NR Description: cytochrome b561 [Arabidopsis thaliana]
  misc_feature (1)..(232): Homolog of NCBI NO: 18416576 NR Description: putative protein
  misc_feature (1)..(232): Homolog of NCBI NO: 25407597 NR Description: hypothetical protein AT4g25570 [imported] -
  misc_feature (1)..(232): Homolog of NCBI NO: 7486819 NR Description: hypothetical protein M7J2.60 - Arabidopsis
MAVTFVAHALAVIAAIMVLVWSISYRGGLAWEATNKNLIFNLHPVLMLIGFIILGGEAIISYKSLPLEKPVKKLIHLILHAIALALGIFGICAAFKNHNESHIPNLYSLHSWIGIGVISLYGFQWVYSFIVFFFPGGSTNLKSGLLPWHAMLGLFVYILAVGNAALGFLEKLTFLENGGLDKYGSEAFLINFTAIITILFGAFVVLTASAESPSPSPSVSNDDSVDFSYSAI

SEQ ID NO: 29953 - DNA, 1449 bp, Arabidopsis thaliana
  misc_feature (1)..(1449): Ceres Seq. ID no. 12396528
  misc_feature: MA Experiment ID: 20000171 Result: Up-regulated in Transcription
  misc_feature: MA Experiment 20000171 PARAMETER Experiment Name: At_42deg_Heat_P Parameter: Age (day) Value: 14
  misc_feature: MA Experiment 20000171 PARAMETER Experiment Name: At_42deg_Heat_P Parameter: Organism Value: A. thaliana
  misc_feature: MA Experiment 20000171 PARAMETER Experiment Name: At_42deg_Heat_P Parameter: Plant Line Value: WS
  misc_feature: MA Experiment 20000171 PARAMETER Experiment Name: At_42deg_Heat_P Parameter: Temperature (deg C) Value: 42 vs. 22
  misc_feature: MA Experiment 20000171 PARAMETER Experiment Name: At_42deg_Heat_P Parameter: Timepoint (hr) Value: 1
  misc_feature: MA Experiment 20000171 PARAMETER Experiment Name: At_42deg_Heat_P Parameter: Tissue Value: Aerial
  misc_feature: MA Experiment ID: 20000173 Result: Up-regulated in Transcription
  misc_feature: MA Experiment 20000173 PARAMETER Experiment Name: At_42deg_Heat_P Parameter: Age (day) Value: 14
  misc_feature: MA Experiment 20000173 PARAMETER Experiment Name: At_42deg_Heat_P Parameter: Organism Value: A. thaliana
  misc_feature: MA Experiment 20000173 PARAMETER Experiment Name: At_42deg_Heat_P Parameter: Plant Line Value: WS
  misc_feature: MA Experiment 20000173 PARAMETER Experiment Name: At_42deg_Heat_P Parameter: Temperature (deg C) Value: 42 vs. 22
  misc_feature: MA Experiment 20000173 PARAMETER Experiment Name: At_42deg_Heat_P Parameter: Timepoint (hr) Value: 6
  misc_feature: MA Experiment 20000173 PARAMETER Experiment Name: At_42deg_Heat_P Parameter: Tissue Value: Aerial
  misc_feature: MA Experiment ID: 20000179 Result: Up-regulated in Transcription
  misc_feature: MA Experiment 20000179 PARAMETER Experiment Name: At_Germinating_Seeds_P Parameter: Age (hr) Value: 6 vs. 0
  misc_feature: MA Experiment 20000179 PARAMETER Experiment Name: At_Germinating_Seeds_P Parameter: Tissue Value: Germinating Seeds
  misc_feature: MA Experiment ID: 20000180 Result: Up-regulated in Transcription
  misc_feature: MA Experiment 20000180 PARAMETER Experiment Name: At_Germinating_Seeds_P Parameter: Age (hr) Value: 24 vs. 0
  misc_feature: MA Experiment 20000180 PARAMETER Experiment Name: At_Germinating_Seeds_P Parameter: Tissue Value: Germinating Seeds
  misc_feature: MA Experiment ID: 20000182 Result: Down-regulated in Transcription
  misc_feature: MA Experiment 20000182 PARAMETER Experiment Name: At_2mM_SA_P Parameter: Age (day) Value: 14
  misc_feature: MA Experiment 20000182 PARAMETER Experiment Name: At_2mM_SA_P Parameter: Organism Value: A. thaliana
  misc_feature: MA Experiment 20000182 PARAMETER Experiment Name: At_2mM_SA_P Parameter: Plant Line Value: WS
  misc_feature: MA Experiment 20000182 PARAMETER Experiment Name: At_2mM_SA_P Parameter: Timepoint (hr) Value: 6
  misc_feature: MA Experiment 20000182 PARAMETER Experiment Name: At_2mM_SA_P Parameter: Tissue Value: Aerial
  misc_feature: MA Experiment 20000182 PARAMETER Experiment Name: At_2mM_SA_P Parameter: Treatment Value: 2mM SA vs. No Treatment
  misc_feature: MA Experiment ID: 20000184 Result: Up-regulated in Transcription
  misc_feature: MA Experiment 20000184 PARAMETER Experiment Name: At_Shoots__P Parameter: Age (day) Value: 7
  misc_feature: MA Experiment 20000184 PARAMETER Experiment Name: At_Shoots__P Parameter: Tissue Value: Shoots vs. Whole Plant
  misc_feature: MA Experiment ID: 20000185 Result: Up-regulated in Transcription
  misc_feature: MA Experiment 20000185 PARAMETER Experiment Name: At_Roots__P Parameter: Age (day) Value: 7 vs. 21
  misc_feature: MA Experiment 20000185 PARAMETER Experiment Name: At_Roots__P Parameter: Organism Value: A. thaliana
  misc_feature: MA Experiment 20000185 PARAMETER Experiment Name: At_Roots__P Parameter: Tissue Value: Roots vs. Whole Plant
  misc_feature: MA Experiment ID: 20000264 Result: Down-regulated in Transcription
  misc_feature: MA Experiment 20000264 PARAMETER Experiment Name: At_Open_Flower_P Parameter: Age (day) Value: 21
  misc_feature: MA Experiment 20000264 PARAMETER Experiment Name: At_Open_Flower_P Parameter: Plant Line Value: WS
  misc_feature: MA Experiment 20000264 PARAMETER Experiment Name: At_Open_Flower_P Parameter: Tissue Value: Open Flower vs. Whole Plant
  misc_feature: MA Experiment ID: 20000439 Result: Up-regulated in Transcription
  misc_feature: MA Experiment 20000439 PARAMETER Experiment Name: At_Roots__P Parameter: Age (day) Value: 14 vs. 21
  misc_feature: MA Experiment 20000439 PARAMETER Experiment Name: At_Roots__P Parameter: Organism Value: A. thaliana
  misc_feature: MA Experiment 20000439 PARAMETER Experiment Name: At_Roots__P Parameter: Tissue Value: Roots vs. Whole Plant
  misc_feature: MA Experiment ID: 20000495 Result: Up-regulated in Transcription
  misc_feature: MA Experiment 20000495 PARAMETER Experiment Name: At_Guard_Cells_P Parameter: Harvest Date Value: 8/2/2002
  misc_feature: MA Experiment 20000495 PARAMETER Experiment Name: At_Guard_Cells_P Parameter: Organism Value: A. thaliana
  misc_feature: MA Experiment 20000495 PARAMETER Experiment Name: At_Guard_Cells_P Parameter: Tissue Value: Guard Cells vs. Leaves
  misc_feature: MA Experiment ID: 20000527 Result: Down-regulated in Transcription
  misc_feature: MA Experiment 20000527 PARAMETER Experiment Name: At_10percent_PEG_P Parameter: Age (day) Value: 20
  misc_feature: MA Experiment 20000527 PARAMETER Experiment Name: At_10percent_PEG_P Parameter: Organism Value: A. thaliana
  misc_feature: MA Experiment 20000527 PARAMETER Experiment Name: At_10percent_PEG_P Parameter: Plant Line Value: WS
  misc_feature: MA Experiment 20000527 PARAMETER Experiment Name: At_10percent_PEG_P Parameter: Timepoint (day) Value: 20
  misc_feature: MA Experiment 20000527 PARAMETER Experiment Name: At_10percent_PEG_P Parameter: Tissue Value: Whole Plant
  misc_feature: MA Experiment 20000527 PARAMETER Experiment Name: At_10percent_PEG_P Parameter: Treatment Value: 10percent PEG vs. No Treatment
  misc_feature: MA Experiment ID: 20001560 Result: Up-regulated in Transcription
  misc_feature: MA Experiment 20001560 PARAMETER Experiment Name: At_Drought_Soil_Dry_P Parameter: Age (day) Value: 28
  misc_feature: MA Experiment 20001560 PARAMETER Experiment Name: At_Drought_Soil_Dry_P Parameter: Organism Value: A. thaliana
  misc_feature: MA Experiment 20001560 PARAMETER Experiment Name: At_Drought_Soil_Dry_P Parameter: Plant Line Value: WS
  misc_feature: MA Experiment 20001560 PARAMETER Experiment Name: At_Drought_Soil_Dry_P Parameter: Post Timepoint (hr) Value: None
  misc_feature: MA Experiment 20001560 PARAMETER Experiment Name: At_Drought_Soil_Dry_P Parameter: Post-Treatment Value: None
  misc_feature: MA Experiment 20001560 PARAMETER Experiment Name: At_Drought_Soil_Dry_P Parameter: Timepoint (day) Value: 14
  misc_feature: MA Experiment 20001560 PARAMETER Experiment Name: At_Drought_Soil_Dry_P Parameter: Treatment Value: Drought vs. No Drought
  misc_feature: MA Experiment ID: 20001911 Result: Down-regulated in Transcription
  misc_feature: MA Experiment 20001911 PARAMETER Experiment Name: At_Drought_Reproduction_P Parameter: Age (day) Value: 40
  misc_feature: MA Experiment 20001911 PARAMETER Experiment Name: At_Drought_Reproduction_P Parameter: Organism Value: A. thaliana
  misc_feature: MA Experiment 20001911 PARAMETER Experiment Name: At_Drought_Reproduction_P Parameter: Plant Line Value: WS
  misc_feature: MA Experiment 20001911 PARAMETER Experiment Name: At_Drought_Reproduction_P Parameter: Timepoint (day) Value: 10
  misc_feature: MA Experiment 20001911 PARAMETER Experiment Name: At_Drought_Reproduction_P Parameter: Tissue Value: Flowers
  misc_feature: MA Experiment 20001911 PARAMETER Experiment Name: At_Drought_Reproduction_P Parameter: Treatment Value: Drought vs. No Drought
aattcccattcgtgttttttcggattgcgagaatcctacgttatttcttcacttttcatgatcccgaggacatcttagaccccaaatgttcttcgtcgatgtttctttggaaactggttcctctatacttgttcggatcagaaacaaagtctctctcagcaacagagtccattttgcagatagttcctgaggcaatggctgctacttcatctaacgtcctttgcaatgctagcgagtcagatctttgtcgtgatgattccgctgcatttctacttaaatttgtagccattgcttcgattctcttagctggagctgctggtgtaactataccactcattggcaggaaccgtcgtttccttcaaactgatggtaatctctttgtgactgctaaagcttttgcagctggtgtgattctcgccacgggttttgttcatatgttggcgggtggcacggaagctttgaagaacccgtgcttaccggatttcccttggtctaagtttcctttcccgggattctttgcgatgattgctgctttgatcactctgtttgtggatttcatggggactcagtactatgaacggaagcaagagagggaagctagtgagtctgttgaaccgtttggccgtgaacaatcaccgggtattgttgttcccatgattggagaaggaacgaatgatgggaaagtgtttggtgaagaagacagtggtgggattcacattgttggcattcatgctcatgctgctcatcatagacatagtcatcctcctggtcatgattcatgtgaaggacacagtaaaatcgacattggtcatgctcatgctcatgggcacgggcatggacacggacatggacacgtacacgggggtttggatgctgttaatggagctaggcatatcgttgtttctcaggttctggagcttggaattgtgtcacattccataatcatcggtctatcccttggagtatctcagtctccttgcacaatccggcctctaatcgcagcactatccttccatcaattctttgaaggatttgcgctcggtggatgcatctcccaagcgcaattcaggaacaaatcagcgaccataatggcttgttttttcgccctcacaaccccgatagggatcgggattggaaccgcagtggcgtcgtctttcaattctcacagtgtcggagcattggtcactgaaggtatcttggactcgctctcagccggaattcttgtgtacatggctttagtggatctcatagctgctgatttcttgagtacaaaaatgaggtgtaactttaggcttcaaattgtatcttatgtaatgttgttcctaggagctggactcatgtcttctcttgccatttgggcttaattagagtataagattccatagtttcttctatagctacaaataacatgtatagttctttctagagaatttatcaatctaagatttc

SEQ ID NO: 29954 - protein, 453 aa, Arabidopsis thaliana
  peptide (1)..(453): Ceres Seq. ID no. 12396529
  misc_feature (235)..(337): Pfam Name: Cation efflux family Pfam Description: Cation efflux family
  misc_feature (60)..(258): Homolog of NCBI NO: 30526082 NR Description: putative ZIP-like zinc transporter
  misc_feature (65)..(419): Homolog of NCBI NO: 16304806 NR Description: putative Zn and Cd transporter [Thlaspi
  misc_feature (66)..(418): Homolog of NCBI NO: 28070974 NR Description: putative Zn transporter [Thlaspi caerulescens]
  misc_feature (65)..(453): Homolog of NCBI NO: 7381054 NR Description: Zn and Cd transporter ZNT1 [Thlaspi caerulescens]
  misc_feature (35)..(453): Homolog of NCBI NO: 14582255 NR Description: ZIP-like zinc transporter [Thlaspi caerulescens]
  misc_feature (52)..(453): Homolog of NCBI NO: 30682009 NR Description: metal transporter, putative (ZIP4) [Arabidopsis
  misc_feature (65)..(452): Homolog of NCBI NO: 12006859 NR Description: putative Zn transporter ZNT4 [Thlaspi
  misc_feature (35)..(452): Homolog of NCBI NO: 14582257 NR Description: ZIP-like zinc transporter [Thlaspi caerulescens]
  misc_feature (65)..(453): Homolog of NCBI NO: 21553732 NR Description: putative iron-regulated transporter [Arabidopsis
  misc_feature (35)..(453): Homolog of NCBI NO: 18406954 NR Description: putative iron-regulated transporter
FPFVFFRIARILRYFFTFHDPEDILDPKCSSSMFLWKLVPLYLFGSETKSLSATESILQIVPEAMAATSSNVLCNASESDLCRDDSAAFLLKFVAIASILLAGAAGVTIPLIGRNRRFLQTDGNLFVTAKAFAAGVILATGFVHMLAGGTEALKNPCLPDFPWSKFPFPGFFAMIAALITLFVDFMGTQYYERKQEREASESVEPFGREQSPGIVVPMIGEGTNDGKVFGEEDSGGIHIVGIHAHAAHHRHSHPPGHDSCEGHSKIDIGHAHAHGHGHGHGHGHVHGGLDAVNGARHIVVSQVLELGIVSHSIIIGLSLGVSQSPCTIRPLIAALSFHQFFEGFALGGCISQAQFRNKSATIMACFFALTTPIGIGIGTAVASSFNSHSVGALVTEGILDSLSAGILVYMALVDLIAADFLSTKMRCNFRLQIVSYVMLFLGAGLMSSLAIWA

SEQ ID NO: 29955 - protein, 421 aa, Arabidopsis thaliana
  peptide (1)..(421): Ceres Seq. ID no. 12396530
  misc_feature (203)..(305): Pfam Name: Cation efflux family Pfam Description: Cation efflux family
  misc_feature (28)..(226): Homolog of NCBI NO: 30526082 NR Description: putative ZIP-like zinc transporter
  misc_feature (33)..(387): Homolog of NCBI NO: 16304806 NR Description: putative Zn and Cd transporter [Thlaspi
  misc_feature (34)..(386): Homolog of NCBI NO: 28070974 NR Description: putative Zn transporter [Thlaspi caerulescens]
  misc_feature (33)..(421): Homolog of NCBI NO: 7381054 NR Description: Zn and Cd transporter ZNT1 [Thlaspi caerulescens]
  misc_feature (3)..(421): Homolog of NCBI NO: 14582255 NR Description: ZIP-like zinc transporter [Thlaspi caerulescens]
  misc_feature (20)..(421): Homolog of NCBI NO: 30682009 NR Description: metal transporter, putative (ZIP4) [Arabidopsis
  misc_feature (33)..(420): Homolog of NCBI NO: 12006859 NR Description: putative Zn transporter ZNT4 [Thlaspi
  misc_feature (3)..(420): Homolog of NCBI NO: 14582257 NR Description: ZIP-like zinc transporter [Thlaspi caerulescens]
  misc_feature (33)..(421): Homolog of NCBI NO: 21553732 NR Description: putative iron-regulated transporter [Arabidopsis
  misc_feature (3)..(421): Homolog of NCBI NO: 18406954 NR Description: putative iron-regulated transporter
MFLWKLVPLYLFGSETKSLSATESILQIVPEAMAATSSNVLCNASESDLCRDDSAAFLLKFVAIASILLAGAAGVTIPLIGRNRRFLQTDGNLFVTAKAFAAGVILATGFVHMLAGGTEALKNPCLPDFPWSKFPFPGFFAMIAALITLFVDFMGTQYYERKQEREASESVEPFGREQSPGIVVPMIGEGTNDGKVFGEEDSGGIHIVGIHAHAAHHRHSHPPGHDSCEGHSKIDIGHAHAHGHGHGHGHGHVHGGLDAVNGARHIVVSQVLELGIVSHSIIIGLSLGVSQSPCTIRPLIAALSFHQFFEGFALGGCISQAQFRNKSATIMACFFALTTPIGIGIGTAVASSFNSHSVGALVTEGILDSLSAGILVYMALVDLIAADFLSTKMRCNFRLQIVSYVMLFLGAGLMSSLAIWA

SEQ ID NO: 29956 - protein, 389 aa, Arabidopsis thaliana
  peptide (1)..(389): Ceres Seq. ID no. 12396531
  misc_feature (171)..(273): Pfam Name: Cation efflux family Pfam Description: Cation efflux family
  misc_feature (1)..(194): Homolog of NCBI NO: 30526082 NR Description: putative ZIP-like zinc transporter
  misc_feature (1)..(355): Homolog of NCBI NO: 16304806 NR Description: putative Zn and Cd transporter [Thlaspi
  misc_feature (2)..(354): Homolog of NCBI NO: 28070974 NR Description: putative Zn transporter [Thlaspi caerulescens]
  misc_feature (1)..(389): Homolog of NCBI NO: 7381054 NR Description: Zn and Cd transporter ZNT1 [Thlaspi caerulescens]
  misc_feature (1)..(389): Homolog of NCBI NO: 14582255 NR Description: ZIP-like zinc transporter [Thlaspi caerulescens]
  misc_feature (1)..(389): Homolog of NCBI NO: 30682009 NR Description: metal transporter, putative (ZIP4) [Arabidopsis
  misc_feature (1)..(388): Homolog of NCBI NO: 12006859 NR Description: putative Zn transporter ZNT4 [Thlaspi
  misc_feature (1)..(388): Homolog of NCBI NO: 14582257 NR Description: ZIP-like zinc transporter [Thlaspi caerulescens]
  misc_feature (1)..(389): Homolog of NCBI NO: 21553732 NR Description: putative iron-regulated transporter [Arabidopsis
  misc_feature (1)..(389): Homolog of NCBI NO: 18406954 NR Description: putative iron-regulated transporter
MAATSSNVLCNASESDLCRDDSAAFLLKFVAIASILLAGAAGVTIPLIGRNRRFLQTDGNLFVTAKAFAAGVILATGFVHMLAGGTEALKNPCLPDFPWSKFPFPGFFAMIAALITLFVDFMGTQYYERKQEREASESVEPFGREQSPGIVVPMIGEGTNDGKVFGEEDSGGIHIVGIHAHAAHHRHSHPPGHDSCEGHSKIDIGHAHAHGHGHGHGHGHVHGGLDAVNGARHIVVSQVLELGIVSHSIIIGLSLGVSQSPCTIRPLIAALSFHQFFEGFALGGCISQAQFRNKSATIMACFFALTTPIGIGIGTAVASSFNSHSVGALVTEGILDSLSAGILVYMALVDLIAADFLSTKMRCNFRLQIVSYVMLFLGAGLMSSLAIWA

SEQ ID NO: 29957 - DNA, 940 bp, Arabidopsis thaliana
  misc_feature (1)..(940): Ceres Seq. ID no. 12323107
  misc_feature: MA Experiment ID: 108434 Result: Up-regulated in Transcription
  misc_feature: MA Experiment 108434 PARAMETER Experiment Name: At_Root_Tips_cDNA_P Parameter: Tissue Value: Root Tips
  misc_feature: MA Experiment ID: 108435 Result: Up-regulated in Transcription
  misc_feature: MA Experiment 108435 PARAMETER Experiment Name: At_stm_Mutants_cDNA_P Parameter: Plant Line Value: wt Landsburg vs stm
  misc_feature: MA Experiment 108435 PARAMETER Experiment Name: At_stm_Mutants_cDNA_P Parameter: Tissue Value: Shoot Apical Meristem Region
  misc_feature: MA Experiment ID: 108461 Result: Down-regulated in Transcription
  misc_feature: MA Experiment 108461 PARAMETER Experiment Name: At_Germinating_Seeds_cDNA_P Parameter: Age (day) Value: 1 vs. 0
  misc_feature: MA Experiment 108461 PARAMETER Experiment Name: At_Germinating_Seeds_cDNA_P Parameter: Tissue Value: Germinating Seeds
  misc_feature: MA Experiment ID: 108462 Result: Down-regulated in Transcription
  misc_feature: MA Experiment 108462 PARAMETER Experiment Name: At_Germinating_Seeds_cDNA_P Parameter: Age (day) Value: 2 vs. 0
  misc_feature: MA Experiment 108462 PARAMETER Experiment Name: At_Germinating_Seeds_cDNA_P Parameter: Tissue Value: Germinating Seeds
  misc_feature: MA Experiment ID: 108463 Result: Down-regulated in Transcription
  misc_feature: MA Experiment 108463 PARAMETER Experiment Name: At_Germinating_Seeds_cDNA_P Parameter: Age (day) Value: 3 vs. 0
  misc_feature: MA Experiment 108463 PARAMETER Experiment Name: At_Germinating_Seeds_cDNA_P Parameter: Tissue Value: Germinating Seeds
  misc_feature: MA Experiment ID: 108464 Result: Down-regulated in Transcription
  misc_feature: MA Experiment 108464 PARAMETER Experiment Name: At_Germinating_Seeds_cDNA_P Parameter: Age (day) Value: 4 vs. 0
  misc_feature: MA Experiment 108464 PARAMETER Experiment Name: At_Germinating_Seeds_cDNA_P Parameter: Tissue Value: Germinating Seeds
  misc_feature: MA Experiment ID: 108488 Result: Up-regulated in Transcription
  misc_feature: MA Experiment ID: 108489 Result: Up-regulated in Transcription
  misc_feature: MA Experiment ID: 108572 Result: Down-regulated in Transcription
  misc_feature: MA Experiment 108572 PARAMETER Experiment Name: At_Drought_cDNA_P Parameter: Timepoint (hr) Value: 1
  misc_feature: MA Experiment 108572 PARAMETER Experiment Name: At_Drought_cDNA_P Parameter: Tissue Value: Aerial
  misc_feature: MA Experiment 108572 PARAMETER Experiment Name: At_Drought_cDNA_P Parameter: Treatment Value: Drought vs. No Drought
  misc_feature: MA Experiment ID: 108573 Result: Down-regulated in Transcription
  misc_feature: MA Experiment 108573 PARAMETER Experiment Name: At_Drought_cDNA_P Parameter: Timepoint (hr) Value: 6
  misc_feature: MA Experiment 108573 PARAMETER Experiment Name: At_Drought_cDNA_P Parameter: Tissue Value: Aerial
  misc_feature: MA Experiment 108573 PARAMETER Experiment Name: At_Drought_cDNA_P Parameter: Treatment Value: Drought vs. No Drought
  misc_feature: MA Experiment ID: 108579 Result: Up-regulated in Transcription
  misc_feature: MA Experiment 108579 PARAMETER Experiment Name: At_4deg_Cold_cDNA_P Parameter: Temperature (deg C) Value: 4 vs. 22
  misc_feature: MA Experiment 108579 PARAMETER Experiment Name: At_4deg_Cold_cDNA_P Parameter: Timepoint (hr) Value: 6
  misc_feature: MA Experiment 108579 PARAMETER Experiment Name: At_4deg_Cold_cDNA_P Parameter: Tissue Value: Aerial
  misc_feature: MA Experiment ID: 108609 Result: Down-regulated in Transcription
  misc_feature: MA Experiment 108609 PARAMETER Experiment Name: At_100uM_ABA_cDNA_P Parameter: Timepoint (hr) Value: 24
  misc_feature: MA Experiment 108609 PARAMETER Experiment Name: At_100uM_ABA_cDNA_P Parameter: Tissue Value: Aerial
  misc_feature: MA Experiment 108609 PARAMETER Experiment Name: At_100uM_ABA_cDNA_P Parameter: Treatment Value: 100uM ABA vs. No Treatment
  misc_feature: MA Experiment ID: 20000089 Result: Up-regulated in Transcription
  misc_feature: MA Experiment ID: 20000090 Result: Up-regulated in Transcription
acattttcagctgctcataaaccctaaaaatcctctctttttctcaaccttgattcttagccatggagttctggggaattgaagttaaatcaggaaagccagttacagtgactcctgaagaaggcattcttatccacgtttctcaggcatcgcttggagaatgtaaaaacaagaagggagagtttgtgcctttacatgtaaaggttgggaaccagaacttggttctgggaactctatcgactgagaacatccctcagcttttctgtgatttggtattcgacaaggagtttagctttctcacacttggggaaaaggaagtgtttactttgttggatacaaaactcccaacattgagccacaaggctattctgaggaagaagaggaagaagaggaagaagttcctgctgccgttactgctagtgggaatgctgccaaggctgtagctaaaccaaaggctaagcctgcagaagtgaagccagctgttgatgatgaagaggatgagtctgattctgacggaatggatgaagatgattctgatggtgaggattctgaggaagaagagcctacacctaagaagcctgcatcaagcaagaagagagctaatgaaactacccctaaagcacctgtgtcagcaaagaaggcgaaagtagcagttactcctcagaaaacagatgagaagaagaaaggtggaaaggctgcaaaccagagcccaaagtcggccagtcaagtctcatgtggttcatgcaagaagactttcaactcagggaatgcacttgagtctcacaacaaggccaagcacgctgctgccaagtgaagtggtttcttattagagcttatgatttctatggaattttgcctgtagtctttatgaaaccttcagatttccttatattttcttttgataacaagagtcttaatgaaagagagccagttggagtct

SEQ ID NO: 29958 - protein, 126 aa, Arabidopsis thaliana
  peptide (1)..(126): Ceres Seq. ID no. 12323108
  misc_feature (1)..(97): Homolog of NCBI NO: 30688577 NR Description: histone deacetylase-related protein [Arabidopsis
  misc_feature (1)..(97): Homolog of NCBI NO: 25352191 NR Description: probable histone deacetylase (EC 3.5.1.-)
  misc_feature (1)..(76): Homolog of NCBI NO: 33667906 NR Description: histone deacetylase [Solanum chacoense]
MEFWGIEVKSGKPVTVTPEEGILIHVSQASLGECKNKKGEFVPLHVKVGNQNLVLGTLSTENIPQLFCDLVFDKEFSFLTLGEKEVFTLLDTKLPTLSHKAILRKKRKKRKKFLLPLLLVGMLPRL

SEQ ID NO: 29959 - protein, 98 aa, Arabidopsis thaliana
  peptide (1)..(98): Ceres Seq. ID no. 12323109
  misc_feature (71)..(94): Pfam Name: Zinc finger, C2H2 type Pfam Description: Zinc finger, C2H2 type
  misc_feature (1)..(70): Homolog of NCBI NO: 30688577 NR Description: histone deacetylase-related protein [Arabidopsis
  misc_feature (1)..(70): Homolog of NCBI NO: 25352191 NR Description: probable histone deacetylase (EC 3.5.1.-)
  misc_feature (1)..(98): Homolog of NCBI NO: 33667906 NR Description: histone deacetylase [Solanum chacoense]
  misc_feature (1)..(97): Homolog of NCBI NO: 2392769 NR Description: putative histone deacetylase [Arabidopsis
  misc_feature (1)..(98): Homolog of NCBI NO: 18407844 NR Description: putative histone deacetylase
MDEDDSDGEDSEEEEPTPKKPASSKKRANETTPKAPVSAKKAKVAVTPQKTDEKKKGGKAANQSPKSASQVSCGSCKKTFNSGNALESHNKAKHAAAK

SEQ ID NO: 29960 - DNA, 607 bp, Arabidopsis thaliana
  misc_feature (1)..(607): Ceres Seq. ID no. 12377317
  misc_feature: MA Experiment ID: 108434 Result: Up-regulated in Transcription
  misc_feature: MA Experiment 108434 PARAMETER Experiment Name: At_Root_Tips_cDNA_P Parameter: Tissue Value: Root Tips
  misc_feature: MA Experiment ID: 108435 Result: Up-regulated in Transcription
  misc_feature: MA Experiment 108435 PARAMETER Experiment Name: At_stm_Mutants_cDNA_P Parameter: Plant Line Value: wt Landsburg vs stm
  misc_feature: MA Experiment 108435 PARAMETER Experiment Name: At_stm_Mutants_cDNA_P Parameter: Tissue Value: Shoot Apical Meristem Region
  misc_feature: MA Experiment ID: 108462 Result: Down-regulated in Transcription
  misc_feature: MA Experiment 108462 PARAMETER Experiment Name: At_Germinating_Seeds_cDNA_P Parameter: Age (day) Value: 2 vs. 0
  misc_feature: MA Experiment 108462 PARAMETER Experiment Name: At_Germinating_Seeds_cDNA_P Parameter: Tissue Value: Germinating Seeds
  misc_feature: MA Experiment ID: 108463 Result: Down-regulated in Transcription
  misc_feature: MA Experiment 108463 PARAMETER Experiment Name: At_Germinating_Seeds_cDNA_P Parameter: Age (day) Value: 3 vs. 0
  misc_feature: MA Experiment 108463 PARAMETER Experiment Name: At_Germinating_Seeds_cDNA_P Parameter: Tissue Value: Germinating Seeds
  misc_feature: MA Experiment ID: 108464 Result: Down-regulated in Transcription
  misc_feature: MA Experiment 108464 PARAMETER Experiment Name: At_Germinating_Seeds_cDNA_P Parameter: Age (day) Value: 4 vs. 0
  misc_feature: MA Experiment 108464 PARAMETER Experiment Name: At_Germinating_Seeds_cDNA_P Parameter: Tissue Value: Germinating Seeds
  misc_feature: MA Experiment ID: 20000224 Result: Down-regulated in Transcription
cgcatccaaaccctagaaattttgtctctctcgccgccttgcgaaaagcattttcgatcttactcttaggataaaaaaatgtcgacagttggagagcttgcttgcagctacgctgttatgatcctcgaggacgagggtatcgctatcacggctgacaaaatcgcgaccttggtgaaagctgctggtgttagtattgagtcatactggccaatgctattcgccaagatggctgagaaacgtaacgtgactgatctcatcatgaacgttggtgctggtggtggaggtggtgctccggttgcagctgctgctccagctgctggcggtggtgcggcagctgctcctgctgctgaggagaagaagaaggatgagccagcagaagagagtgacggagatttgggtttcggtttgtttgactaaacgcagtcacttgtctttcttctttgtagttggatattggagactatattttgtcgtatgagttattattacttgtttgatctggctaaaggactattagttggtttatgatgcgtatgttgtataactcaagtttcctagcaaaccaatcggctcgggcttttgttagaattgattttgtttattttct

SEQ ID NO: 29961 - protein, 112 aa, Arabidopsis thaliana
  peptide (1)..(112): Ceres Seq. ID no. 12377318
  misc_feature (22)..(111): Pfam Name: 60s Acidic ribosomal protein Pfam Description: 60s Acidic ribosomal protein
  misc_feature (1)..(112): Homolog of NCBI NO: 18253043 NR Description: 60S acidic ribosomal protein P1 [Spodoptera
  misc_feature (1)..(112): Homolog of NCBI NO: 25150244 NR Description: 60S Ribosomal Protein, Acidic 1
  misc_feature (5)..(112): Homolog of NCBI NO: 1710590 NR Description: 60S ACIDIC RIBOSOMAL PROTEIN P1 (L12)
  misc_feature (5)..(112): Homolog of NCBI NO: 7440759 NR Description: acidic ribosomal protein P1a - maize
  misc_feature (1)..(112): Homolog of NCBI NO: 6094103 NR Description: 60S acidic ribosomal protein P1
  misc_feature (1)..(112): Homolog of NCBI NO: 18411448 NR Description: acidic ribosomal protein p1
  misc_feature (1)..(112): Homolog of NCBI NO: 21553441 NR Description: 60S acidic ribosomal protein P1-like protein
  misc_feature (1)..(112): Homolog of NCBI NO: 15238170 NR Description: 60S acidic ribosomal protein P1-like protein
  misc_feature (1)..(112): Homolog of NCBI NO: 21592477 NR Description: acidic ribosomal protein, putative [Arabidopsis
  misc_feature (1)..(112): Homolog of NCBI NO: 15223303 NR Description: acidic ribosomal protein, putative
MSTVGELACSYAVMILEDEGIAITADKIATLVKAAGVSIESYWPMLFAKMAEKRNVTDLIMNVGAGGGGGAPVAAAAPAAGGGAAAAPAAEEKKKDEPAEESDGDLGFGLFD

SEQ ID NO: 29962 - protein, 99 aa, Arabidopsis thaliana
  peptide (1)..(99): Ceres Seq. ID no. 12377319
  misc_feature (9)..(98): Pfam Name: 60s Acidic ribosomal protein Pfam Description: 60s Acidic ribosomal protein
  misc_feature (1)..(99): Homolog of NCBI NO: 18253043 NR Description: 60S acidic ribosomal protein P1 [Spodoptera
  misc_feature (1)..(99): Homolog of NCBI NO: 25150244 NR Description: 60S Ribosomal Protein, Acidic 1
  misc_feature (1)..(99): Homolog of NCBI NO: 1710590 NR Description: 60S ACIDIC RIBOSOMAL PROTEIN P1 (L12)
  misc_feature (1)..(99): Homolog of NCBI NO: 7440759 NR Description: acidic ribosomal protein P1a - maize
  misc_feature (1)..(99): Homolog of NCBI NO: 6094103 NR Description: 60S acidic ribosomal protein P1
  misc_feature (1)..(99): Homolog of NCBI NO: 18411448 NR Description: acidic ribosomal protein p1
  misc_feature (1)..(99): Homolog of NCBI NO: 21553441 NR Description: 60S acidic ribosomal protein P1-like protein
  misc_feature (1)..(99): Homolog of NCBI NO: 15238170 NR Description: 60S acidic ribosomal protein P1-like protein
  misc_feature (1)..(99): Homolog of NCBI NO: 21592477 NR Description: acidic ribosomal protein, putative [Arabidopsis
  misc_feature (1)..(99): Homolog of NCBI NO: 15223303 NR Description: acidic ribosomal protein, putative
MILEDEGIAITADKIATLVKAAGVSIESYWPMLFAKMAEKRNVTDLIMNVGAGGGGGAPVAAAAPAAGGGAAAAPAAEEKKKDEPAEESDGDLGFGLFD

SEQ ID NO: 29963 - protein, 68 aa, Arabidopsis thaliana
  peptide (1)..(68): Ceres Seq. ID no. 12377320
  misc_feature (1)..(67): Pfam Name: 60s Acidic ribosomal protein Pfam Description: 60s Acidic ribosomal protein
  misc_feature (1)..(68): Homolog of NCBI NO: 18253043 NR Description: 60S acidic ribosomal protein P1 [Spodoptera
  misc_feature (1)..(68): Homolog of NCBI NO: 25150244 NR Description: 60S Ribosomal Protein, Acidic 1
  misc_feature (1)..(68): Homolog of NCBI NO: 1710590 NR Description: 60S ACIDIC RIBOSOMAL PROTEIN P1 (L12)
  misc_feature (1)..(68): Homolog of NCBI NO: 7440759 NR Description: acidic ribosomal protein P1a - maize
  misc_feature (1)..(68): Homolog of NCBI NO: 6094103 NR Description: 60S acidic ribosomal protein P1
  misc_feature (1)..(68): Homolog of NCBI NO: 18411448 NR Description: acidic ribosomal protein p1
  misc_feature (1)..(68): Homolog of NCBI NO: 21553441 NR Description: 60S acidic ribosomal protein P1-like protein
  misc_feature (1)..(68): Homolog of NCBI NO: 15238170 NR Description: 60S acidic ribosomal protein P1-like protein
  misc_feature (1)..(68): Homolog of NCBI NO: 21592477 NR Description: acidic ribosomal protein, putative [Arabidopsis
  misc_feature (1)..(68): Homolog of NCBI NO: 15223303 NR Description: acidic ribosomal protein, putative
MLFAKMAEKRNVTDLIMNVGAGGGGGAPVAAAAPAAGGGAAAAPAAEEKKKDEPAEESDGDLGFGLFD

SEQ ID NO: 29964 - DNA, 1562 bp, Arabidopsis thaliana
  misc_feature (1)..(1562): Ceres Seq. ID no. 12439764
  misc_feature: MA Experiment ID: 20000224 Result: Down-regulated in Transcription
gtggctaattctccgattaggttttcgattctcttcgtcttcgtctctgaagcgaccaaaaaccctaattctatcaattcgaaatcttcaatttcacatgggtgaacattcaccttctcaaccatcatctcatactcttcctccaaaccaaccggaatcacccaatcacgaaacccctaatccaattccaccggaaaccaacgatgacgactccgcctcatccgccggagtttctggctcaatcgtctcatcaaccaccattgaagcaccacaagtcactgaattaggcaatgtatcgtctccacctaccaagatccctctccgtcctcgaaaaatcagaaaactttcacccgacgacgacgcttccgacggattcaatccggagcataacctttctcagatgacgacgacgaaaccggcaacgaagagtaaattatcacagtcacgcactgtaaccgtgccgagaatccaagcaaggtctctcacttgtgaaggcgagcttgaagcagctcttcaccatctccgaagtgttgatcctctgctcgcgtctttaatcgacattcatccaccaccaacgttcgagacttttcagactccgttcttggcgttgattcgaagcattctttatcagcaattagcagctaaagcaggtaattcaatctacacacgcttcgttgccttatgcggcggtgaaaacggcgtcgtgccagagaatgtattgcctttaacacctcaacagcttcgtcaaattggtgtttccgggcgtaaagcgagttaccttcatgatcttgctaggaaatatcaaaatgggatcttgtcggattctggaatagtgaatatggatgagaaatctttgttcacgatgttaacaatggtgaatgggattgggtcatggtcggtccatatgtttatgataaactctcttcatagacctgatgtgttaccagttaatgatcttggtgtaaggaagggtgtgcagatgcttaatggtatggaggatttgcctcgtccatccaaaatggagcagctttgcgagaaatggcgtccgtatagatcagtagcgtcttggtacttgtggcggctcattgaatctaaaaatacaccacctaatgctgcggctgctacggccggagctgctctttcgtttccacagttggaagacattcagcaacaagaacaagaacagcaacatcaacaacatcagcaacaacagccgcagcttatggaccctcttaataatgtgttcagtatcggggcatggggccaaacgtagctgactttgcaccttaaattatcgtctctcatagcgtgatagggattctggtccggtggtcttcagctactgtctggtgaagaagtctttgttccacagcttggaaataagaataaaaatggccatggaacagaaatcttctttagctaagtgaagagtatgtaagatttaagcttagctaatgaacttgacatcgattttctttttgttggagacttgaactcgtctaaagaaacctctaaagcgtttcctgattcgtatctaaaacagagcaacatatttgatttct

SEQ ID NO: 29965 - protein, 423 aa, Arabidopsis thaliana
  peptide (1)..(423): Ceres Seq. ID no. 12439765
  misc_feature (204)..(349): Pfam Name: HhH-GPD superfamily base excision DNA repair protein Pfam Description: HhH-GPD superfamily base excision DNA repair
  misc_feature (204)..(349): Pfam Name: HhH-GPD superfamily base excision DNA repair protein Pfam Description: HhH-GPD superfamily base excision DNA repair
  misc_feature (167)..(360): Homolog of NCBI NO: 22971879 NR Description: hypothetical protein [Chloroflexus aurantiacus]
  misc_feature (167)..(363): Homolog of NCBI NO: 37521587 NR Description: probable DNA-3-methyladenine glycosylase
  misc_feature (160)..(361): Homolog of NCBI NO: 23116389 NR Description: hypothetical protein [Desulfitobacterium
  misc_feature (138)..(367): Homolog of NCBI NO: 15230333 NR Description: putative DNA-3-methyladenine glycosidase; protein
  misc_feature (87)..(418): Homolog of NCBI NO: 5091600 NR Description: This gene is a member of PF|01332 Alkylbase DNA
  misc_feature (167)..(360): Homolog of NCBI NO: 22971879 NR Description: hypothetical protein [Chloroflexus aurantiacus]
  misc_feature (160)..(361): Homolog of NCBI NO: 23116389 NR Description: hypothetical protein [Desulfitobacterium
  misc_feature (87)..(418): Homolog of NCBI NO: 5091600 NR Description: This gene is a member of PF|01332 Alkylbase DNA
  misc_feature (33)..(423): Homolog of NCBI NO: 18410802 NR Description: 3-methyladenine DNA glycosylase, putative
  misc_feature (33)..(418): Homolog of NCBI NO: 25406423 NR Description: hypothetical protein F22H5.5 [imported] -
  misc_feature (33)..(423): Homolog of NCBI NO: 18394744 NR Description: Expressed protein
  misc_feature (33)..(423): Homolog of NCBI NO: 21593178 NR Description: unknown [Arabidopsis thaliana]
  misc_feature (33)..(423): Homolog of NCBI NO: 25402893 NR Description: protein F18O14.25 [imported] - Arabidopsis
  misc_feature (138)..(367): Homolog of NCBI NO: 15230333 NR Description: putative DNA-3-methyladenine glycosidase; protein
  misc_feature (167)..(363): Homolog of NCBI NO: 37521587 NR Description: probable DNA-3-methyladenine glycosylase
  misc_feature (33)..(423): Homolog of NCBI NO: 25402893 NR Description: protein F18O14.25 [imported] - Arabidopsis
  misc_feature (33)..(423): Homolog of NCBI NO: 21593178 NR Description: unknown [Arabidopsis thaliana]
  misc_feature (33)..(423): Homolog of NCBI NO: 18394744 NR Description: Expressed protein
  misc_feature (33)..(418): Homolog of NCBI NO: 25406423 NR Description: hypothetical protein F22H5.5 [imported] -
  misc_feature (33)..(423): Homolog of NCBI NO: 18410802 NR Description: 3-methyladenine DNA glycosylase, putative
WLILRLGFRFSSSSSLKRPKTLILSIRNLQFHMGEHSPSQPSSHTLPPNQPESPNHETPNPIPPETNDDDSASSAGVSGSIVSSTTIEAPQVTELGNVSSPPTKIPLRPRKIRKLSPDDDASDGFNPEHNLSQMTTTKPATKSKLSQSRTVTVPRIQARSLTCEGELEAALHHLRSVDPLLASLIDIHPPPTFETFQTPFLALIRSILYQQLAAKAGNSIYTRFVALCGGENGVVPENVLPLTPQQLRQIGVSGRKASYLHDLARKYQNGILSDSGIVNMDEKSLFTMLTMVNGIGSWSVHMFMINSLHRPDVLPVNDLGVRKGVQMLNGMEDLPRPSKMEQLCEKWRPYRSVASWYLWRLIESKNTPPNAAAATAGAALSFPQLEDIQQQEQEQQHQQHQQQQPQLMDPLNNVFSIGAWGQT

SEQ ID NO: 29966 - protein, 391 aa, Arabidopsis thaliana
  peptide (1)..(391): Ceres Seq. ID no. 12439766
  misc_feature (172)..(317): Pfam Name: HhH-GPD superfamily base excision DNA repair protein Pfam Description: HhH-GPD superfamily base excision DNA repair
  misc_feature (172)..(317): Pfam Name: HhH-GPD superfamily base excision DNA repair protein Pfam Description: HhH-GPD superfamily base excision DNA repair
  misc_feature (135)..(328): Homolog of NCBI NO: 22971879 NR Description: hypothetical protein [Chloroflexus aurantiacus]
  misc_feature (135)..(331): Homolog of NCBI NO: 37521587 NR Description: probable DNA-3-methyladenine glycosylase
  misc_feature (128)..(329): Homolog of NCBI NO: 23116389 NR Description: hypothetical protein [Desulfitobacterium
  misc_feature (106)..(335): Homolog of NCBI NO: 15230333 NR Description: putative DNA-3-methyladenine glycosidase; protein
  misc_feature (55)..(386): Homolog of NCBI NO: 5091600 NR Description: This gene is a member of PF|01332 Alkylbase DNA
  misc_feature (135)..(328): Homolog of NCBI NO: 22971879 NR Description: hypothetical protein [Chloroflexus aurantiacus]
  misc_feature (128)..(329): Homolog of NCBI NO: 23116389 NR Description: hypothetical protein [Desulfitobacterium
  misc_feature (55)..(386): Homolog of NCBI NO: 5091600 NR Description: This gene is a member of PF|01332 Alkylbase DNA
  misc_feature (1)..(391): Homolog of NCBI NO: 18410802 NR Description: 3-methyladenine DNA glycosylase, putative
  misc_feature (1)..(386): Homolog of NCBI NO: 25406423 NR Description: hypothetical protein F22H5.5 [imported] -
  misc_feature (1)..(391): Homolog of NCBI NO: 18394744 NR Description: Expressed protein
  misc_feature (1)..(391): Homolog of NCBI NO: 21593178 NR Description: unknown [Arabidopsis thaliana]
  misc_feature (1)..(391): Homolog of NCBI NO: 25402893 NR Description: protein F18O14.25 [imported] - Arabidopsis
  misc_feature (106)..(335): Homolog of NCBI NO: 15230333 NR Description: putative DNA-3-methyladenine glycosidase; protein
  misc_feature (135)..(331): Homolog of NCBI NO: 37521587 NR Description: probable DNA-3-methyladenine glycosylase
  misc_feature (1)..(391): Homolog of NCBI NO: 25402893 NR Description: protein F18O14.25 [imported] - Arabidopsis
  misc_feature (1)..(391): Homolog of NCBI NO: 21593178 NR Description: unknown [Arabidopsis thaliana]
  misc_feature (1)..(391): Homolog of NCBI NO: 18394744 NR Description: Expressed protein
  misc_feature (1)..(386): Homolog of NCBI NO: 25406423 NR Description: hypothetical protein F22H5.5 [imported] -
  misc_feature (1)..(391): Homolog of NCBI NO: 18410802 NR Description: 3-methyladenine DNA glycosylase, putative
MGEHSPSQPSSHTLPPNQPESPNHETPNPIPPETNDDDSASSAGVSGSIVSSTTIEAPQVTELGNVSSPPTKIPLRPRKIRKLSPDDDASDGFNPEHNLSQMTTTKPATKSKLSQSRTVTVPRIQARSLTCEGELEAALHHLRSVDPLLASLIDIHPPPTFETFQTPFLALIRSILYQQLAAKAGNSIYTRFVALCGGENGVVPENVLPLTPQQLRQIGVSGRKASYLHDLARKYQNGILSDSGIVNMDEKSLFTMLTMVNGIGSWSVHMFMINSLHRPDVLPVNDLGVRKGVQMLNGMEDLPRPSKMEQLCEKWRPYRSVASWYLWRLIESKNTPPNAAAATAGAALSFPQLEDIQQQEQEQQHQQHQQQQPQLMDPLNNVFSIGAWGQT

SEQ ID NO: 29967 - protein, 290 aa, Arabidopsis thaliana
  peptide (1)..(290): Ceres Seq. ID no. 12439767
  misc_feature (71)..(216): Pfam Name: HhH-GPD superfamily base excision DNA repair protein Pfam Description: HhH-GPD superfamily base excision DNA repair
  misc_feature (71)..(216): Pfam Name: HhH-GPD superfamily base excision DNA repair protein Pfam Description: HhH-GPD superfamily base excision DNA repair
  misc_feature (34)..(227): Homolog of NCBI NO: 22971879 NR Description: hypothetical protein [Chloroflexus aurantiacus]
  misc_feature (34)..(230): Homolog of NCBI NO: 37521587 NR Description: probable DNA-3-methyladenine glycosylase
  misc_feature (27)..(228): Homolog of NCBI NO: 23116389 NR Description: hypothetical protein [Desulfitobacterium
  misc_feature (5)..(234): Homolog of NCBI NO: 15230333 NR Description: putative DNA-3-methyladenine glycosidase; protein
  misc_feature (1)..(285): Homolog of NCBI NO: 5091600 NR Description: This gene is a member of PF|01332 Alkylbase DNA
  misc_feature (34)..(227): Homolog of NCBI NO: 22971879 NR Description: hypothetical protein [Chloroflexus aurantiacus]
  misc_feature (27)..(228): Homolog of NCBI NO: 23116389 NR Description: hypothetical protein [Desulfitobacterium
  misc_feature (1)..(285): Homolog of NCBI NO: 5091600 NR Description: This gene is a member of PF|01332 Alkylbase DNA
  misc_feature (1)..(290): Homolog of NCBI NO: 18410802 NR Description: 3-methyladenine DNA glycosylase, putative
  misc_feature (1)..(285): Homolog of NCBI NO: 25406423 NR Description: hypothetical protein F22H5.5 [imported] -
  misc_feature (1)..(290): Homolog of NCBI NO: 18394744 NR Description: Expressed protein
  misc_feature (1)..(290): Homolog of NCBI NO: 21593178 NR Description: unknown [Arabidopsis thaliana]
  misc_feature (1)..(290): Homolog of NCBI NO: 25402893 NR Description: protein F18O14.25 [imported] - Arabidopsis
  misc_feature (5)..(234): Homolog of NCBI NO: 15230333 NR Description: putative DNA-3-methyladenine glycosidase; protein
  misc_feature (34)..(230): Homolog of NCBI NO: 37521587 NR Description: probable DNA-3-methyladenine glycosylase
  misc_feature (1)..(290): Homolog of NCBI NO: 25402893 NR Description: protein F18O14.25 [imported] - Arabidopsis
  misc_feature (1)..(290): Homolog of NCBI NO: 21593178 NR Description: unknown [Arabidopsis thaliana]
  misc_feature (1)..(290): Homolog of NCBI NO: 18394744 NR Description: Expressed protein
  misc_feature (1)..(285): Homolog of NCBI NO: 25406423 NR Description: hypothetical protein F22H5.5 [imported] -
  misc_feature (1)..(290): Homolog of NCBI NO: 18410802 NR Description: 3-methyladenine DNA glycosylase, putative
MTTTKPATKSKLSQSRTVTVPRIQARSLTCEGELEAALHHLRSVDPLLASLIDIHPPPTFETFQTPFLALIRSILYQQLAAKAGNSIYTRFVALCGGENGVVPENVLPLTPQQLRQIGVSGRKASYLHDLARKYQNGILSDSGIVNMDEKSLFTMLTMVNGIGSWSVHMFMINSLHRPDVLPVNDLGVRKGVQMLNGMEDLPRPSKMEQLCEKWRPYRSVASWYLWRLIESKNTPPNAAAATAGAALSFPQLEDIQQQEQEQQHQQHQQQQPQLMDPLNNVFSIGAWGQT

SEQ ID NO: 29968 - DNA, 868 bp, Arabidopsis thaliana
  misc_feature (1)..(868): Ceres Seq. ID no. 13487046
  misc_feature: MA Experiment ID: 20000794 Result: Up-regulated in Transcription
  misc_feature: MA Experiment 20000794 PARAMETER Experiment Name: At_Petals_P Parameter: Age (day) Value: 23-25 days
  misc_feature: MA Experiment 20000794 PARAMETER Experiment Name: At_Petals_P Parameter: Plant Line Value: WS
  misc_feature: MA Experiment 20000794 PARAMETER Experiment Name: At_Petals_P Parameter: Tissue Value: Petals vs. Whole plant
aaacacgcttgagatatctttccccaaattcgaaagaaccctaattttttccgattccgattgatcaaacaagcgaatcccgattaactgatcgaggagatgggtaatacagataagctgatgaaccagatctttgaattgaaatttacgtcaaagtctctgcagaggcaagctaggaagtgcgaaaaagaggagagatcggagaagctcaaggtaaagaaagccattgagaaaggtaacatggatggtgctcggatctatgccgagaacgccattcgcaaacgcagcgagcagatgaactaccttcgtctctcttctcgattggacgctgttgttgctcgactcgatacccaggctaagatggctaccatcaccaaatcgatgaccaacattgtcaaatccctcgaatcgtctcttaccactggcaacttacagaagatgtctgagacgatggattcgtttgagaaacagtttgtgaacatggaagtccaagctgagttcatggataatgcaatggctggctctacttcattgtcgactccagaaggagaagtcaacagcttgatgcagcaagtagcagatgattacggtcttgaagtttctgttggactacctcagcctgctggtcatgccattcctaccaagactgaagagaaagttgaggaggatgatttaaccaggagacttgccgagcttaaagccagaggttaattagctaacctaacaaaaaaaaaaactgtatttggattcttcttttattgagatgttgatgctattaatccctgaacatgatgggaatgtttgtgtaaattgctcaccctggtacatgcttttgtttatataaaacctagagtgtgtttttacaatg

SEQ ID NO: 29969 - protein, 203 aa, Arabidopsis thaliana
  peptide (1)..(203): Ceres Seq. ID no. 13487047
  misc_feature (9)..(179): Pfam Name: SNF7 Pfam Description: SNF7
  misc_feature (1)..(200): Homolog of NCBI NO: 39644911 NR Description: CHMP1.5 protein [Homo sapiens]
  misc_feature (1)..(200): Homolog of NCBI NO: 17933108 NR Description: C18orf2 [Homo sapiens]
  misc_feature (9)..(202): Homolog of NCBI NO: 3789911 NR Description: developmental protein DG1118 [Dictyostelium
  misc_feature (1)..(203): Homolog of NCBI NO: 29367557 NR Description: development protein-like protein
  misc_feature (1)..(203): Homolog of NCBI NO: 30270581 NR Description: superal1 [Zea mays]
  misc_feature (1)..(203): Homolog of NCBI NO: 28916459 NR Description: putative developmental protein [Nicotiana
  misc_feature (1)..(203): Homolog of NCBI NO: 21537090 NR Description: developmental protein, putative [Arabidopsis
  misc_feature (1)..(203): Homolog of NCBI NO: 18410249 NR Description: developmental protein DG1118 -related
  misc_feature (1)..(202): Homolog of NCBI NO: 25518422 NR Description: hypothetical protein F11A6.7 - Arabidopsis
  misc_feature (1)..(203): Homolog of NCBI NO: 15220819 NR Description: developmental protein -related [Arabidopsis
MGNTDKLMNQIFELKFTSKSLQRQARKCEKEERSEKLKVKKAIEKGNMDGARIYAENAIRKRSEQMNYLRLSSRLDAVVARLDTQAKMATITKSMTNIVKSLESSLTTGNLQKMSETMDSFEKQFVNMEVQAEFMDNAMAGSTSLSTPEGEVNSLMQQVADDYGLEVSVGLPQPAGHAIPTKTEEKVEEDDLTRRLAELKARG

SEQ ID NO: 29970 - protein, 196 aa, Arabidopsis thaliana
  peptide (1)..(196): Ceres Seq. ID no. 13487048
  misc_feature (2)..(172): Pfam Name: SNF7 Pfam Description: SNF7
  misc_feature (1)..(193): Homolog of NCBI NO: 39644911 NR Description: CHMP1.5 protein [Homo sapiens]
  misc_feature (1)..(193): Homolog of NCBI NO: 17933108 NR Description: C18orf2 [Homo sapiens]
  misc_feature (2)..(195): Homolog of NCBI NO: 3789911 NR Description: developmental protein DG1118 [Dictyostelium
  misc_feature (1)..(196): Homolog of NCBI NO: 29367557 NR Description: development protein-like protein
  misc_feature (1)..(196): Homolog of NCBI NO: 30270581 NR Description: superal1 [Zea mays]
  misc_feature (1)..(196): Homolog of NCBI NO: 28916459 NR Description: putative developmental protein [Nicotiana
  misc_feature (1)..(196): Homolog of NCBI NO: 21537090 NR Description: developmental protein, putative [Arabidopsis
  misc_feature (1)..(196): Homolog of NCBI NO: 18410249 NR Description: developmental protein DG1118 -related
  misc_feature (1)..(195): Homolog of NCBI NO: 25518422 NR Description: hypothetical protein F11A6.7 - Arabidopsis
  misc_feature (1)..(196): Homolog of NCBI NO: 15220819 NR Description: developmental protein -related [Arabidopsis
MNQIFELKFTSKSLQRQARKCEKEERSEKLKVKKAIEKGNMDGARIYAENAIRKRSEQMNYLRLSSRLDAVVARLDTQAKMATITKSMTNIVKSLESSLTTGNLQKMSETMDSFEKQFVNMEVQAEFMDNAMAGSTSLSTPEGEVNSLMQQVADDYGLEVSVGLPQPAGHAIPTKTEEKVEEDDLTRRLAELKARG

SEQ ID NO: 29971 - protein, 156 aa, Arabidopsis thaliana
  peptide (1)..(156): Ceres Seq. ID no. 13487049
  misc_feature (1)..(132): Pfam Name: SNF7 Pfam Description: SNF7
  misc_feature (1)..(153): Homolog of NCBI NO: 39644911 NR Description: CHMP1.5 protein [Homo sapiens]
  misc_feature (1)..(153): Homolog of NCBI NO: 17933108 NR Description: C18orf2 [Homo sapiens]
  misc_feature (1)..(155): Homolog of NCBI NO: 3789911 NR Description: developmental protein DG1118 [Dictyostelium
  misc_feature (1)..(156): Homolog of NCBI NO: 29367557 NR Description: development protein-like protein
  misc_feature (1)..(156): Homolog of NCBI NO: 30270581 NR Description: superal1 [Zea mays]
  misc_feature (1)..(156): Homolog of NCBI NO: 28916459 NR Description: putative developmental protein [Nicotiana
  misc_feature (1)..(156): Homolog of NCBI NO: 21537090 NR Description: developmental protein, putative [Arabidopsis
  misc_feature (1)..(156): Homolog of NCBI NO: 18410249 NR Description: developmental protein DG1118 -related
  misc_feature (1)..(155): Homolog of NCBI NO: 25518422 NR Description: hypothetical protein F11A6.7 - Arabidopsis
  misc_feature (1)..(156): Homolog of NCBI NO: 15220819 NR Description: developmental protein -related [Arabidopsis
MDGARIYAENAIRKRSEQMNYLRLSSRLDAVVARLDTQAKMATITKSMTNIVKSLESSLTTGNLQKMSETMDSFEKQFVNMEVQAEFMDNAMAGSTSLSTPEGEVNSLMQQVADDYGLEVSVGLPQPAGHAIPTKTEEKVEEDDLTRRLAELKARG

SEQ ID NO: 29972 - DNA, 1566 bp, Arabidopsis thaliana
  misc_feature (1)..(1566): Ceres Seq. ID no. 13492623
  misc_feature: MA Experiment ID: 108462 Result: Up-regulated in Transcription
  misc_feature: MA Experiment 108462 PARAMETER Experiment Name: At_Germinating_Seeds_cDNA_P Parameter: Age (day) Value: 2 vs. 0
  misc_feature: MA Experiment 108462 PARAMETER Experiment Name: At_Germinating_Seeds_cDNA_P Parameter: Tissue Value: Germinating Seeds
  misc_feature: MA Experiment ID: 108464 Result: Up-regulated in Transcription
  misc_feature: MA Experiment 108464 PARAMETER Experiment Name: At_Germinating_Seeds_cDNA_P Parameter: Age (day) Value: 4 vs. 0
  misc_feature: MA Experiment 108464 PARAMETER Experiment Name: At_Germinating_Seeds_cDNA_P Parameter: Tissue Value: Germinating Seeds
  misc_feature: MA Experiment ID: 108573 Result: Up-regulated in Transcription
  misc_feature: MA Experiment 108573 PARAMETER Experiment Name: At_Drought_cDNA_P Parameter: Timepoint (hr) Value: 6
  misc_feature: MA Experiment 108573 PARAMETER Experiment Name: At_Drought_cDNA_P Parameter: Tissue Value: Aerial
  misc_feature: MA Experiment 108573 PARAMETER Experiment Name: At_Drought_cDNA_P Parameter: Treatment Value: Drought vs. No Drought
  misc_feature: MA Experiment ID: 108595 Result: Down-regulated in Transcription
  misc_feature: MA Experiment 108595 PARAMETER Experiment Name: At_Ler-pi_Ovule_cDNA_P Parameter: Plant Line Value: null
  misc_feature: MA Experiment ID: 20000111 Result: Down-regulated in Transcription
  misc_feature: MA Experiment 20000111 PARAMETER Experiment Name: At_42deg_Heat_cDNA_P Parameter: Temperature (deg C) Value: 42 vs. 22
  misc_feature: MA Experiment 20000111 PARAMETER Experiment Name: At_42deg_Heat_cDNA_P Parameter: Timepoint (hr) Value: 6
  misc_feature: MA Experiment 20000111 PARAMETER Experiment Name: At_42deg_Heat_cDNA_P Parameter: Tissue Value: Aerial
  misc_feature: MA Experiment ID: 20000113 Result: Down-regulated in Transcription
  misc_feature: MA Experiment 20000113 PARAMETER Experiment Name: At_42deg_Heat_cDNA_P Parameter: Temperature (deg C) Value: 42 vs. 22
  misc_feature: MA Experiment 20000113 PARAMETER Experiment Name: At_42deg_Heat_cDNA_P Parameter: Timepoint (hr) Value: 8
  misc_feature: MA Experiment 20000113 PARAMETER Experiment Name: At_42deg_Heat_cDNA_P Parameter: Tissue Value: Aerial
  misc_feature: MA Experiment ID: 20000173 Result: Down-regulated in Transcription
  misc_feature: MA Experiment 20000173 PARAMETER Experiment Name: At_42deg_Heat_P Parameter: Age (day) Value: 14
  misc_feature: MA Experiment 20000173 PARAMETER Experiment Name: At_42deg_Heat_P Parameter: Organism Value: A. thaliana
  misc_feature: MA Experiment 20000173 PARAMETER Experiment Name: At_42deg_Heat_P Parameter: Plant Line Value: WS
  misc_feature: MA Experiment 20000173 PARAMETER Experiment Name: At_42deg_Heat_P Parameter: Temperature (deg C) Value: 42 vs. 22
  misc_feature: MA Experiment 20000173 PARAMETER Experiment Name: At_42deg_Heat_P Parameter: Timepoint (hr) Value: 6
  misc_feature: MA Experiment 20000173 PARAMETER Experiment Name: At_42deg_Heat_P Parameter: Tissue Value: Aerial
  misc_feature: MA Experiment ID: 20000184 Result: Down-regulated in Transcription
  misc_feature: MA Experiment 20000184 PARAMETER Experiment Name: At_Shoots__P Parameter: Age (day) Value: 7
  misc_feature: MA Experiment 20000184 PARAMETER Experiment Name: At_Shoots__P Parameter: Tissue Value: Shoots vs. Whole Plant
  misc_feature: MA Experiment ID: 20000437 Result: Up-regulated in Transcription
  misc_feature: MA Experiment 20000437 PARAMETER Experiment Name: At_Drought_P Parameter: Age (day) Value: 8
  misc_feature: MA Experiment 20000437 PARAMETER Experiment Name: At_Drought_P Parameter: Organism Value: A. thaliana
  misc_feature: MA Experiment 20000437 PARAMETER Experiment Name: At_Drought_P Parameter: Plant Line Value: WS
  misc_feature: MA Experiment 20000437 PARAMETER Experiment Name: At_Drought_P Parameter: Timepoint (hr) Value: 24
  misc_feature: MA Experiment 20000437 PARAMETER Experiment Name: At_Drought_P Parameter: Tissue Value: Whole Plant
  misc_feature: MA Experiment 20000437 PARAMETER Experiment Name: At_Drought_P Parameter: Treatment Value: Drought vs. No Drought
  misc_feature: MA Experiment ID: 20000794 Result: Up-regulated in Transcription
  misc_feature: MA Experiment 20000794 PARAMETER Experiment Name: At_Petals_P Parameter: Age (day) Value: 23-25 days
  misc_feature: MA Experiment 20000794 PARAMETER Experiment Name: At_Petals_P Parameter: Plant Line Value: WS
  misc_feature: MA Experiment 20000794 PARAMETER Experiment Name: At_Petals_P Parameter: Tissue Value: Petals vs. Whole plant
agatattgatttagacggagatttcattatctatctctcaagtttgatttgcttctgctgtaacaaaaagatcacgatcgcaacttgtgtgtatgtgtgtgtgagagagagattcagatatggcttggttagctagatccatagcgaactcactcaagctcgatgaggaagatgaagatgatgataagcatctgaatcaacagccgtcggaatctgtatcggattcacagtctccacgaggcgttaaggaagacattagcgaacttaccaagaccttgagaacccaattttggggtgtagcttcgttcctctcgcaaccttcttcatctccggatcttcaggagagaaatcaaactcccgatcatccggaggaagatgaggatctaatcgctgggattaagaacgatttcgctgagattggtgggagattcaggactgggatttcgaaactatctgggaacttacctgtgtctgagttcacaaagatcgcttcgaatttcttacaattgagttcagaagatgtggatccgaaagattacgacgtaatcggagttacagaggaattagttgcgtttgtgaaggatcttgcgatgcatcctgagacttggttggattttcctttacctgatgacgacgatagctttgatgactttgaattggccgatgctcaatacgagcacgctttagctgtagaaaggctagcaccgagcttggcttctttgaggattgagctttgccctgaatatatgactgagaattgcttctggaggatttactttgttcttgtgcatcctaaactcagtaaagaccatgccttgcttctctccactcctcaggtactcgaagcaagatcaatgttatctcaggaactacagaaacgaagcaaattacctgtagaagcagggagttctgaagctaatactgtcattgtggaacctcttactgtgcctccttcaccagaaacagcagctgttaaaatcgtaaatccagtcgagtcatctgacgttgaaacagacaagcaccctattgagagcaaagagatacaaattgttgacaaatctgtcattgaagaaagaagcacatccactgcttcttcatctagatttattaatgtgcaagtggatgatgaagacgacgacgatgcagatgattggttgaatgatgaagagacttcatcagttagcgccattggaggaagatcaaccacaaatcatccttttggtgaagacgaagaagatgtatcattcagtgatctagaagaagaagacgataacgaaggagacgtgaaagtgagttacaagaaccttactaactctggttctgattcttcagacaaaaaatcaccagattgggttcagctaaaagaggtaaaagagaagaaaaaatcaaacgactggcttgatgttgatgcagtgtgatgtgatctccaatgtttcttttggcaatatataacatttaaatctacgtcttgcaaatatctgatgctaccgaaatttgttgtgaataatttttatattccattttatcaaaacctatatagccgtagtaaaaaaaactgcaatgttt

SEQ ID NO: 29973 - protein, 432 aa, Arabidopsis thaliana
  peptide (1)..(432): Ceres Seq. ID no. 13492624
  misc_feature (177)..(223): Pfam Name: BSD domain Pfam Description: BSD domain
  misc_feature (177)..(402): Homolog of NCBI NO: 6573740 NR Description: F20B24.15 [Arabidopsis thaliana]
  misc_feature (32)..(402): Homolog of NCBI NO: 18391195 NR Description: expressed protein [Arabidopsis thaliana]
  misc_feature (32)..(402): Homolog of NCBI NO: 21555533 NR Description: unknown [Arabidopsis thaliana]
  misc_feature (1)..(407): Homolog of NCBI NO: 34909848 NR Description: OSJNBb0053G03.5 [Oryza sativa (japonica
  misc_feature (26)..(148): Homolog of NCBI NO: 28273391 NR Description: putative BSD domain containing protein
  misc_feature (133)..(383): Homolog of NCBI NO: 28273391 NR Description: putative BSD domain containing protein
  misc_feature (26)..(394): Homolog of NCBI NO: 15229611 NR Description: expressed protein [Arabidopsis thaliana]
  misc_feature (1)..(176): Homolog of NCBI NO: 7486518 NR Description: hypothetical protein F6H11.10 - Arabidopsis
  misc_feature (173)..(432): Homolog of NCBI NO: 7486518 NR Description: hypothetical protein F6H11.10 - Arabidopsis
  misc_feature (1)..(432): Homolog of NCBI NO: 18425006 NR Description: expressed protein [Arabidopsis thaliana]
MAWLARSIANSLKLDEEDEDDDKHLNQQPSESVSDSQSPRGVKEDISELTKTLRTQFWGVASFLSQPSSSPDLQERNQTPDHPEEDEDLIAGIKNDFAEIGGRFRTGISKLSGNLPVSEFTKIASNFLQLSSEDVDPKDYDVIGVTEELVAFVKDLAMHPETWLDFPLPDDDDSFDDFELADAQYEHALAVERLAPSLASLRIELCPEYMTENCFWRIYFVLVHPKLSKDHALLLSTPQVLEARSMLSQELQKRSKLPVEAGSSEANTVIVEPLTVPPSPETAAVKIVNPVESSDVETDKHPIESKEIQIVDKSVIEERSTSTASSSRFINVQVDDEDDDDADDWLNDEETSSVSAIGGRSTTNHPFGEDEEDVSFSDLEEEDDNEGDVKVSYKNLTNSGSDSSDKKSPDWVQLKEVKEKKKSNDWLDVDAV

SEQ ID NO: 29974 - protein, 275 aa, Arabidopsis thaliana
  peptide (1)..(275): Ceres Seq. ID no. 13492625
  misc_feature (20)..(66): Pfam Name: BSD domain Pfam Description: BSD domain
  misc_feature (1)..(15): Homolog of NCBI NO: 6573740 NR Description: F20B24.15 [Arabidopsis thaliana]
  misc_feature (20)..(245): Homolog of NCBI NO: 6573740 NR Description: F20B24.15 [Arabidopsis thaliana]
  misc_feature (1)..(245): Homolog of NCBI NO: 18391195 NR Description: expressed protein [Arabidopsis thaliana]
  misc_feature (1)..(245): Homolog of NCBI NO: 21555533 NR Description: unknown [Arabidopsis thaliana]
  misc_feature (1)..(250): Homolog of NCBI NO: 34909848 NR Description: OSJNBb0053G03.5 [Oryza sativa (japonica
  misc_feature (1)..(226): Homolog of NCBI NO: 28273391 NR Description: putative BSD domain containing protein
  misc_feature (1)..(237): Homolog of NCBI NO: 15229611 NR Description: expressed protein [Arabidopsis thaliana]
  misc_feature (1)..(19): Homolog of NCBI NO: 7486518 NR Description: hypothetical protein F6H11.10 - Arabidopsis
  misc_feature (16)..(275): Homolog of NCBI NO: 7486518 NR Description: hypothetical protein F6H11.10 - Arabidopsis
  misc_feature (1)..(275): Homolog of NCBI NO: 18425006 NR Description: expressed protein [Arabidopsis thaliana]
MHPETWLDFPLPDDDDSFDDFELADAQYEHALAVERLAPSLASLRIELCPEYMTENCFWRIYFVLVHPKLSKDHALLLSTPQVLEARSMLSQELQKRSKLPVEAGSSEANTVIVEPLTVPPSPETAAVKIVNPVESSDVETDKHPIESKEIQIVDKSVIEERSTSTASSSRFINVQVDDEDDDDADDWLNDEETSSVSAIGGRSTTNHPFGEDEEDVSFSDLEEEDDNEGDVKVSYKNLTNSGSDSSDKKSPDWVQLKEVKEKKKSNDWLDVDAV

SEQ ID NO: 29975 - protein, 223 aa, Arabidopsis thaliana
  peptide (1)..(223): Ceres Seq. ID no. 13492626
  misc_feature (1)..(127): Homolog of NCBI NO: 18396945 NR Description: expressed protein [Arabidopsis thaliana]
  misc_feature (1)..(127): Homolog of NCBI NO: 21592796 NR Description: unknown [Arabidopsis thaliana]
  misc_feature (1)..(193): Homolog of NCBI NO: 6573740 NR Description: F20B24.15 [Arabidopsis thaliana]
  misc_feature (1)..(193): Homolog of NCBI NO: 18391195 NR Description: expressed protein [Arabidopsis thaliana]
  misc_feature (1)..(193): Homolog of NCBI NO: 21555533 NR Description: unknown [Arabidopsis thaliana]
  misc_feature (1)..(198): Homolog of NCBI NO: 34909848 NR Description: OSJNBb0053G03.5 [Oryza sativa (japonica
  misc_feature (1)..(174): Homolog of NCBI NO: 28273391 NR Description: putative BSD domain containing protein
  misc_feature (1)..(185): Homolog of NCBI NO: 15229611 NR Description: expressed protein [Arabidopsis thaliana]
  misc_feature (1)..(223): Homolog of NCBI NO: 7486518 NR Description: hypothetical protein F6H11.10 - Arabidopsis
  misc_feature (1)..(223): Homolog of NCBI NO: 18425006 NR Description: expressed protein [Arabidopsis thaliana]
MTENCFWRIYFVLVHPKLSKDHALLLSTPQVLEARSMLSQELQKRSKLPVEAGSSEANTVIVEPLTVPPSPETAAVKIVNPVESSDVETDKHPIESKEIQIVDKSVIEERSTSTASSSRFINVQVDDEDDDDADDWLNDEETSSVSAIGGRSTTNHPFGEDEEDVSFSDLEEEDDNEGDVKVSYKNLTNSGSDSSDKKSPDWVQLKEVKEKKKSNDWLDVDAV

SEQ ID NO: 29976 - DNA, 862 bp, Arabidopsis thaliana
  misc_feature (1)..(862): Ceres Seq. ID no. 12332832
  misc_feature: MA Experiment ID: 108488 Result: Down-regulated in Transcription
aattttagctttctgtctattcaccagattctctctattcgattctccctttacttcttctcgtctctcttctctgctcgtcagatctcaaaatcaatcggatatcgaaaccacaacttcatcaattatgactcttggctcaggaggatctagcgttgttgttccgaggaattttcggttgttggaggagcttgaacgtggggagaaaggtattggggatggaactgtgagctatggaatggatgatggagatgacatctatatgcgttcttggactggcaccatcatcggtcctcacaacactgttcatgaaggtagaatctatcagttgaagctcttttgtgacaaagattacccggagaaacctccaactgtccgattccattcacgtgtcaacatggcttgtgtcaaccacgaaacaggagtggtggatcctaagaaatttgggctacttgcaaactggcaaagagagtacacaatggaggatatactggtacagttgaagaaggaaatgtctacgtcgcataaccgtaagcttgttcaacctccggaaggtacttgcttctagttacttctggaatcttcttctggtttgctagaaaatcattgccccttctaataccaaagtatgtatctgggggtcctccattgtcgttctcaacgcttttttttttttaattcatcaaaaaatggtctgtgtggatggtatggtgatgatgatgatgttgtccgattgatcatctgaagttttatcattgtgtgcaaatatcaaaaacagcttctcttcctcactccatgtgttcaatcttttgaatttaacattttgtgtcagccctttttttatatataaatgaaatctgct

SEQ ID NO: 29977 - protein, 188 aa, Arabidopsis thaliana
  peptide (1)..(188): Ceres Seq. ID no. 12332833
  misc_feature (45)..(185): Homolog of NCBI NO: 25326240 NR Description: protein F26F24.10 [imported] - Arabidopsis
  misc_feature (54)..(185): Homolog of NCBI NO: 13324790 NR Description: putative DNA-binding protein [Oryza sativa]
  misc_feature (45)..(185): Homolog of NCBI NO: 18409647 NR Description: E2, ubiquitin-conjugating enzyme, putative
  misc_feature (45)..(185): Homolog of NCBI NO: 21593918 NR Description: E2, ubiquitin-conjugating enzyme, putative
  misc_feature (45)..(185): Homolog of NCBI NO: 18395221 NR Description: E2, ubiquitin-conjugating enzyme, putative
  misc_feature (49)..(188): Homolog of NCBI NO: 2982253 NR Description: CROC-1-like protein [Picea mariana]
  misc_feature (43)..(188): Homolog of NCBI NO: 30686662 NR Description: ubiquitin-conjugating enzyme family [Arabidopsis
  misc_feature (43)..(188): Homolog of NCBI NO: 18404032 NR Description: E2, ubiquitin-conjugating enzyme, putative
  misc_feature (43)..(188): Homolog of NCBI NO: 30693656 NR Description: ubiquitin-conjugating enzyme family [Arabidopsis
  misc_feature (43)..(188): Homolog of NCBI NO: 18409633 NR Description: E2, ubiquitin-conjugating enzyme, putative
ILAFCLFTRFSLFDSPFTSSRLSSLLVRSQNQSDIETTTSSIMTLGSGGSSVVVPRNFRLLEELERGEKGIGDGTVSYGMDDGDDIYMRSWTGTIIGPHNTVHEGRIYQLKLFCDKDYPEKPPTVRFHSRVNMACVNHETGVVDPKKFGLLANWQREYTMEDILVQLKKEMSTSHNRKLVQPPEGTCF

SEQ ID NO: 29978 - protein, 146 aa, Arabidopsis thaliana
  peptide (1)..(146): Ceres Seq. ID no. 12332834
  misc_feature (3)..(143): Homolog of NCBI NO: 25326240 NR Description: protein F26F24.10 [imported] - Arabidopsis
  misc_feature (12)..(143): Homolog of NCBI NO: 13324790 NR Description: putative DNA-binding protein [Oryza sativa]
  misc_feature (3)..(143): Homolog of NCBI NO: 18409647 NR Description: E2, ubiquitin-conjugating enzyme, putative
  misc_feature (3)..(143): Homolog of NCBI NO: 21593918 NR Description: E2, ubiquitin-conjugating enzyme, putative
  misc_feature (3)..(143): Homolog of NCBI NO: 18395221 NR Description: E2, ubiquitin-conjugating enzyme, putative
  misc_feature (7)..(146): Homolog of NCBI NO: 2982253 NR Description: CROC-1-like protein [Picea mariana]
  misc_feature (1)..(146): Homolog of NCBI NO: 30686662 NR Description: ubiquitin-conjugating enzyme family [Arabidopsis
  misc_feature (1)..(146): Homolog of NCBI NO: 18404032 NR Description: E2, ubiquitin-conjugating enzyme, putative
  misc_feature (1)..(146): Homolog of NCBI NO: 30693656 NR Description: ubiquitin-conjugating enzyme family [Arabidopsis
  misc_feature (1)..(146): Homolog of NCBI NO: 18409633 NR Description: E2, ubiquitin-conjugating enzyme, putative
MTLGSGGSSVVVPRNFRLLEELERGEKGIGDGTVSYGMDDGDDIYMRSWTGTIIGPHNTVHEGRIYQLKLFCDKDYPEKPPTVRFHSRVNMACVNHETGVVDPKKFGLLANWQREYTMEDILVQLKKEMSTSHNRKLVQPPEGTCF

SEQ ID NO: 29979 - protein, 109 aa, Arabidopsis thaliana
  peptide (1)..(109): Ceres Seq. ID no. 12332835
  misc_feature (1)..(106): Homolog of NCBI NO: 25326240 NR Description: protein F26F24.10 [imported] - Arabidopsis
  misc_feature (1)..(106): Homolog of NCBI NO: 13324790 NR Description: putative DNA-binding protein [Oryza sativa]
  misc_feature (1)..(106): Homolog of NCBI NO: 18409647 NR Description: E2, ubiquitin-conjugating enzyme, putative
  misc_feature (1)..(106): Homolog of NCBI NO: 21593918 NR Description: E2, ubiquitin-conjugating enzyme, putative
  misc_feature (1)..(106): Homolog of NCBI NO: 18395221 NR Description: E2, ubiquitin-conjugating enzyme, putative
  misc_feature (1)..(109): Homolog of NCBI NO: 2982253 NR Description: CROC-1-like protein [Picea mariana]
  misc_feature (1)..(109): Homolog of NCBI NO: 30686662 NR Description: ubiquitin-conjugating enzyme family [Arabidopsis
  misc_feature (1)..(109): Homolog of NCBI NO: 18404032 NR Description: E2, ubiquitin-conjugating enzyme, putative
  misc_feature (1)..(109): Homolog of NCBI NO: 30693656 NR Description: ubiquitin-conjugating enzyme family [Arabidopsis
  misc_feature (1)..(109): Homolog of NCBI NO: 18409633 NR Description: E2, ubiquitin-conjugating enzyme, putative
MDDGDDIYMRSWTGTIIGPHNTVHEGRIYQLKLFCDKDYPEKPPTVRFHSRVNMACVNHETGVVDPKKFGLLANWQREYTMEDILVQLKKEMSTSHNRKLVQPPEGTCF

SEQ ID NO: 29980 - DNA, 1592 bp, Arabidopsis thaliana
  misc_feature (1)..(1592): Ceres Seq. ID no. 13488446
  misc_feature: MA Experiment ID: 108461 Result: Down-regulated in Transcription
  misc_feature: MA Experiment 108461 PARAMETER Experiment Name: At_Germinating_Seeds_cDNA_P Parameter: Age (day) Value: 1 vs. 0
  misc_feature: MA Experiment 108461 PARAMETER Experiment Name: At_Germinating_Seeds_cDNA_P Parameter: Tissue Value: Germinating Seeds
  misc_feature: MA Experiment ID: 108462 Result: Down-regulated in Transcription
  misc_feature: MA Experiment 108462 PARAMETER Experiment Name: At_Germinating_Seeds_cDNA_P Parameter: Age (day) Value: 2 vs. 0
  misc_feature: MA Experiment 108462 PARAMETER Experiment Name: At_Germinating_Seeds_cDNA_P Parameter: Tissue Value: Germinating Seeds
  misc_feature: MA Experiment ID: 108463 Result: Down-regulated in Transcription
  misc_feature: MA Experiment 108463 PARAMETER Experiment Name: At_Germinating_Seeds_cDNA_P Parameter: Age (day) Value: 3 vs. 0
  misc_feature: MA Experiment 108463 PARAMETER Experiment Name: At_Germinating_Seeds_cDNA_P Parameter: Tissue Value: Germinating Seeds
  misc_feature: MA Experiment ID: 108585 Result: Up-regulated in Transcription
  misc_feature: MA Experiment 108585 PARAMETER Experiment Name: At_5mM_NaNP_cDNA_P Parameter: Timepoint (hr) Value: 6
  misc_feature: MA Experiment 108585 PARAMETER Experiment Name: At_5mM_NaNP_cDNA_P Parameter: Tissue Value: Aerial
  misc_feature: MA Experiment 108585 PARAMETER Experiment Name: At_5mM_NaNP_cDNA_P Parameter: Treatment Value: null
  misc_feature: MA Experiment ID: 20000180 Result: Down-regulated in Transcription
  misc_feature: MA Experiment 20000180 PARAMETER Experiment Name: At_Germinating_Seeds_P Parameter: Age (hr) Value: 24 vs. 0
  misc_feature: MA Experiment 20000180 PARAMETER Experiment Name: At_Germinating_Seeds_P Parameter: Tissue Value: Germinating Seeds
  misc_feature: MA Experiment ID: 20000235 Result: Up-regulated in Transcription
  misc_feature: MA Experiment 20000235 PARAMETER Experiment Name: At_Siliques_P Parameter: Age (day) Value: 21
  misc_feature: MA Experiment 20000235 PARAMETER Experiment Name: At_Siliques_P Parameter: Organism Value: A. thaliana
  misc_feature: MA Experiment 20000235 PARAMETER Experiment Name: At_Siliques_P Parameter: Plant Line Value: WS
  misc_feature: MA Experiment 20000235 PARAMETER Experiment Name: At_Siliques_P Parameter: Tissue Value: 5-10mm Siliques vs. Whole Plant
  misc_feature: MA Experiment ID: 20000265 Result: Up-regulated in Transcription
  misc_feature: MA Experiment 20000265 PARAMETER Experiment Name: At_Open_Flower_P Parameter: Age (day) Value: 21
  misc_feature: MA Experiment 20000265 PARAMETER Experiment Name: At_Open_Flower_P Parameter: Plant Line Value: WS
  misc_feature: MA Experiment 20000265 PARAMETER Experiment Name: At_Open_Flower_P Parameter: Tissue Value: Closed Flower vs. Whole Plant
  misc_feature: MA Experiment ID: 20000495 Result: Up-regulated in Transcription
  misc_feature: MA Experiment 20000495 PARAMETER Experiment Name: At_Guard_Cells_P Parameter: Harvest Date Value: 8/2/2002
  misc_feature: MA Experiment 20000495 PARAMETER Experiment Name: At_Guard_Cells_P Parameter: Organism Value: A. thaliana
  misc_feature: MA Experiment 20000495 PARAMETER Experiment Name: At_Guard_Cells_P Parameter: Tissue Value: Guard Cells vs. Leaves
  misc_feature: MA Experiment ID: 20000794 Result: Up-regulated in Transcription
  misc_feature: MA Experiment 20000794 PARAMETER Experiment Name: At_Petals_P Parameter: Age (day) Value: 23-25 days
  misc_feature: MA Experiment 20000794 PARAMETER Experiment Name: At_Petals_P Parameter: Plant Line Value: WS
  misc_feature: MA Experiment 20000794 PARAMETER Experiment Name: At_Petals_P Parameter: Tissue Value: Petals vs. Whole plant
  misc_feature: MA Experiment ID: 20001451 Result: Up-regulated in Transcription
  misc_feature: MA Experiment 20001451 PARAMETER Experiment Name: At_Far-red-induction_P Parameter: Age (day) Value: 7
  misc_feature: MA Experiment 20001451 PARAMETER Experiment Name: At_Far-red-induction_P Parameter: Light Value: Far-red vs. White
  misc_feature: MA Experiment 20001451 PARAMETER Experiment Name: At_Far-red-induction_P Parameter: Organism Value: A. thaliana
  misc_feature: MA Experiment 20001451 PARAMETER Experiment Name: At_Far-red-induction_P Parameter: Plant Line Value: Columbia
  misc_feature: MA Experiment 20001451 PARAMETER Experiment Name: At_Far-red-induction_P Parameter: Timepoint (hr) Value: 24
  misc_feature: MA Experiment 20001451 PARAMETER Experiment Name: At_Far-red-induction_P Parameter: Tissue Value: Whole Plant
atctgaagatcgtagaagaaatcgagaaaacgctttgtaccaattagaaaccctagcgagcggaggaaggagacaaagaacgagacttttgagagattggagatttcaattttgagatcaaatcttgaaatcaacaaataggagaaagatttagtgatgggtaagaagaagaagagagctacagagaaggtgtggtgttattactgcgatagagagtttgatgatgagaagattcttgtgcagcatcagaaagctaagcactttaagtgtcatgtctgtcataagaagctttctacagctagtggcatggtgattcatgttcttcaggttcataaagagaatgttacaaaagttcctaatgctaaagacggtcgagattcaactgatattgaaatatatggaatgcaaggaattccaccccatgtcttgactgctcattatggagaagaagaggatgagcctccagccaaagttgcaaaagttgagattccttctgcccctcttggtggtgtagttcctagaccatatggaatggtatatccgcctcaacaagtacctggtgctgtacctgcacgaccaatgtattatccgggtcctcctatgcgtcatcctgctcctgtatggcaaatgccacctcctcgtccgcaacaatggtatcctcaaaatccagctctttctgtacctccagctgcccatttagggtatcgaccacaaccactttttcctgttcaaaatatggggatgactccaactccaacctcagctcctgccatacaaccatcaccagtcactggagtaactcctcctggaattcctacatcatcacctgcaatgccagttcctcaacctctgttccctgttgtgaataacagcattccttctcaagctccaccattttctgctcctctgcctgttggtggggctcagcaaccatctcatgcagatgctttaggatcagcagatgcttatccgcctaacaattctattccaggtgggactaatgctcattcttatgcctctggcccaaacactagcggtccttcaattggtccacctcctgtaattgcaaacaaagctcctagcaatcagcctaatgaggtctatcttgtatgggatgatgaagcgatgtctatggaggaaagaagaatgtccttaccaaaatacaaagtgcacgatgaaaccagccagatgaactcgataaatgcagcgatagacagacgaatctcagagagtaggcttgctgggcggatggcgttttagaatttggcaccaaaccaaaccagcgtcaaagaaaaggcgatatggatgaaggctttgttacaacaacaagtcttcactcacttttgttcagatactgaatttatgatctgattttaagttattaactttccatctgttgtattctttagccaggtgagttagtttaccattacattgtttagggatctcagagatgttttttctcagaagtttagtcctttttttttttggtcgttggagacttggaggaagaactttgtctccttttcttctgaattgatcaaagtattatattatacagattcacccaaaatgtttgcaccatgttgttc

SEQ ID NO: 29981 - protein, 367 aa, Arabidopsis thaliana
  peptide (1)..(367): Ceres Seq. ID no. 13488447
  misc_feature (36)..(59): Pfam Name: Zinc finger, C2H2 type Pfam Description: Zinc finger, C2H2 type
  misc_feature (1)..(308): Homolog of NCBI NO: 4508017 NR Description: zinc finger protein 207 [Homo sapiens]
  misc_feature (1)..(223): Homolog of NCBI NO: 17538208 NR Description: Putative nuclear protein of eukaryotic origin
  misc_feature (1)..(337): Homolog of NCBI NO: 29179476 NR Description: Similar to zinc finger protein 207 [Danio rerio]
  misc_feature (1)..(341): Homolog of NCBI NO: 19921442 NR Description: CG17912-PA [Drosophila melanogaster]
  misc_feature (1)..(333): Homolog of NCBI NO: 17538210 NR Description: Putative nuclear protein of eukaryotic origin
  misc_feature (1)..(333): Homolog of NCBI NO: 39593757 NR Description: Hypothetical protein CBG06068 [Caenorhabditis
  misc_feature (1)..(367): Homolog of NCBI NO: 9755379 NR Description: F17F8.14 [Arabidopsis thaliana]
  misc_feature (1)..(367): Homolog of NCBI NO: 14517410 NR Description: At1g30970/F17F8_14 [Arabidopsis thaliana]
  misc_feature (1)..(367): Homolog of NCBI NO: 21553740 NR Description: putative zinc finger protein [Arabidopsis
  misc_feature (1)..(367): Homolog of NCBI NO: 18397747 NR Description: zinc finger protein -related [Arabidopsis
MGKKKKRATEKVWCYYCDREFDDEKILVQHQKAKHFKCHVCHKKLSTASGMVIHVLQVHKENVTKVPNAKDGRDSTDIEIYGMQGIPPHVLTAHYGEEEDEPPAKVAKVEIPSAPLGGVVPRPYGMVYPPQQVPGAVPARPMYYPGPPMRHPAPVWQMPPPRPQQWYPQNPALSVPPAAHLGYRPQPLFPVQNMGMTPTPTSAPAIQPSPVTGVTPPGIPTSSPAMPVPQPLFPVVNNSIPSQAPPFSAPLPVGGAQQPSHADALGSADAYPPNNSIPGGTNAHSYASGPNTSGPSIGPPPVIANKAPSNQPNEVYLVWDDEAMSMEERRMSLPKYKVHDETSQMNSINAAIDRRISESRLAGRMAF

SEQ ID NO: 29982 - protein, 317 aa, Arabidopsis thaliana
  peptide (1)..(317): Ceres Seq. ID no. 13488448
  misc_feature (62)..(248): Pfam Name: Single-stranded DNA binding protein, SSDP Pfam Description: Single-stranded DNA binding protein, SSDP
  misc_feature (1)..(258): Homolog of NCBI NO: 4508017 NR Description: zinc finger protein 207 [Homo sapiens]
  misc_feature (1)..(173): Homolog of NCBI NO: 17538208 NR Description: Putative nuclear protein of eukaryotic origin
  misc_feature (1)..(287): Homolog of NCBI NO: 29179476 NR Description: Similar to zinc finger protein 207 [Danio rerio]
  misc_feature (1)..(291): Homolog of NCBI NO: 19921442 NR Description: CG17912-PA [Drosophila melanogaster]
  misc_feature (1)..(283): Homolog of NCBI NO: 17538210 NR Description: Putative nuclear protein of eukaryotic origin
  misc_feature (1)..(283): Homolog of NCBI NO: 39593757 NR Description: Hypothetical protein CBG06068 [Caenorhabditis
  misc_feature (1)..(317): Homolog of NCBI NO: 9755379 NR Description: F17F8.14 [Arabidopsis thaliana]
  misc_feature (1)..(317): Homolog of NCBI NO: 14517410 NR Description: At1g30970/F17F8_14 [Arabidopsis thaliana]
  misc_feature (1)..(317): Homolog of NCBI NO: 21553740 NR Description: putative zinc finger protein [Arabidopsis
  misc_feature (1)..(317): Homolog of NCBI NO: 18397747 NR Description: zinc finger protein -related [Arabidopsis
MVIHVLQVHKENVTKVPNAKDGRDSTDIEIYGMQGIPPHVLTAHYGEEEDEPPAKVAKVEIPSAPLGGVVPRPYGMVYPPQQVPGAVPARPMYYPGPPMRHPAPVWQMPPPRPQQWYPQNPALSVPPAAHLGYRPQPLFPVQNMGMTPTPTSAPAIQPSPVTGVTPPGIPTSSPAMPVPQPLFPVVNNSIPSQAPPFSAPLPVGGAQQPSHADALGSADAYPPNNSIPGGTNAHSYASGPNTSGPSIGPPPVIANKAPSNQPNEVYLVWDDEAMSMEERRMSLPKYKVHDETSQMNSINAAIDRRISESRLAGRMAF

SEQ ID NO: 29983 - protein, 285 aa, Arabidopsis thaliana
  peptide (1)..(285): Ceres Seq. ID no. 13488449
  misc_feature (30)..(216): Pfam Name: Single-stranded DNA binding protein, SSDP Pfam Description: Single-stranded DNA binding protein, SSDP
  misc_feature (1)..(226): Homolog of NCBI NO: 4508017 NR Description: zinc finger protein 207 [Homo sapiens]
  misc_feature (1)..(141): Homolog of NCBI NO: 17538208 NR Description: Putative nuclear protein of eukaryotic origin
  misc_feature (1)..(255): Homolog of NCBI NO: 29179476 NR Description: Similar to zinc finger protein 207 [Danio rerio]
  misc_feature (1)..(259): Homolog of NCBI NO: 19921442 NR Description: CG17912-PA [Drosophila melanogaster]
  misc_feature (1)..(251): Homolog of NCBI NO: 17538210 NR Description: Putative nuclear protein of eukaryotic origin
  misc_feature (1)..(251): Homolog of NCBI NO: 39593757 NR Description: Hypothetical protein CBG06068 [Caenorhabditis
  misc_feature (1)..(285): Homolog of NCBI NO: 9755379 NR Description: F17F8.14 [Arabidopsis thaliana]
  misc_feature (1)..(285): Homolog of NCBI NO: 14517410 NR Description: At1g30970/F17F8_14 [Arabidopsis thaliana]
  misc_feature (1)..(285): Homolog of NCBI NO: 21553740 NR Description: putative zinc finger protein [Arabidopsis
  misc_feature (1)..(285): Homolog of NCBI NO: 18397747 NR Description: zinc finger protein -related [Arabidopsis
MQGIPPHVLTAHYGEEEDEPPAKVAKVEIPSAPLGGVVPRPYGMVYPPQQVPGAVPARPMYYPGPPMRHPAPVWQMPPPRPQQWYPQNPALSVPPAAHLGYRPQPLFPVQNMGMTPTPTSAPAIQPSPVTGVTPPGIPTSSPAMPVPQPLFPVVNNSIPSQAPPFSAPLPVGGAQQPSHADALGSADAYPPNNSIPGGTNAHSYASGPNTSGPSIGPPPVIANKAPSNQPNEVYLVWDDEAMSMEERRMSLPKYKVHDETSQMNSINAAIDRRISESRLAGRMAF

SEQ ID NO: 29984 - DNA, 1708 bp, Arabidopsis thaliana
  misc_feature (1)..(1708): Ceres Seq. ID no. 12603224
  misc_feature: MA Experiment ID: 108488 Result: Down-regulated in Transcription
  misc_feature: MA Experiment ID: 108501 Result: Down-regulated in Transcription
  misc_feature: MA Experiment 108501 PARAMETER Experiment Name: At_ap2_floral_buds_cDNA_P Parameter: Plant Line Value: ap2 (Ler.)
  misc_feature: MA Experiment 108501 PARAMETER Experiment Name: At_ap2_floral_buds_cDNA_P Parameter: Tissue Value: Closed Flower
  misc_feature: MA Experiment ID: 108594 Result: Down-regulated in Transcription
  misc_feature: MA Experiment 108594 PARAMETER Experiment Name: At_Ler-rhl_Root_cDNA_P Parameter: Plant Line Value: null
  misc_feature: MA Experiment ID: 20000111 Result: Down-regulated in Transcription
  misc_feature: MA Experiment 20000111 PARAMETER Experiment Name: At_42deg_Heat_cDNA_P Parameter: Temperature (deg C) Value: 42 vs. 22
  misc_feature: MA Experiment 20000111 PARAMETER Experiment Name: At_42deg_Heat_cDNA_P Parameter: Timepoint (hr) Value: 6
  misc_feature: MA Experiment 20000111 PARAMETER Experiment Name: At_42deg_Heat_cDNA_P Parameter: Tissue Value: Aerial
  misc_feature: MA Experiment ID: 20000113 Result: Down-regulated in Transcription
  misc_feature: MA Experiment 20000113 PARAMETER Experiment Name: At_42deg_Heat_cDNA_P Parameter: Temperature (deg C) Value: 42 vs. 22
  misc_feature: MA Experiment 20000113 PARAMETER Experiment Name: At_42deg_Heat_cDNA_P Parameter: Timepoint (hr) Value: 8
  misc_feature: MA Experiment 20000113 PARAMETER Experiment Name: At_42deg_Heat_cDNA_P Parameter: Tissue Value: Aerial
  misc_feature: MA Experiment ID: 20000173 Result: Down-regulated in Transcription
  misc_feature: MA Experiment 20000173 PARAMETER Experiment Name: At_42deg_Heat_P Parameter: Age (day) Value: 14
  misc_feature: MA Experiment 20000173 PARAMETER Experiment Name: At_42deg_Heat_P Parameter: Organism Value: A. thaliana
  misc_feature: MA Experiment 20000173 PARAMETER Experiment Name: At_42deg_Heat_P Parameter: Plant Line Value: WS
  misc_feature: MA Experiment 20000173 PARAMETER Experiment Name: At_42deg_Heat_P Parameter: Temperature (deg C) Value: 42 vs. 22
  misc_feature: MA Experiment 20000173 PARAMETER Experiment Name: At_42deg_Heat_P Parameter: Timepoint (hr) Value: 6
  misc_feature: MA Experiment 20000173 PARAMETER Experiment Name: At_42deg_Heat_P Parameter: Tissue Value: Aerial
  misc_feature: MA Experiment ID: 20000224 Result: Up-regulated in Transcription
  misc_feature: MA Experiment ID: 20000227 Result: Down-regulated in Transcription
  misc_feature: MA Experiment 20000227 PARAMETER Experiment Name: At_Root-Tips-vs-Tops_P Parameter: Tissue Value: Root Tips vs. Root Tops
  misc_feature: MA Experiment ID: 20000234 Result: Down-regulated in Transcription
  misc_feature: MA Experiment 20000234 PARAMETER Experiment Name: At_Siliques_P Parameter: Age (day) Value: 21
  misc_feature: MA Experiment 20000234 PARAMETER Experiment Name: At_Siliques_P Parameter: Organism Value: A. thaliana
  misc_feature: MA Experiment 20000234 PARAMETER Experiment Name: At_Siliques_P Parameter: Plant Line Value: WS
  misc_feature: MA Experiment 20000234 PARAMETER Experiment Name: At_Siliques_P Parameter: Tissue Value: Less Than 5mm Siliques vs. Whole Plant
  misc_feature: MA Experiment ID: 20000264 Result: Down-regulated in Transcription
  misc_feature: MA Experiment 20000264 PARAMETER Experiment Name: At_Open_Flower_P Parameter: Age (day) Value: 21
  misc_feature: MA Experiment 20000264 PARAMETER Experiment Name: At_Open_Flower_P Parameter: Plant Line Value: WS
  misc_feature: MA Experiment 20000264 PARAMETER Experiment Name: At_Open_Flower_P Parameter: Tissue Value: Open Flower vs. Whole Plant
  misc_feature: MA Experiment ID: 20000265 Result: Down-regulated in Transcription
  misc_feature: MA Experiment 20000265 PARAMETER Experiment Name: At_Open_Flower_P Parameter: Age (day) Value: 21
  misc_feature: MA Experiment 20000265 PARAMETER Experiment Name: At_Open_Flower_P Parameter: Plant Line Value: WS
  misc_feature: MA Experiment 20000265 PARAMETER Experiment Name: At_Open_Flower_P Parameter: Tissue Value: Closed Flower vs. Whole Plant
  misc_feature: MA Experiment ID: 20000286 Result: Down-regulated in Transcription
  misc_feature: MA Experiment 20000286 PARAMETER Experiment Name: At_Open_Flower_P Parameter: Age (day) Value: 21
  misc_feature: MA Experiment 20000286 PARAMETER Experiment Name: At_Open_Flower_P Parameter: Plant Line Value: WS
  misc_feature: MA Experiment 20000286 PARAMETER Experiment Name: At_Open_Flower_P Parameter: Tissue Value: Half Open vs. Whole Plant
  misc_feature: MA Experiment ID: 20000495 Result: Down-regulated in Transcription
  misc_feature: MA Experiment 20000495 PARAMETER Experiment Name: At_Guard_Cells_P Parameter: Harvest Date Value: 8/2/2002
  misc_feature: MA Experiment 20000495 PARAMETER Experiment Name: At_Guard_Cells_P Parameter: Organism Value: A. thaliana
  misc_feature: MA Experiment 20000495 PARAMETER Experiment Name: At_Guard_Cells_P Parameter: Tissue Value: Guard Cells vs. Leaves
  misc_feature: MA Experiment ID: 20001451 Result: Down-regulated in Transcription
  misc_feature: MA Experiment 20001451 PARAMETER Experiment Name: At_Far-red-induction_P Parameter: Age (day) Value: 7
  misc_feature: MA Experiment 20001451 PARAMETER Experiment Name: At_Far-red-induction_P Parameter: Light Value: Far-red vs. White
  misc_feature: MA Experiment 20001451 PARAMETER Experiment Name: At_Far-red-induction_P Parameter: Organism Value: A. thaliana
  misc_feature: MA Experiment 20001451 PARAMETER Experiment Name: At_Far-red-induction_P Parameter: Plant Line Value: Columbia
  misc_feature: MA Experiment 20001451 PARAMETER Experiment Name: At_Far-red-induction_P Parameter: Timepoint (hr) Value: 24
  misc_feature: MA Experiment 20001451 PARAMETER Experiment Name: At_Far-red-induction_P Parameter: Tissue Value: Whole Plant
atagagaaagagagagagagaaatacaaagaaaaataaatggagaacggcaaatgcaacggagccacgacggtgaagttaccggagatcaaattcaccaagcttttcatcaacggccagttcattgatgctgcttcagggaagacgtttgagacgatagaccctaggaacggtgaagtgatcgcaacaatagccgaaggagacaaagaagacgttgacttggccgttaacgctgcacgttacgccttcgaccatggtccttggcctcgcatgaccggcttcgagagggcaaagcttatcaacaaattcgcagacttaatagaggaaaacattgaggaattggctaaacttgatgcggttgacggtggaaaattgtttcagttgggaaaatatgctgatattccggccacagccggtcattttcgatacaatgcgggtgcagcagataaaatccacggcgagactcttaaaatgacgcgtcaatctttgttcggatacaccctcaaagaaccaattggagtggttggtaatatcatcccttggaatttcccaagcattatgtttgccacaaaggtggctccggctatggctgctggttgcaccatggtggtcaagccagctgaacagacttcactctctgctttgttctatgcccatctctcaaaagaagcgggaattcctgatggtgtgctcaacattgtaactggttttggatcaactgctggagctgccattgcctcccatatggacgtagacaaagttagtttcactgggtcaacagatgttggaaggaagataatgcaagccgcagccgcaagtaatctcaaaaaagtttcccttgaattaggcgggaaatcgccacttctcatattcaacgacgctgatattgacaaagccgccgatcttgcgcttctcggttgcttttacaacaagggtgaaatttgcgtggcgagctctcgtgtgtttgttcaagaaggtatatacgataaggttgtggagaagttagtagagaaggctaaagattggaccgttggtgatccttttgattccactgctcgacaaggacctcaagtggataaaagacagtttgagaagattctatcttacattgagcacggtaaaaacgaaggagcgaccttattaactggaggaaaagccattggagacaaaggatatttcatccaaccaactatattcgcagatgtcactgaggatatgaagatataccaagatgaaatctttggaccagtcatgtcactgatgaaattcaagacggtagaggaagggatcaaatgcgcaaacaacacgaaatacggtcttgcagcaggaatactaagccaagacatagacttgatcaacacggtttcgaggtcaatcaaagctggaatcatttgggttaattgctacttcgggtttgatcttgactgtccttatggtggctacaagatgagtggtaattgtcgtgaaagtggcatggacgctctcgacaactatctacaaaccaaatccgtcgttatgcctcttcacaattccccttggatgtaataaaattgtccataacacatagaaaaaaacttaatccaatgataataaggcggcttgaattttttctttttctttttgtgcaaccactttttattttttgttcaatacttttttgtttttgttaaaaaaaattttgtgctaaataataataatatttttatact

SEQ ID NO: 29985 - protein, 501 aa, Arabidopsis thaliana
  peptide (1)..(501): Ceres Seq. ID no. 12603225
  misc_feature (17)..(501): Homolog of NCBI NO: 14276718 NR Description: T-cytoplasm male sterility restorer factor 2 [Zea
  misc_feature (17)..(501): Homolog of NCBI NO: 7431451 NR Description: rf2 nuclear restorer protein - maize
  misc_feature (16)..(501): Homolog of NCBI NO: 20530131 NR Description: mitochondrial aldehyde dehydrogenase [Sorghum
  misc_feature (16)..(501): Homolog of NCBI NO: 15228319 NR Description: aldehyde dehydrogenase (NAD+)-like protein
  misc_feature (35)..(500): Homolog of NCBI NO: 19850245 NR Description: cytosolic aldehyde dehydrogenase RF2D [Zea mays]
  misc_feature (3)..(500): Homolog of NCBI NO: 19850247 NR Description: cytosolic aldehyde dehydrogenase RF2D [Zea mays]
  misc_feature (3)..(501): Homolog of NCBI NO: 19850243 NR Description: cytosolic aldehyde dehydrogenase RF2C [Zea mays]
  misc_feature (3)..(501): Homolog of NCBI NO: 19850241 NR Description: cytosolic aldehyde dehydrogenase RF2C [Zea mays]
  misc_feature (4)..(501): Homolog of NCBI NO: 34912248 NR Description: cytosolic aldehyde dehydrogenase
  misc_feature (1)..(501): Homolog of NCBI NO: 18404212 NR Description: Expressed protein
  misc_feature (17)..(501): Homolog of NCBI NO: 14276718 NR Description: T-cytoplasm male sterility restorer factor 2 [Zea
  misc_feature (17)..(501): Homolog of NCBI NO: 7431451 NR Description: rf2 nuclear restorer protein - maize
  misc_feature (16)..(501): Homolog of NCBI NO: 20530131 NR Description: mitochondrial aldehyde dehydrogenase [Sorghum
  misc_feature (16)..(501): Homolog of NCBI NO: 15228319 NR Description: aldehyde dehydrogenase (NAD+)-like protein
  misc_feature (35)..(500): Homolog of NCBI NO: 19850245 NR Description: cytosolic aldehyde dehydrogenase RF2D [Zea mays]
  misc_feature (3)..(500): Homolog of NCBI NO: 19850247 NR Description: cytosolic aldehyde dehydrogenase RF2D [Zea mays]
  misc_feature (3)..(501): Homolog of NCBI NO: 19850243 NR Description: cytosolic aldehyde dehydrogenase RF2C [Zea mays]
  misc_feature (3)..(501): Homolog of NCBI NO: 19850241 NR Description: cytosolic aldehyde dehydrogenase RF2C [Zea mays]
  misc_feature (4)..(501): Homolog of NCBI NO: 34912248 NR Description: cytosolic aldehyde dehydrogenase
  misc_feature (1)..(501): Homolog of NCBI NO: 18404212 NR Description: Expressed protein
MENGKCNGATTVKLPEIKFTKLFINGQFIDAASGKTFETIDPRNGEVIATIAEGDKEDVDLAVNAARYAFDHGPWPRMTGFERAKLINKFADLIEENIEELAKLDAVDGGKLFQLGKYADIPATAGHFRYNAGAADKIHGETLKMTRQSLFGYTLKEPIGVVGNIIPWNFPSIMFATKVAPAMAAGCTMVVKPAEQTSLSALFYAHLSKEAGIPDGVLNIVTGFGSTAGAAIASHMDVDKVSFTGSTDVGRKIMQAAAASNLKKVSLELGGKSPLLIFNDADIDKAADLALLGCFYNKGEICVASSRVFVQEGIYDKVVEKLVEKAKDWTVGDPFDSTARQGPQVDKRQFEKILSYIEHGKNEGATLLTGGKAIGDKGYFIQPTIFADVTEDMKIYQDEIFGPVMSLMKFKTVEEGIKCANNTKYGLAAGILSQDIDLINTVSRSIKAGIIWVNCYFGFDLDCPYGGYKMSGNCRESGMDALDNYLQTKSVVMPLHNSPWM

SEQ ID NO: 29986 - protein, 424 aa, Arabidopsis thaliana
  peptide (1)..(424): Ceres Seq. ID no. 12603226
  misc_feature (1)..(424): Homolog of NCBI NO: 14276718 NR Description: T-cytoplasm male sterility restorer factor 2 [Zea
  misc_feature (1)..(424): Homolog of NCBI NO: 7431451 NR Description: rf2 nuclear restorer protein - maize
  misc_feature (1)..(424): Homolog of NCBI NO: 20530131 NR Description: mitochondrial aldehyde dehydrogenase [Sorghum
  misc_feature (1)..(424): Homolog of NCBI NO: 15228319 NR Description: aldehyde dehydrogenase (NAD+)-like protein
  misc_feature (1)..(423): Homolog of NCBI NO: 19850245 NR Description: cytosolic aldehyde dehydrogenase RF2D [Zea mays]
  misc_feature (1)..(423): Homolog of NCBI NO: 19850247 NR Description: cytosolic aldehyde dehydrogenase RF2D [Zea mays]
  misc_feature (1)..(424): Homolog of NCBI NO: 19850243 NR Description: cytosolic aldehyde dehydrogenase RF2C [Zea mays]
  misc_feature (1)..(424): Homolog of NCBI NO: 19850241 NR Description: cytosolic aldehyde dehydrogenase RF2C [Zea mays]
  misc_feature (1)..(424): Homolog of NCBI NO: 34912248 NR Description: cytosolic aldehyde dehydrogenase
  misc_feature (1)..(424): Homolog of NCBI NO: 18404212 NR Description: Expressed protein
  misc_feature (1)..(424): Homolog of NCBI NO: 14276718 NR Description: T-cytoplasm male sterility restorer factor 2 [Zea
  misc_feature (1)..(424): Homolog of NCBI NO: 7431451 NR Description: rf2 nuclear restorer protein - maize
  misc_feature (1)..(424): Homolog of NCBI NO: 20530131 NR Description: mitochondrial aldehyde dehydrogenase [Sorghum
  misc_feature (1)..(424): Homolog of NCBI NO: 15228319 NR Description: aldehyde dehydrogenase (NAD+)-like protein
  misc_feature (1)..(423): Homolog of NCBI NO: 19850245 NR Description: cytosolic aldehyde dehydrogenase RF2D [Zea mays]
  misc_feature (1)..(423): Homolog of NCBI NO: 19850247 NR Description: cytosolic aldehyde dehydrogenase RF2D [Zea mays]
  misc_feature (1)..(424): Homolog of NCBI NO: 19850243 NR Description: cytosolic aldehyde dehydrogenase RF2C [Zea mays]
  misc_feature (1)..(424): Homolog of NCBI NO: 19850241 NR Description: cytosolic aldehyde dehydrogenase RF2C [Zea mays]
  misc_feature (1)..(424): Homolog of NCBI NO: 34912248 NR Description: cytosolic aldehyde dehydrogenase
  misc_feature (1)..(424): Homolog of NCBI NO: 18404212 NR Description: Expressed protein
MTGFERAKLINKFADLIEENIEELAKLDAVDGGKLFQLGKYADIPATAGHFRYNAGAADKIHGETLKMTRQSLFGYTLKEPIGVVGNIIPWNFPSIMFATKVAPAMAAGCTMVVKPAEQTSLSALFYAHLSKEAGIPDGVLNIVTGFGSTAGAAIASHMDVDKVSFTGSTDVGRKIMQAAAASNLKKVSLELGGKSPLLIFNDADIDKAADLALLGCFYNKGEICVASSRVFVQEGIYDKVVEKLVEKAKDWTVGDPFDSTARQGPQVDKRQFEKILSYIEHGKNEGATLLTGGKAIGDKGYFIQPTIFADVTEDMKIYQDEIFGPVMSLMKFKTVEEGIKCANNTKYGLAAGILSQDIDLINTVSRSIKAGIIWVNCYFGFDLDCPYGGYKMSGNCRESGMDALDNYLQTKSVVMPLHNSPWM

SEQ ID NO: 29987 - protein, 357 aa, Arabidopsis thaliana
  peptide (1)..(357): Ceres Seq. ID no. 12603227
  misc_feature (1)..(357): Homolog of NCBI NO: 14276718 NR Description: T-cytoplasm male sterility restorer factor 2 [Zea
  misc_feature (1)..(357): Homolog of NCBI NO: 7431451 NR Description: rf2 nuclear restorer protein - maize
  misc_feature (1)..(357): Homolog of NCBI NO: 20530131 NR Description: mitochondrial aldehyde dehydrogenase [Sorghum
  misc_feature (1)..(357): Homolog of NCBI NO: 15228319 NR Description: aldehyde dehydrogenase (NAD+)-like protein
  misc_feature (1)..(356): Homolog of NCBI NO: 19850245 NR Description: cytosolic aldehyde dehydrogenase RF2D [Zea mays]
  misc_feature (1)..(356): Homolog of NCBI NO: 19850247 NR Description: cytosolic aldehyde dehydrogenase RF2D [Zea mays]
  misc_feature (1)..(357): Homolog of NCBI NO: 19850243 NR Description: cytosolic aldehyde dehydrogenase RF2C [Zea mays]
  misc_feature (1)..(357): Homolog of NCBI NO: 19850241 NR Description: cytosolic aldehyde dehydrogenase RF2C [Zea mays]
  misc_feature (1)..(357): Homolog of NCBI NO: 34912248 NR Description: cytosolic aldehyde dehydrogenase
  misc_feature (1)..(357): Homolog of NCBI NO: 18404212 NR Description: Expressed protein
  misc_feature (1)..(357): Homolog of NCBI NO: 14276718 NR Description: T-cytoplasm male sterility restorer factor 2 [Zea
  misc_feature (1)..(357): Homolog of NCBI NO: 7431451 NR Description: rf2 nuclear restorer protein - maize
  misc_feature (1)..(357): Homolog of NCBI NO: 20530131 NR Description: mitochondrial aldehyde dehydrogenase [Sorghum
  misc_feature (1)..(357): Homolog of NCBI NO: 15228319 NR Description: aldehyde dehydrogenase (NAD+)-like protein
  misc_feature (1)..(356): Homolog of NCBI NO: 19850245 NR Description: cytosolic aldehyde dehydrogenase RF2D [Zea mays]
  misc_feature (1)..(356): Homolog of NCBI NO: 19850247 NR Description: cytosolic aldehyde dehydrogenase RF2D [Zea mays]
  misc_feature (1)..(357): Homolog of NCBI NO: 19850243 NR Description: cytosolic aldehyde dehydrogenase RF2C [Zea mays]
  misc_feature (1)..(357): Homolog of NCBI NO: 19850241 NR Description: cytosolic aldehyde dehydrogenase RF2C [Zea mays]
  misc_feature (1)..(357): Homolog of NCBI NO: 34912248 NR Description: cytosolic aldehyde dehydrogenase
  misc_feature (1)..(357): Homolog of NCBI NO: 18404212 NR Description: Expressed protein
MTRQSLFGYTLKEPIGVVGNIIPWNFPSIMFATKVAPAMAAGCTMVVKPAEQTSLSALFYAHLSKEAGIPDGVLNIVTGFGSTAGAAIASHMDVDKVSFTGSTDVGRKIMQAAAASNLKKVSLELGGKSPLLIFNDADIDKAADLALLGCFYNKGEICVASSRVFVQEGIYDKVVEKLVEKAKDWTVGDPFDSTARQGPQVDKRQFEKILSYIEHGKNEGATLLTGGKAIGDKGYFIQPTIFADVTEDMKIYQDEIFGPVMSLMKFKTVEEGIKCANNTKYGLAAGILSQDIDLINTVSRSIKAGIIWVNCYFGFDLDCPYGGYKMSGNCRESGMDALDNYLQTKSVVMPLHNSPWM

SEQ ID NO: 29988 - DNA, 640 bp, Arabidopsis thaliana; identical to SEQ ID NO: 21715
  misc_feature (1)..(640): Ceres Seq. ID no. 12323094
  misc_feature: MA Experiment ID: 108434 Result: Up-regulated in Transcription
  misc_feature: MA Experiment 108434 PARAMETER Experiment Name: At_Root_Tips_cDNA_P Parameter: Tissue Value: Root Tips
  misc_feature: MA Experiment ID: 108462 Result: Down-regulated in Transcription
  misc_feature: MA Experiment 108462 PARAMETER Experiment Name: At_Germinating_Seeds_cDNA_P Parameter: Age (day) Value: 2 vs. 0
  misc_feature: MA Experiment 108462 PARAMETER Experiment Name: At_Germinating_Seeds_cDNA_P Parameter: Tissue Value: Germinating Seeds
  misc_feature: MA Experiment ID: 108463 Result: Down-regulated in Transcription
  misc_feature: MA Experiment 108463 PARAMETER Experiment Name: At_Germinating_Seeds_cDNA_P Parameter: Age (day) Value: 3 vs. 0
  misc_feature: MA Experiment 108463 PARAMETER Experiment Name: At_Germinating_Seeds_cDNA_P Parameter: Tissue Value: Germinating Seeds
  misc_feature: MA Experiment ID: 108464 Result: Down-regulated in Transcription
  misc_feature: MA Experiment 108464 PARAMETER Experiment Name: At_Germinating_Seeds_cDNA_P Parameter: Age (day) Value: 4 vs. 0
  misc_feature: MA Experiment 108464 PARAMETER Experiment Name: At_Germinating_Seeds_cDNA_P Parameter: Tissue Value: Germinating Seeds
  misc_feature: MA Experiment ID: 20000184 Result: Down-regulated in Transcription
  misc_feature: MA Experiment 20000184 PARAMETER Experiment Name: At_Shoots__P Parameter: Age (day) Value: 7
  misc_feature: MA Experiment 20000184 PARAMETER Experiment Name: At_Shoots__P Parameter: Tissue Value: Shoots vs. Whole Plant
  misc_feature: MA Experiment ID: 20000224 Result: Up-regulated in Transcription
  misc_feature: Phenotype: FLOWERS Other
  misc_feature: Phenotype: FERTILITY Fertility-Reduced
  misc_feature: Phenotype: ROSETTE LEAVES Disorganized Rosette-Disorganized Rosette
  misc_feature: Phenotype: ROSETTE LEAVES Other
  misc_feature: Phenotype: SILIQUES Other
  misc_feature: Phenotype: FERTILITY Fertility-Reduced
  misc_feature: Phenotype: ROSETTE LEAVES Other
  misc_feature: Phenotype: CAULINE LEAVES Other

SEQ ID NO: 29989 - protein, 125 aa, Arabidopsis thaliana; identical to SEQ ID NO: 21716
  peptide (1)..(125): Ceres Seq. ID no. 12323095
  misc_feature (34)..(103): Pfam Name: HMG (high mobility group) box Pfam Description: HMG (high mobility group) box
  misc_feature (34)..(103): Pfam Name: HMG (high mobility group) box Pfam Description: HMG (high mobility group) box
  misc_feature (1)..(125): Homolog of NCBI NO: 11346367 NR Description: high mobility group protein HMG-gamma
  misc_feature (1)..(125): Homolog of NCBI NO: 13877775 NR Description: putative HMG protein [Arabidopsis thaliana]
  misc_feature (1)..(125): Homolog of NCBI NO: 21592453 NR Description: putative HMG protein [Arabidopsis thaliana]
  misc_feature (1)..(125): Homolog of NCBI NO: 13877775 NR Description: putative HMG protein [Arabidopsis thaliana]
  misc_feature (1)..(125): Homolog of NCBI NO: 15227862 NR Description: putative HMG protein
  misc_feature (1)..(125): Homolog of NCBI NO: 15237040 NR Description: HMG delta protein
  misc_feature (1)..(125): Homolog of NCBI NO: 21592453 NR Description: putative HMG protein [Arabidopsis thaliana]
  misc_feature (1)..(125): Homolog of NCBI NO: 11346367 NR Description: high mobility group protein HMG-gamma
  misc_feature (1)..(125): Homolog of NCBI NO: 15227862 NR Description: putative HMG protein
  misc_feature (1)..(125): Homolog of NCBI NO: 15237040 NR Description: HMG delta protein

SEQ ID NO: 29990 - DNA, 939 bp, Arabidopsis thaliana
  misc_feature (1)..(939): Ceres Seq. ID no. 12322718
  misc_feature: MA Experiment ID: 108434 Result: Up-regulated in Transcription
  misc_feature: MA Experiment 108434 PARAMETER Experiment Name: At_Root_Tips_cDNA_P Parameter: Tissue Value: Root Tips
  misc_feature: MA Experiment ID: 108435 Result: Down-regulated in Transcription
  misc_feature: MA Experiment 108435 PARAMETER Experiment Name: At_stm_Mutants_cDNA_P Parameter: Plant Line Value: wt Landsburg vs stm
  misc_feature: MA Experiment 108435 PARAMETER Experiment Name: At_stm_Mutants_cDNA_P Parameter: Tissue Value: Shoot Apical Meristem Region
  misc_feature: MA Experiment ID: 108461 Result: Up-regulated in Transcription
  misc_feature: MA Experiment 108461 PARAMETER Experiment Name: At_Germinating_Seeds_cDNA_P Parameter: Age (day) Value: 1 vs. 0
  misc_feature: MA Experiment 108461 PARAMETER Experiment Name: At_Germinating_Seeds_cDNA_P Parameter: Tissue Value: Germinating Seeds
  misc_feature: MA Experiment ID: 108462 Result: Up-regulated in Transcription
  misc_feature: MA Experiment 108462 PARAMETER Experiment Name: At_Germinating_Seeds_cDNA_P Parameter: Age (day) Value: 2 vs. 0
  misc_feature: MA Experiment 108462 PARAMETER Experiment Name: At_Germinating_Seeds_cDNA_P Parameter: Tissue Value: Germinating Seeds
  misc_feature: MA Experiment ID: 108488 Result: Up-regulated in Transcription
  misc_feature: MA Experiment ID: 108489 Result: Down-regulated in Transcription
  misc_feature: MA Experiment ID: 108585 Result: Down-regulated in Transcription
  misc_feature: MA Experiment 108585 PARAMETER Experiment Name: At_5mM_NaNP_cDNA_P Parameter: Timepoint (hr) Value: 6
  misc_feature: MA Experiment 108585 PARAMETER Experiment Name: At_5mM_NaNP_cDNA_P Parameter: Tissue Value: Aerial
  misc_feature: MA Experiment 108585 PARAMETER Experiment Name: At_5mM_NaNP_cDNA_P Parameter: Treatment Value: null
  misc_feature: MA Experiment ID: 108595 Result: Down-regulated in Transcription
  misc_feature: MA Experiment 108595 PARAMETER Experiment Name: At_Ler-pi_Ovule_cDNA_P Parameter: Plant Line Value: null
  misc_feature: MA Experiment ID: 20000087 Result: Down-regulated in Transcription
  misc_feature: MA Experiment 20000087 PARAMETER Experiment Name: At_100uM_ABA_Mutants_cDNA_P Parameter: Plant Line Value: WS
  misc_feature: MA Experiment 20000087 PARAMETER Experiment Name: At_100uM_ABA_Mutants_cDNA_P Parameter: Timepoint (hr) Value: 6
  misc_feature: MA Experiment 20000087 PARAMETER Experiment Name: At_100uM_ABA_Mutants_cDNA_P Parameter: Tissue Value: Aerial
  misc_feature: MA Experiment 20000087 PARAMETER Experiment Name: At_100uM_ABA_Mutants_cDNA_P Parameter: Treatment Value: 100uM ABA vs. No Treatment
  misc_feature: MA Experiment ID: 20000117 Result: Down-regulated in Transcription
  misc_feature: MA Experiment 20000117 PARAMETER Experiment Name: At_100uM_ABA_Mutants_cDNA_P Parameter: Plant Line Value: Columbia
  misc_feature: MA Experiment 20000117 PARAMETER Experiment Name: At_100uM_ABA_Mutants_cDNA_P Parameter: Timepoint (hr) Value: 6
  misc_feature: MA Experiment 20000117 PARAMETER Experiment Name: At_100uM_ABA_Mutants_cDNA_P Parameter: Tissue Value: Aerial
  misc_feature: MA Experiment 20000117 PARAMETER Experiment Name: At_100uM_ABA_Mutants_cDNA_P Parameter: Treatment Value: 100uM ABA vs. No Treatment
  misc_feature: MA Experiment ID: 20000185 Result: Down-regulated in Transcription
  misc_feature: MA Experiment 20000185 PARAMETER Experiment Name: At_Roots__P Parameter: Age (day) Value: 7 vs. 21
  misc_feature: MA Experiment 20000185 PARAMETER Experiment Name: At_Roots__P Parameter: Organism Value: A. thaliana
  misc_feature: MA Experiment 20000185 PARAMETER Experiment Name: At_Roots__P Parameter: Tissue Value: Roots vs. Whole Plant
  misc_feature: MA Experiment ID: 20000437 Result: Down-regulated in Transcription
  misc_feature: MA Experiment 20000437 PARAMETER Experiment Name: At_Drought_P Parameter: Age (day) Value: 8
  misc_feature: MA Experiment 20000437 PARAMETER Experiment Name: At_Drought_P Parameter: Organism Value: A. thaliana
  misc_feature: MA Experiment 20000437 PARAMETER Experiment Name: At_Drought_P Parameter: Plant Line Value: WS
  misc_feature: MA Experiment 20000437 PARAMETER Experiment Name: At_Drought_P Parameter: Timepoint (hr) Value: 24
  misc_feature: MA Experiment 20000437 PARAMETER Experiment Name: At_Drought_P Parameter: Tissue Value: Whole Plant
  misc_feature: MA Experiment 20000437 PARAMETER Experiment Name: At_Drought_P Parameter: Treatment Value: Drought vs. No Drought
  misc_feature: MA Experiment ID: 20000439 Result: Down-regulated in Transcription
  misc_feature: MA Experiment 20000439 PARAMETER Experiment Name: At_Roots__P Parameter: Age (day) Value: 14 vs. 21
  misc_feature: MA Experiment 20000439 PARAMETER Experiment Name: At_Roots__P Parameter: Organism Value: A. thaliana
  misc_feature: MA Experiment 20000439 PARAMETER Experiment Name: At_Roots__P Parameter: Tissue Value: Roots vs. Whole Plant
  misc_feature: MA Experiment ID: 20000496 Result: Down-regulated in Transcription
  misc_feature: MA Experiment 20000496 PARAMETER Experiment Name: At_Guard_Cells_P Parameter: Harvest Date Value: 7/19/2002
  misc_feature: MA Experiment 20000496 PARAMETER Experiment Name: At_Guard_Cells_P Parameter: Organism Value: Canola
  misc_feature: MA Experiment 20000496 PARAMETER Experiment Name: At_Guard_Cells_P Parameter: Tissue Value: Guard Cells vs. Leaves
  misc_feature: MA Experiment ID: 20001450 Result: Down-regulated in Transcription
  misc_feature: MA Experiment 20001450 PARAMETER Experiment Name: At_Far-red-induction_P Parameter: Age (day) Value: 7
  misc_feature: MA Experiment 20001450 PARAMETER Experiment Name: At_Far-red-induction_P Parameter: Light Value: Far-red vs. White
  misc_feature: MA Experiment 20001450 PARAMETER Experiment Name: At_Far-red-induction_P Parameter: Organism Value: A. thaliana
  misc_feature: MA Experiment 20001450 PARAMETER Experiment Name: At_Far-red-induction_P Parameter: Plant Line Value: Columbia
  misc_feature: MA Experiment 20001450 PARAMETER Experiment Name: At_Far-red-induction_P Parameter: Timepoint (hr) Value: 8
  misc_feature: MA Experiment 20001450 PARAMETER Experiment Name: At_Far-red-induction_P Parameter: Tissue Value: Whole Plant
  misc_feature: MA Experiment ID: 20001557 Result: Down-regulated in Transcription
  misc_feature: MA Experiment 20001557 PARAMETER Experiment Name: At_Drought_Soil_Dry_P Parameter: Age (day) Value: 27
  misc_feature: MA Experiment 20001557 PARAMETER Experiment Name: At_Drought_Soil_Dry_P Parameter: Organism Value: A. thaliana
  misc_feature: MA Experiment 20001557 PARAMETER Experiment Name: At_Drought_Soil_Dry_P Parameter: Plant Line Value: WS
  misc_feature: MA Experiment 20001557 PARAMETER Experiment Name: At_Drought_Soil_Dry_P Parameter: Post Timepoint (hr) Value: 3
  misc_feature: MA Experiment 20001557 PARAMETER Experiment Name: At_Drought_Soil_Dry_P Parameter: Post-Treatment Value: Re-Water vs. No Drought
  misc_feature: MA Experiment 20001557 PARAMETER Experiment Name: At_Drought_Soil_Dry_P Parameter: Timepoint (day) Value: 13
  misc_feature: MA Experiment 20001557 PARAMETER Experiment Name: At_Drought_Soil_Dry_P Parameter: Treatment Value: Drought vs. No Drought
  misc_feature: MA Experiment ID: 20001905 Result: Down-regulated in Transcription
  misc_feature: MA Experiment 20001905 PARAMETER Experiment Name: At_Drought_Reproduction_P Parameter: Age (day) Value: 40
  misc_feature: MA Experiment 20001905 PARAMETER Experiment Name: At_Drought_Reproduction_P Parameter: Organism Value: A. thaliana
  misc_feature: MA Experiment 20001905 PARAMETER Experiment Name: At_Drought_Reproduction_P Parameter: Plant Line Value: WS
  misc_feature: MA Experiment 20001905 PARAMETER Experiment Name: At_Drought_Reproduction_P Parameter: Timepoint (day) Value: 10
  misc_feature: MA Experiment 20001905 PARAMETER Experiment Name: At_Drought_Reproduction_P Parameter: Tissue Value: Rosettes
  misc_feature: MA Experiment 20001905 PARAMETER Experiment Name: At_Drought_Reproduction_P Parameter: Treatment Value: Drought vs. No Drought
ggaaattaaaccactgcgaaaaatatgataagccttaggtttcaaccaagcaccaccgccggtgttttatcggcgtcagtgagccgcgccggttttatcaagcggtgcggttcgactaaaccgggaagggttggccggtttgttacaatggcgacggcggcgagtcctcttgaaatctgcgttaaagcttctatcaccactcccaacaagctcggagactgccctttttgccaaaaggtgttactgacaatggaggagaagaatgttccttatgacatgaaaatggtggatttgagtaacaaaccagaatggttcttgaagattagtccagaaggtaaagtcccagttgtgaagtttgatgagaaatgggttccggattcagatgttataacacaggctttagaagagaagtatcctgagcctcctcttgctaccccacctgaaaaggcttcagttggatcgaagatcttttccacatttgtcggttttctgaagagcaaagattcaggagatggaactgagcaagttttgttggatgagcttactacattcaacgattatatcaaggacaatggccctttcataaatggagagaagatctcggcagcagatttgtccttggcaccaaagttataccacatgaagattgcattgggacattacaagaactggtctgttccagattcacttcctttcgtcaaatcctacatggagaatgttttctcgagggaatcattcacgaacacacgggcggaaacagaggatgtaattgctggttggagaccaaaggttatgggttaagagattttgatgttgacctcaagcttccttgtcttctactaaatgtaaaaaacataataatcaaatcttcttcaactgttaccaatgatatataccttgaatccttgattgcttatatgatgaaaactatattgtgtc

SEQ ID NO: 29991 - protein, 258 aa, Arabidopsis thaliana
  peptide (1)..(258): Ceres Seq. ID no. 12322719
  misc_feature (66)..(128): Pfam Name: Glutathione S-transferase, N-terminal domain Pfam Description: Glutathione S-transferase, N-terminal domain
  misc_feature (49)..(256): Homolog of NCBI NO: 6939839 NR Description: GSH-dependent dehydroascorbate reductase 1
  misc_feature (49)..(256): Homolog of NCBI NO: 28192425 NR Description: dehydroascorbate reductase [Oryza sativa]
  misc_feature (49)..(256): Homolog of NCBI NO: 28192427 NR Description: dehydroascorbate reductase [Nicotiana tabacum]
  misc_feature (38)..(252): Homolog of NCBI NO: 10952512 NR Description: dehydroascorbate reductase [Spinacia oleracea]
  misc_feature (42)..(258): Homolog of NCBI NO: 22653415 NR Description: dehydroascorbate reductase [Brassica juncea]
  misc_feature (1)..(258): Homolog of NCBI NO: 22653413 NR Description: dehydroascorbate reductase [Brassica juncea]
  misc_feature (7)..(258): Homolog of NCBI NO: 10952514 NR Description: dehydroascorbate reductase [Arabidopsis thaliana]
  misc_feature (1)..(258): Homolog of NCBI NO: 17473687 NR Description: unknown protein [Arabidopsis thaliana]
  misc_feature (1)..(258): Homolog of NCBI NO: 18418055 NR Description: dehydroascorbate reductase, putative
  misc_feature (1)..(240): Homolog of NCBI NO: 11271417 NR Description: valine-tRNA ligase-like protein - Arabidopsis
MISLRFQPSTTAGVLSASVSRAGFIKRCGSTKPGRVGRFVTMATAASPLEICVKASITTPNKLGDCPFCQKVLLTMEEKNVPYDMKMVDLSNKPEWFLKISPEGKVPVVKFDEKWVPDSDVITQALEEKYPEPPLATPPEKASVGSKIFSTFVGFLKSKDSGDGTEQVLLDELTTFNDYIKDNGPFINGEKISAADLSLAPKLYHMKIALGHYKNWSVPDSLPFVKSYMENVFSRESFTNTRAETEDVIAGWRPKVMG

SEQ ID NO: 29992 - protein, 217 aa, Arabidopsis thaliana
  peptide (1)..(217): Ceres Seq. ID no. 12322720
  misc_feature (25)..(87): Pfam Name: Glutathione S-transferase, N-terminal domain Pfam Description: Glutathione S-transferase, N-terminal domain
  misc_feature (8)..(215): Homolog of NCBI NO: 6939839 NR Description: GSH-dependent dehydroascorbate reductase 1
  misc_feature (8)..(215): Homolog of NCBI NO: 28192425 NR Description: dehydroascorbate reductase [Oryza sativa]
  misc_feature (8)..(215): Homolog of NCBI NO: 28192427 NR Description: dehydroascorbate reductase [Nicotiana tabacum]
  misc_feature (1)..(211): Homolog of NCBI NO: 10952512 NR Description: dehydroascorbate reductase [Spinacia oleracea]
  misc_feature (1)..(217): Homolog of NCBI NO: 22653415 NR Description: dehydroascorbate reductase [Brassica juncea]
  misc_feature (1)..(217): Homolog of NCBI NO: 22653413 NR Description: dehydroascorbate reductase [Brassica juncea]
  misc_feature (1)..(217): Homolog of NCBI NO: 10952514 NR Description: dehydroascorbate reductase [Arabidopsis thaliana]
  misc_feature (1)..(217): Homolog of NCBI NO: 17473687 NR Description: unknown protein [Arabidopsis thaliana]
  misc_feature (1)..(217): Homolog of NCBI NO: 18418055 NR Description: dehydroascorbate reductase, putative
  misc_feature (1)..(199): Homolog of NCBI NO: 11271417 NR Description: valine-tRNA ligase-like protein - Arabidopsis
MATAASPLEICVKASITTPNKLGDCPFCQKVLLTMEEKNVPYDMKMVDLSNKPEWFLKISPEGKVPVVKFDEKWVPDSDVITQALEEKYPEPPLATPPEKASVGSKIFSTFVGFLKSKDSGDGTEQVLLDELTTFNDYIKDNGPFINGEKISAADLSLAPKLYHMKIALGHYKNWSVPDSLPFVKSYMENVFSRESFTNTRAETEDVIAGWRPKVMG

SEQ ID NO: 29993 - protein, 183 aa, Arabidopsis thaliana
  peptide (1)..(183): Ceres Seq. ID no. 12322721
  misc_feature (1)..(53): Pfam Name: Glutathione S-transferase, N-terminal domain Pfam Description: Glutathione S-transferase, N-terminal domain
  misc_feature (1)..(181): Homolog of NCBI NO: 6939839 NR Description: GSH-dependent dehydroascorbate reductase 1
  misc_feature (1)..(181): Homolog of NCBI NO: 28192425 NR Description: dehydroascorbate reductase [Oryza sativa]
  misc_feature (1)..(181): Homolog of NCBI NO: 28192427 NR Description: dehydroascorbate reductase [Nicotiana tabacum]
  misc_feature (1)..(177): Homolog of NCBI NO: 10952512 NR Description: dehydroascorbate reductase [Spinacia oleracea]
  misc_feature (1)..(183): Homolog of NCBI NO: 22653415 NR Description: dehydroascorbate reductase [Brassica juncea]
  misc_feature (1)..(183): Homolog of NCBI NO: 22653413 NR Description: dehydroascorbate reductase [Brassica juncea]
  misc_feature (1)..(183): Homolog of NCBI NO: 10952514 NR Description: dehydroascorbate reductase [Arabidopsis thaliana]
  misc_feature (1)..(183): Homolog of NCBI NO: 17473687 NR Description: unknown protein [Arabidopsis thaliana]
  misc_feature (1)..(183): Homolog of NCBI NO: 18418055 NR Description: dehydroascorbate reductase, putative
  misc_feature (1)..(165): Homolog of NCBI NO: 11271417 NR Description: valine-tRNA ligase-like protein - Arabidopsis
MEEKNVPYDMKMVDLSNKPEWFLKISPEGKVPVVKFDEKWVPDSDVITQALEEKYPEPPLATPPEKASVGSKIFSTFVGFLKSKDSGDGTEQVLLDELTTFNDYIKDNGPFINGEKISAADLSLAPKLYHMKIALGHYKNWSVPDSLPFVKSYMENVFSRESFTNTRAETEDVIAGWRPKVMG

SEQ ID NO: 29994 - DNA, 781 bp, Arabidopsis thaliana
  misc_feature (1)..(781): Ceres Seq. ID no. 13487058
  misc_feature: MA Experiment ID: 108434 Result: Down-regulated in Transcription
  misc_feature: MA Experiment 108434 PARAMETER Experiment Name: At_Root_Tips_cDNA_P Parameter: Tissue Value: Root Tips
  misc_feature: MA Experiment ID: 108461 Result: Up-regulated in Transcription
  misc_feature: MA Experiment 108461 PARAMETER Experiment Name: At_Germinating_Seeds_cDNA_P Parameter: Age (day) Value: 1 vs. 0
  misc_feature: MA Experiment 108461 PARAMETER Experiment Name: At_Germinating_Seeds_cDNA_P Parameter: Tissue Value: Germinating Seeds
  misc_feature: MA Experiment ID: 108462 Result: Up-regulated in Transcription
  misc_feature: MA Experiment 108462 PARAMETER Experiment Name: At_Germinating_Seeds_cDNA_P Parameter: Age (day) Value: 2 vs. 0
  misc_feature: MA Experiment 108462 PARAMETER Experiment Name: At_Germinating_Seeds_cDNA_P Parameter: Tissue Value: Germinating Seeds
  misc_feature: MA Experiment ID: 108463 Result: Up-regulated in Transcription
  misc_feature: MA Experiment 108463 PARAMETER Experiment Name: At_Germinating_Seeds_cDNA_P Parameter: Age (day) Value: 3 vs. 0
  misc_feature: MA Experiment 108463 PARAMETER Experiment Name: At_Germinating_Seeds_cDNA_P Parameter: Tissue Value: Germinating Seeds
  misc_feature: MA Experiment ID: 108464 Result: Up-regulated in Transcription
  misc_feature: MA Experiment 108464 PARAMETER Experiment Name: At_Germinating_Seeds_cDNA_P Parameter: Age (day) Value: 4 vs. 0
  misc_feature: MA Experiment 108464 PARAMETER Experiment Name: At_Germinating_Seeds_cDNA_P Parameter: Tissue Value: Germinating Seeds
  misc_feature: MA Experiment ID: 108488 Result: Down-regulated in Transcription
  misc_feature: MA Experiment ID: 108561 Result: Up-regulated in Transcription
  misc_feature: MA Experiment 108561 PARAMETER Experiment Name: At_100uM_ABA_cDNA_P Parameter: Timepoint (hr) Value: 6
  misc_feature: MA Experiment 108561 PARAMETER Experiment Name: At_100uM_ABA_cDNA_P Parameter: Tissue Value: Aerial
  misc_feature: MA Experiment 108561 PARAMETER Experiment Name: At_100uM_ABA_cDNA_P Parameter: Treatment Value: 100uM ABA vs. No Treatment
  misc_feature: MA Experiment ID: 108594 Result: Down-regulated in Transcription
  misc_feature: MA Experiment 108594 PARAMETER Experiment Name: At_Ler-rhl_Root_cDNA_P Parameter: Plant Line Value: null
  misc_feature: MA Experiment ID: 20000069 Result: Up-regulated in Transcription
  misc_feature: MA Experiment 20000069 PARAMETER Experiment Name: At_100uM_ABA_Mutants_cDNA_P Parameter: Plant Line Value: CS23
  misc_feature: MA Experiment 20000069 PARAMETER Experiment Name: At_100uM_ABA_Mutants_cDNA_P Parameter: Timepoint (hr) Value: 6
  misc_feature: MA Experiment 20000069 PARAMETER Experiment Name: At_100uM_ABA_Mutants_cDNA_P Parameter: Tissue Value: Aerial
  misc_feature: MA Experiment 20000069 PARAMETER Experiment Name: At_100uM_ABA_Mutants_cDNA_P Parameter: Treatment Value: 100uM ABA vs. No Treatment
  misc_feature: MA Experiment ID: 20000070 Result: Up-regulated in Transcription
  misc_feature: MA Experiment 20000070 PARAMETER Experiment Name: At_100uM_ABA_Mutants_cDNA_P Parameter: Plant Line Value: CS24
  misc_feature: MA Experiment 20000070 PARAMETER Experiment Name: At_100uM_ABA_Mutants_cDNA_P Parameter: Timepoint (hr) Value: 6
  misc_feature: MA Experiment 20000070 PARAMETER Experiment Name: At_100uM_ABA_Mutants_cDNA_P Parameter: Tissue Value: Aerial
  misc_feature: MA Experiment 20000070 PARAMETER Experiment Name: At_100uM_ABA_Mutants_cDNA_P Parameter: Treatment Value: 100uM ABA vs. No Treatment
  misc_feature: MA Experiment ID: 20000071 Result: Up-regulated in Transcription
  misc_feature: MA Experiment 20000071 PARAMETER Experiment Name: At_100uM_ABA_Mutants_cDNA_P Parameter: Plant Line Value: CS8104
  misc_feature: MA Experiment 20000071 PARAMETER Experiment Name: At_100uM_ABA_Mutants_cDNA_P Parameter: Timepoint (hr) Value: 6
  misc_feature: MA Experiment 20000071 PARAMETER Experiment Name: At_100uM_ABA_Mutants_cDNA_P Parameter: Tissue Value: Aerial
  misc_feature: MA Experiment 20000071 PARAMETER Experiment Name: At_100uM_ABA_Mutants_cDNA_P Parameter: Treatment Value: 100uM ABA vs. No Treatment
  misc_feature: MA Experiment ID: 20000072 Result: Up-regulated in Transcription
  misc_feature: MA Experiment 20000072 PARAMETER Experiment Name: At_100uM_ABA_Mutants_cDNA_P Parameter: Plant Line Value: CS8105
  misc_feature: MA Experiment 20000072 PARAMETER Experiment Name: At_100uM_ABA_Mutants_cDNA_P Parameter: Timepoint (hr) Value: 6
  misc_feature: MA Experiment 20000072 PARAMETER Experiment Name: At_100uM_ABA_Mutants_cDNA_P Parameter: Tissue Value: Aerial
  misc_feature: MA Experiment 20000072 PARAMETER Experiment Name: At_100uM_ABA_Mutants_cDNA_P Parameter: Treatment Value: 100uM ABA vs. No Treatment
  misc_feature: MA Experiment ID: 20000086 Result: Up-regulated in Transcription
  misc_feature: MA Experiment 20000086 PARAMETER Experiment Name: At_100uM_ABA_Mutants_cDNA_P Parameter: Plant Line Value: CS22
  misc_feature: MA Experiment 20000086 PARAMETER Experiment Name: At_100uM_ABA_Mutants_cDNA_P Parameter: Timepoint (hr) Value: 6
  misc_feature: MA Experiment 20000086 PARAMETER Experiment Name: At_100uM_ABA_Mutants_cDNA_P Parameter: Tissue Value: Aerial
  misc_feature: MA Experiment 20000086 PARAMETER Experiment Name: At_100uM_ABA_Mutants_cDNA_P Parameter: Treatment Value: 100uM ABA vs. No Treatment
  misc_feature: MA Experiment ID: 20000087 Result: Up-regulated in Transcription
  misc_feature: MA Experiment 20000087 PARAMETER Experiment Name: At_100uM_ABA_Mutants_cDNA_P Parameter: Plant Line Value: WS
  misc_feature: MA Experiment 20000087 PARAMETER Experiment Name: At_100uM_ABA_Mutants_cDNA_P Parameter: Timepoint (hr) Value: 6
  misc_feature: MA Experiment 20000087 PARAMETER Experiment Name: At_100uM_ABA_Mutants_cDNA_P Parameter: Tissue Value: Aerial
  misc_feature: MA Experiment 20000087 PARAMETER Experiment Name: At_100uM_ABA_Mutants_cDNA_P Parameter: Treatment Value: 100uM ABA vs. No Treatment
  misc_feature: MA Experiment ID: 20000111 Result: Down-regulated in Transcription
  misc_feature: MA Experiment 20000111 PARAMETER Experiment Name: At_42deg_Heat_cDNA_P Parameter: Temperature (deg C) Value: 42 vs. 22
  misc_feature: MA Experiment 20000111 PARAMETER Experiment Name: At_42deg_Heat_cDNA_P Parameter: Timepoint (hr) Value: 6
  misc_feature: MA Experiment 20000111 PARAMETER Experiment Name: At_42deg_Heat_cDNA_P Parameter: Tissue Value: Aerial
  misc_feature: MA Experiment ID: 20000113 Result: Down-regulated in Transcription
  misc_feature: MA Experiment 20000113 PARAMETER Experiment Name: At_42deg_Heat_cDNA_P Parameter: Temperature (deg C) Value: 42 vs. 22
  misc_feature: MA Experiment 20000113 PARAMETER Experiment Name: At_42deg_Heat_cDNA_P Parameter: Timepoint (hr) Value: 8
  misc_feature: MA Experiment 20000113 PARAMETER Experiment Name: At_42deg_Heat_cDNA_P Parameter: Tissue Value: Aerial
  misc_feature: MA Experiment ID: 20000117 Result: Up-regulated in Transcription
  misc_feature: MA Experiment 20000117 PARAMETER Experiment Name: At_100uM_ABA_Mutants_cDNA_P Parameter: Plant Line Value: Columbia
  misc_feature: MA Experiment 20000117 PARAMETER Experiment Name: At_100uM_ABA_Mutants_cDNA_P Parameter: Timepoint (hr) Value: 6
  misc_feature: MA Experiment 20000117 PARAMETER Experiment Name: At_100uM_ABA_Mutants_cDNA_P Parameter: Tissue Value: Aerial
  misc_feature: MA Experiment 20000117 PARAMETER Experiment Name: At_100uM_ABA_Mutants_cDNA_P Parameter: Treatment Value: 100uM ABA vs. No Treatment
  misc_feature: MA Experiment ID: 20000180 Result: Up-regulated in Transcription
  misc_feature: MA Experiment 20000180 PARAMETER Experiment Name: At_Germinating_Seeds_P Parameter: Age (hr) Value: 24 vs. 0
  misc_feature: MA Experiment 20000180 PARAMETER Experiment Name: At_Germinating_Seeds_P Parameter: Tissue Value: Germinating Seeds
  misc_feature: MA Experiment ID: 20000224 Result: Down-regulated in Transcription
  misc_feature: MA Experiment ID: 20000794 Result: Up-regulated in Transcription
  misc_feature: MA Experiment 20000794 PARAMETER Experiment Name: At_Petals_P Parameter: Age (day) Value: 23-25 days
  misc_feature: MA Experiment 20000794 PARAMETER Experiment Name: At_Petals_P Parameter: Plant Line Value: WS
  misc_feature: MA Experiment 20000794 PARAMETER Experiment Name: At_Petals_P Parameter: Tissue Value: Petals vs. Whole plant
gaaagacgttataccttccccatccacattttcttgcttaactgcagaacaacaccaaattcgaccctatcaagttttgattcgtgtctacatagaaagagtctcaattgttctgtccctggacttttttttgtttcgtttttcttgttaagatcgaaaactctgttttggtagatttttgtgttcttgattttgattcaagatggggaggctgtttgtggtgaatcttgaagggaagatctatagctgcaaacactgtaagactcatcttgctacttatgaagacatcatctccaagtcttttcactgcaagcatgggaaagcttatctcttcaataaggttgccaatgtttccattggagagactgaagaaagactgatgatgactggtaaacatactgtggctgatattttctgtgtctcgtgtggatcaatcgttggctggaaatacgagactgctcatgagaagaaccagaagtacaaagaaggaaaatcagtgcttgaaagatttaagatatcgggtcctgatgggagcaactattgggtgagtagccatggaaggcatataggtggaagtgatgcagatgatgcttgaatcatctctctctctctctattctctgatttgaccatttcatgtaaatgtaaattattcaacctccattccaatttcttgtaataagactaaccaatactctttcttctcttgacttattatgtctcagtaaataaaaaatctgattctgtctaatgactatttattggttttctgtgaaaccatc

SEQ ID NO: 29995 - protein, 130 aa, Arabidopsis thaliana
  peptide (1)..(130): Ceres Seq. ID no. 13487059
  misc_feature (1)..(108): Pfam Name: Yippee putative zinc-binding protein Pfam Description: Yippee putative zinc-binding protein
  misc_feature (1)..(108): Pfam Name: Yippee putative zinc-binding protein Pfam Description: Yippee putative zinc-binding protein
  misc_feature (14)..(101): Homolog of NCBI NO: 40255199 NR Description: hypothetical protein MGC10500 [Homo sapiens]
  misc_feature (12)..(101): Homolog of NCBI NO: 20840809 NR Description: similar to hypothetical protein FLJ30213
  misc_feature (1)..(130): Homolog of NCBI NO: 15238881 NR Description: zinc-binding protein-related [Arabidopsis
  misc_feature (1)..(103): Homolog of NCBI NO: 15232001 NR Description: Yippee-related protein [Arabidopsis thaliana]
  misc_feature (1)..(116): Homolog of NCBI NO: 15228759 NR Description: Yippee-related protein [Arabidopsis thaliana]
  misc_feature (14)..(101): Homolog of NCBI NO: 40255199 NR Description: hypothetical protein MGC10500 [Homo sapiens]
  misc_feature (1)..(130): Homolog of NCBI NO: 15238881 NR Description: zinc-binding protein-related [Arabidopsis
  misc_feature (1)..(116): Homolog of NCBI NO: 15228759 NR Description: Yippee-related protein [Arabidopsis thaliana]
  misc_feature (1)..(130): Homolog of NCBI NO: 15225631 NR Description: expressed protein [Arabidopsis thaliana]
  misc_feature (1)..(129): Homolog of NCBI NO: 27923880 NR Description: Yippee-like protein
  misc_feature (1)..(129): Homolog of NCBI NO: 28273361 NR Description: putative zinc binding protein
  misc_feature (1)..(130): Homolog of NCBI NO: 18399156 NR Description: expressed protein [Arabidopsis thaliana]
  misc_feature (1)..(130): Homolog of NCBI NO: 21617953 NR Description: yippee-like protein [Arabidopsis thaliana]
  misc_feature (1)..(103): Homolog of NCBI NO: 15232001 NR Description: Yippee-related protein [Arabidopsis thaliana]
  misc_feature (12)..(101): Homolog of NCBI NO: 20840809 NR Description: similar to hypothetical protein FLJ30213
  misc_feature (1)..(130): Homolog of NCBI NO: 21617953 NR Description: yippee-like protein [Arabidopsis thaliana]
  misc_feature (1)..(130): Homolog of NCBI NO: 18399156 NR Description: expressed protein [Arabidopsis thaliana]
  misc_feature (1)..(129): Homolog of NCBI NO: 28273361 NR Description: putative zinc binding protein
  misc_feature (1)..(129): Homolog of NCBI NO: 27923880 NR Description: Yippee-like protein
  misc_feature (1)..(130): Homolog of NCBI NO: 15225631 NR Description: expressed protein [Arabidopsis thaliana]
MGRLFVVNLEGKIYSCKHCKTHLATYEDIISKSFHCKHGKAYLFNKVANVSIGETEERLMMTGKHTVADIFCVSCGSIVGWKYETAHEKNQKYKEGKSVLERFKISGPDGSNYWVSSHGRHIGGSDADDA

SEQ ID NO: 29996 - protein, 71 aa, Arabidopsis thaliana
  peptide (1)..(71): Ceres Seq. ID no. 13487060
  misc_feature (1)..(42): Homolog of NCBI NO: 40255199 NR Description: hypothetical protein MGC10500 [Homo sapiens]
  misc_feature (1)..(42): Homolog of NCBI NO: 20840809 NR Description: similar to hypothetical protein FLJ30213
  misc_feature (1)..(71): Homolog of NCBI NO: 15238881 NR Description: zinc-binding protein-related [Arabidopsis
  misc_feature (1)..(44): Homolog of NCBI NO: 15232001 NR Description: Yippee-related protein [Arabidopsis thaliana]
  misc_feature (1)..(57): Homolog of NCBI NO: 15228759 NR Description: Yippee-related protein [Arabidopsis thaliana]
  misc_feature (1)..(71): Homolog of NCBI NO: 21617953 NR Description: yippee-like protein [Arabidopsis thaliana]
  misc_feature (1)..(71): Homolog of NCBI NO: 18399156 NR Description: expressed protein [Arabidopsis thaliana]
  misc_feature (1)..(70): Homolog of NCBI NO: 28273361 NR Description: putative zinc binding protein
  misc_feature (1)..(70): Homolog of NCBI NO: 27923880 NR Description: Yippee-like protein
  misc_feature (1)..(71): Homolog of NCBI NO: 15225631 NR Description: expressed protein [Arabidopsis thaliana]
  misc_feature (1)..(42): Homolog of NCBI NO: 40255199 NR Description: hypothetical protein MGC10500 [Homo sapiens]
  misc_feature (1)..(42): Homolog of NCBI NO: 20840809 NR Description: similar to hypothetical protein FLJ30213
  misc_feature (1)..(71): Homolog of NCBI NO: 15238881 NR Description: zinc-binding protein-related [Arabidopsis
  misc_feature (1)..(44): Homolog of NCBI NO: 15232001 NR Description: Yippee-related protein [Arabidopsis thaliana]
  misc_feature (1)..(57): Homolog of NCBI NO: 15228759 NR Description: Yippee-related protein [Arabidopsis thaliana]
  misc_feature (1)..(71): Homolog of NCBI NO: 21617953 NR Description: yippee-like protein [Arabidopsis thaliana]
  misc_feature (1)..(71): Homolog of NCBI NO: 18399156 NR Description: expressed protein [Arabidopsis thaliana]
  misc_feature (1)..(70): Homolog of NCBI NO: 28273361 NR Description: putative zinc binding protein
  misc_feature (1)..(70): Homolog of NCBI NO: 27923880 NR Description: Yippee-like protein
  misc_feature (1)..(71): Homolog of NCBI NO: 15225631 NR Description: expressed protein [Arabidopsis thaliana]
MMTGKHTVADIFCVSCGSIVGWKYETAHEKNQKYKEGKSVLERFKISGPDGSNYWVSSHGRHIGGSDADDA

SEQ ID NO: 29997 - protein, 70 aa, Arabidopsis thaliana
  peptide (1)..(70): Ceres Seq. ID no. 13487061
  misc_feature (1)..(41): Homolog of NCBI NO: 40255199 NR Description: hypothetical protein MGC10500 [Homo sapiens]
  misc_feature (1)..(41): Homolog of NCBI NO: 20840809 NR Description: similar to hypothetical protein FLJ30213
  misc_feature (1)..(70): Homolog of NCBI NO: 15238881 NR Description: zinc-binding protein-related [Arabidopsis
  misc_feature (1)..(43): Homolog of NCBI NO: 15232001 NR Description: Yippee-related protein [Arabidopsis thaliana]
  misc_feature (1)..(56): Homolog of NCBI NO: 15228759 NR Description: Yippee-related protein [Arabidopsis thaliana]
  misc_feature (1)..(70): Homolog of NCBI NO: 21617953 NR Description: yippee-like protein [Arabidopsis thaliana]
  misc_feature (1)..(70): Homolog of NCBI NO: 18399156 NR Description: expressed protein [Arabidopsis thaliana]
  misc_feature (1)..(69): Homolog of NCBI NO: 28273361 NR Description: putative zinc binding protein
  misc_feature (1)..(69): Homolog of NCBI NO: 27923880 NR Description: Yippee-like protein
  misc_feature (1)..(70): Homolog of NCBI NO: 15225631 NR Description: expressed protein [Arabidopsis thaliana]
  misc_feature (1)..(41): Homolog of NCBI NO: 40255199 NR Description: hypothetical protein MGC10500 [Homo sapiens]
  misc_feature (1)..(41): Homolog of NCBI NO: 20840809 NR Description: similar to hypothetical protein FLJ30213
  misc_feature (1)..(70): Homolog of NCBI NO: 15238881 NR Description: zinc-binding protein-related [Arabidopsis
  misc_feature (1)..(43): Homolog of NCBI NO: 15232001 NR Description: Yippee-related protein [Arabidopsis thaliana]
  misc_feature (1)..(56): Homolog of NCBI NO: 15228759 NR Description: Yippee-related protein [Arabidopsis thaliana]
  misc_feature (1)..(70): Homolog of NCBI NO: 21617953 NR Description: yippee-like protein [Arabidopsis thaliana]
  misc_feature (1)..(70): Homolog of NCBI NO: 18399156 NR Description: expressed protein [Arabidopsis thaliana]
  misc_feature (1)..(69): Homolog of NCBI NO: 28273361 NR Description: putative zinc binding protein
  misc_feature (1)..(69): Homolog of NCBI NO: 27923880 NR Description: Yippee-like protein
  misc_feature (1)..(70): Homolog of NCBI NO: 15225631 NR Description: expressed protein [Arabidopsis thaliana]
MTGKHTVADIFCVSCGSIVGWKYETAHEKNQKYKEGKSVLERFKISGPDGSNYWVSSHGRHIGGSDADDA

SEQ ID NO: 29998 - DNA, 1635 bp, Arabidopsis thaliana
  misc_feature (1)..(1635): Ceres Seq. ID no. 12327239
  misc_feature: MA Experiment ID: 108573 Result: Up-regulated in Transcription
  misc_feature: MA Experiment 108573 PARAMETER Experiment Name: At_Drought_cDNA_P Parameter: Timepoint (hr) Value: 6
  misc_feature: MA Experiment 108573 PARAMETER Experiment Name: At_Drought_cDNA_P Parameter: Tissue Value: Aerial
  misc_feature: MA Experiment 108573 PARAMETER Experiment Name: At_Drought_cDNA_P Parameter: Treatment Value: Drought vs. No Drought
  misc_feature: MA Experiment ID: 20000093 Result: Up-regulated in Transcription
  misc_feature: MA Experiment 20000093 PARAMETER Experiment Name: At_42deg_Heat_cDNA_P Parameter: Temperature (deg C) Value: 42 vs. 22
  misc_feature: MA Experiment 20000093 PARAMETER Experiment Name: At_42deg_Heat_cDNA_P Parameter: Timepoint (hr) Value: 0.5
  misc_feature: MA Experiment 20000093 PARAMETER Experiment Name: At_42deg_Heat_cDNA_P Parameter: Tissue Value: Aerial
  misc_feature: MA Experiment ID: 20000184 Result: Up-regulated in Transcription
  misc_feature: MA Experiment 20000184 PARAMETER Experiment Name: At_Shoots__P Parameter: Age (day) Value: 7
  misc_feature: MA Experiment 20000184 PARAMETER Experiment Name: At_Shoots__P Parameter: Tissue Value: Shoots vs. Whole Plant
  misc_feature: MA Experiment ID: 20000224 Result: Down-regulated in Transcription
aatctctccttctttagattcctttctatcttcttctcttctcaaagatctgattctctcaagtctcaccaatggcgataattctccgttcatcagatccactcctctcacgaatccatccggaaccacaagaaatcgaccacttcgataacctcccagactcaatcctcctcctcatcttcaacaacatcggcgacgtcaaagccttaggtcgttgctccgtcgtctccaaaagattccattccttaatccctcaagtcgaaaatgtcttcgttcgtgtcgattgcgttatctccgacgacgattcttcctctctcctctccgataaacctcgatccgcctccgccgcttctcctttctccgccattttccgtctcgtcttcaagccgttacaagctttgggacagttccttaaacgctcaggttcttcttctcttccttcaggatcatctccttcttcgttgttgattagtggtggtgatgatggagagattgaacaaggaggtgtaacgcatcattcaccgactcaggttttgaaaaacttcgatgagattaagtttcttaaaatcgagcttcctagtggtgaattagggattgatgatggtgttttattgaaatggagagctgaatttggttctactctcgagaattgtgtgatcctcggtgcttcctctgtgattccgccgacgaattcggataagacggaagcgagttcggctcccgtcgcggcggtggaagataatggaagtataccggaatcgttttatacaaacggagggcttaagctacgtgttgtatggactataagctctttgattgctgcttccgctagacattacttgttgcaaccgattatagcagagcataagacgcttgatagtttagtgcttactgatgttgatggtcaaggagttttgtgtatgaatcgagatcagttagaggaattagagtgaaaccattgtcagcttcttcagcttctaagaggactcttgtacctgctttgaatatgagactttggtatgctccttctttggaattgcctgatgggactgtgttgaagggagctacgcttgtggcgattaggccgagtgagtcgaggaaggaggtgtgtgatgtgtcttgggtttcttctgcgtttgatgagccttatggggtagctgctaagatgttggttaagagaaggacttattgtcttgaaatgaattcgttctaaagcttgacgatttcgctaagtcggatctgaggtgaatgaatcacaaaggctaaccaggttttgaaagagagagactacaatgcataagatcagttttgtatgcagtgtgactaatcttagattcaccaatggagctcaattctatgtgttattggtctattggaaggttcgaattccgtctgcttggtcatcggaaaccgcattcgctggctgttttttgttttagctggcaaagcaatcatgtaagagcaagttttaatcttataaaatcttccatgtagcaagtttttctttcattatttatgtgaatattgtttgtaggtaagagatacagttgctttgcttctccttgtcttttgtatacttgtcccaagttgtttaaaaaataatattgagcaatgtaaagtactttattactttct

SEQ ID NO: 29999 - protein, 293 aa, Arabidopsis thaliana
  peptide (1)..(293): Ceres Seq. ID no. 12327240
  misc_feature (22)..(76): Homolog of NCBI NO: 15219845 NR Description: hypothetical protein; protein id: At1g22220.1
  misc_feature (151)..(292): Homolog of NCBI NO: 15219845 NR Description: hypothetical protein; protein id: At1g22220.1
  misc_feature (22)..(135): Homolog of NCBI NO: 18411823 NR Description: expressed protein
  misc_feature (150)..(291): Homolog of NCBI NO: 18411823 NR Description: expressed protein
  misc_feature (11)..(137): Homolog of NCBI NO: 34909194 NR Description: P0425G02.20 [Oryza sativa (japonica
  misc_feature (146)..(293): Homolog of NCBI NO: 34909194 NR Description: P0425G02.20 [Oryza sativa (japonica
  misc_feature (23)..(292): Homolog of NCBI NO: 34909910 NR Description: P0665A11.15 [Oryza sativa (japonica
  misc_feature (1)..(292): Homolog of NCBI NO: 18397400 NR Description: expressed protein
  misc_feature (1)..(292): Homolog of NCBI NO: 15237391 NR Description: putative protein
  misc_feature (1)..(292): Homolog of NCBI NO: 15236865 NR Description: hypothetical protein; protein id: At4g18380.1
MAIILRSSDPLLSRIHPEPQEIDHFDNLPDSILLLIFNNIGDVKALGRCSVVSKRFHSLIPQVENVFVRVDCVISDDDSSSLLSDKPRSASAASPFSAIFRLVFKPLQALGQFLKRSGSSSLPSGSSPSSLLISGGDDGEIEQGGVTHHSPTQVLKNFDEIKFLKIELPSGELGIDDGVLLKWRAEFGSTLENCVILGASSVIPPTNSDKTEASSAPVAAVEDNGSIPESFYTNGGLKLRVVWTISSLIAASARHYLLQPIIAEHKTLDSLVLTDVDGQGVLCMNRDQLEELE

SEQ ID NO: 30000 - DNA, 832 bp, Arabidopsis thaliana; identical to SEQ ID NO: 26742
  misc_feature (1)..(832): Ceres Seq. ID no. 12482239
  misc_feature: MA Experiment ID: 108595 Result: Down-regulated in Transcription
  misc_feature: MA Experiment 108595 PARAMETER Experiment Name: At_Ler-pi_Ovule_cDNA_P Parameter: Plant Line Value: null
  misc_feature: MA Experiment ID: 20000180 Result: Up-regulated in Transcription
  misc_feature: MA Experiment 20000180 PARAMETER Experiment Name: At_Germinating_Seeds_P Parameter: Age (hr) Value: 24 vs. 0
  misc_feature: MA Experiment 20000180 PARAMETER Experiment Name: At_Germinating_Seeds_P Parameter: Tissue Value: Germinating Seeds
  misc_feature: MA Experiment ID: 20000184 Result: Up-regulated in Transcription
  misc_feature: MA Experiment 20000184 PARAMETER Experiment Name: At_Shoots__P Parameter: Age (day) Value: 7
  misc_feature: MA Experiment 20000184 PARAMETER Experiment Name: At_Shoots__P Parameter: Tissue Value: Shoots vs. Whole Plant
  misc_feature: MA Experiment ID: 20000185 Result: Down-regulated in Transcription
  misc_feature: MA Experiment 20000185 PARAMETER Experiment Name: At_Roots__P Parameter: Age (day) Value: 7 vs. 21
  misc_feature: MA Experiment 20000185 PARAMETER Experiment Name: At_Roots__P Parameter: Organism Value: A. thaliana
  misc_feature: MA Experiment 20000185 PARAMETER Experiment Name: At_Roots__P Parameter: Tissue Value: Roots vs. Whole Plant
  misc_feature: MA Experiment ID: 20000269 Result: Down-regulated in Transcription
  misc_feature: MA Experiment 20000269 PARAMETER Experiment Name: At_1mM_KNO3_L-vs-H_Roots_P Parameter: Age (day) Value: 7,10,12
  misc_feature: MA Experiment 20000269 PARAMETER Experiment Name: At_1mM_KNO3_L-vs-H_Roots_P Parameter: Organism Value: A. thaliana
  misc_feature: MA Experiment 20000269 PARAMETER Experiment Name: At_1mM_KNO3_L-vs-H_Roots_P Parameter: Plant Line Value: WS
  misc_feature: MA Experiment 20000269 PARAMETER Experiment Name: At_1mM_KNO3_L-vs-H_Roots_P Parameter: Timepoint (day) Value: 7,10,12
  misc_feature: MA Experiment 20000269 PARAMETER Experiment Name: At_1mM_KNO3_L-vs-H_Roots_P Parameter: Tissue Value: Roots
  misc_feature: MA Experiment 20000269 PARAMETER Experiment Name: At_1mM_KNO3_L-vs-H_Roots_P Parameter: Treatment Value: 1mM KNO3 vs. 50mM KNO3
  misc_feature: MA Experiment ID: 20000437 Result: Down-regulated in Transcription
  misc_feature: MA Experiment 20000437 PARAMETER Experiment Name: At_Drought_P Parameter: Age (day) Value: 8
  misc_feature: MA Experiment 20000437 PARAMETER Experiment Name: At_Drought_P Parameter: Organism Value: A. thaliana
  misc_feature: MA Experiment 20000437 PARAMETER Experiment Name: At_Drought_P Parameter: Plant Line Value: WS
  misc_feature: MA Experiment 20000437 PARAMETER Experiment Name: At_Drought_P Parameter: Timepoint (hr) Value: 24
  misc_feature: MA Experiment 20000437 PARAMETER Experiment Name: At_Drought_P Parameter: Tissue Value: Whole Plant
  misc_feature: MA Experiment 20000437 PARAMETER Experiment Name: At_Drought_P Parameter: Treatment Value: Drought vs. No Drought
  misc_feature: MA Experiment ID: 20000438 Result: Up-regulated in Transcription
  misc_feature: MA Experiment 20000438 PARAMETER Experiment Name: At_Shoots__P Parameter: Age (day) Value: 14
  misc_feature: MA Experiment 20000438 PARAMETER Experiment Name: At_Shoots__P Parameter: Tissue Value: Shoots vs. Whole Plant
  misc_feature: MA Experiment ID: 20000439 Result: Down-regulated in Transcription
  misc_feature: MA Experiment 20000439 PARAMETER Experiment Name: At_Roots__P Parameter: Age (day) Value: 14 vs. 21
  misc_feature: MA Experiment 20000439 PARAMETER Experiment Name: At_Roots__P Parameter: Organism Value: A. thaliana
  misc_feature: MA Experiment 20000439 PARAMETER Experiment Name: At_Roots__P Parameter: Tissue Value: Roots vs. Whole Plant
  misc_feature: MA Experiment ID: 20000794 Result: Down-regulated in Transcription
  misc_feature: MA Experiment 20000794 PARAMETER Experiment Name: At_Petals_P Parameter: Age (day) Value: 23-25 days
  misc_feature: MA Experiment 20000794 PARAMETER Experiment Name: At_Petals_P Parameter: Plant Line Value: WS
  misc_feature: MA Experiment 20000794 PARAMETER Experiment Name: At_Petals_P Parameter: Tissue Value: Petals vs. Whole plant
  misc_feature: MA Experiment ID: 20001248 Result: Down-regulated in Transcription
  misc_feature: MA Experiment 20001248 PARAMETER Experiment Name: At_Far-red-induction_P Parameter: Age (day) Value: 7
  misc_feature: MA Experiment 20001248 PARAMETER Experiment Name: At_Far-red-induction_P Parameter: Light Value: Far-red vs. White
  misc_feature: MA Experiment 20001248 PARAMETER Experiment Name: At_Far-red-induction_P Parameter: Organism Value: A. thaliana
  misc_feature: MA Experiment 20001248 PARAMETER Experiment Name: At_Far-red-induction_P Parameter: Plant Line Value: Columbia
  misc_feature: MA Experiment 20001248 PARAMETER Experiment Name: At_Far-red-induction_P Parameter: Timepoint (hr) Value: 4
  misc_feature: MA Experiment 20001248 PARAMETER Experiment Name: At_Far-red-induction_P Parameter: Tissue Value: Whole Plant
  misc_feature: MA Experiment ID: 20001555 Result: Down-regulated in Transcription
  misc_feature: MA Experiment 20001555 PARAMETER Experiment Name: At_Drought_Soil_Dry_P Parameter: Age (day) Value: 24
  misc_feature: MA Experiment 20001555 PARAMETER Experiment Name: At_Drought_Soil_Dry_P Parameter: Organism Value: A. thaliana
  misc_feature: MA Experiment 20001555 PARAMETER Experiment Name: At_Drought_Soil_Dry_P Parameter: Plant Line Value: WS
  misc_feature: MA Experiment 20001555 PARAMETER Experiment Name: At_Drought_Soil_Dry_P Parameter: Post Timepoint (hr) Value: None
  misc_feature: MA Experiment 20001555 PARAMETER Experiment Name: At_Drought_Soil_Dry_P Parameter: Post-Treatment Value: None
  misc_feature: MA Experiment 20001555 PARAMETER Experiment Name: At_Drought_Soil_Dry_P Parameter: Timepoint (day) Value: 10
  misc_feature: MA Experiment 20001555 PARAMETER Experiment Name: At_Drought_Soil_Dry_P Parameter: Treatment Value: Drought vs. No Drought
  misc_feature: MA Experiment ID: 20001556 Result: Down-regulated in Transcription
  misc_feature: MA Experiment 20001556 PARAMETER Experiment Name: At_Drought_Soil_Dry_P Parameter: Age (day) Value: 26
  misc_feature: MA Experiment 20001556 PARAMETER Experiment Name: At_Drought_Soil_Dry_P Parameter: Organism Value: A. thaliana
  misc_feature: MA Experiment 20001556 PARAMETER Experiment Name: At_Drought_Soil_Dry_P Parameter: Plant Line Value: WS
  misc_feature: MA Experiment 20001556 PARAMETER Experiment Name: At_Drought_Soil_Dry_P Parameter: Post Timepoint (hr) Value: None
  misc_feature: MA Experiment 20001556 PARAMETER Experiment Name: At_Drought_Soil_Dry_P Parameter: Post-Treatment Value: None
  misc_feature: MA Experiment 20001556 PARAMETER Experiment Name: At_Drought_Soil_Dry_P Parameter: Timepoint (day) Value: 12
  misc_feature: MA Experiment 20001556 PARAMETER Experiment Name: At_Drought_Soil_Dry_P Parameter: Treatment Value: Drought vs. No Drought
  misc_feature: MA Experiment ID: 20001557 Result: Down-regulated in Transcription
  misc_feature: MA Experiment 20001557 PARAMETER Experiment Name: At_Drought_Soil_Dry_P Parameter: Age (day) Value: 27
  misc_feature: MA Experiment 20001557 PARAMETER Experiment Name: At_Drought_Soil_Dry_P Parameter: Organism Value: A. thaliana
  misc_feature: MA Experiment 20001557 PARAMETER Experiment Name: At_Drought_Soil_Dry_P Parameter: Plant Line Value: WS
  misc_feature: MA Experiment 20001557 PARAMETER Experiment Name: At_Drought_Soil_Dry_P Parameter: Post Timepoint (hr) Value: 3
  misc_feature: MA Experiment 20001557 PARAMETER Experiment Name: At_Drought_Soil_Dry_P Parameter: Post-Treatment Value: Re-Water vs. No Drought
  misc_feature: MA Experiment 20001557 PARAMETER Experiment Name: At_Drought_Soil_Dry_P Parameter: Timepoint (day) Value: 13
  misc_feature: MA Experiment 20001557 PARAMETER Experiment Name: At_Drought_Soil_Dry_P Parameter: Treatment Value: Drought vs. No Drought
  misc_feature: MA Experiment ID: 20001559 Result: Down-regulated in Transcription
  misc_feature: MA Experiment 20001559 PARAMETER Experiment Name: At_Drought_Soil_Dry_P Parameter: Age (day) Value: 28
  misc_feature: MA Experiment 20001559 PARAMETER Experiment Name: At_Drought_Soil_Dry_P Parameter: Organism Value: A. thaliana
  misc_feature: MA Experiment 20001559 PARAMETER Experiment Name: At_Drought_Soil_Dry_P Parameter: Plant Line Value: WS
  misc_feature: MA Experiment 20001559 PARAMETER Experiment Name: At_Drought_Soil_Dry_P Parameter: Post Timepoint (hr) Value: 29
  misc_feature: MA Experiment 20001559 PARAMETER Experiment Name: At_Drought_Soil_Dry_P Parameter: Post-Treatment Value: Re-Water vs. No Drought
  misc_feature: MA Experiment 20001559 PARAMETER Experiment Name: At_Drought_Soil_Dry_P Parameter: Timepoint (day) Value: 14
  misc_feature: MA Experiment 20001559 PARAMETER Experiment Name: At_Drought_Soil_Dry_P Parameter: Treatment Value: Drought vs. No Drought
  misc_feature: MA Experiment ID: 20001904 Result: Down-regulated in Transcription
  misc_feature: MA Experiment 20001904 PARAMETER Experiment Name: At_Drought_Reproduction_P Parameter: Age (day) Value: 37
  misc_feature: MA Experiment 20001904 PARAMETER Experiment Name: At_Drought_Reproduction_P Parameter: Organism Value: A. thaliana
  misc_feature: MA Experiment 20001904 PARAMETER Experiment Name: At_Drought_Reproduction_P Parameter: Plant Line Value: WS
  misc_feature: MA Experiment 20001904 PARAMETER Experiment Name: At_Drought_Reproduction_P Parameter: Timepoint (day) Value: 7
  misc_feature: MA Experiment 20001904 PARAMETER Experiment Name: At_Drought_Reproduction_P Parameter: Tissue Value: Rosettes
  misc_feature: MA Experiment 20001904 PARAMETER Experiment Name: At_Drought_Reproduction_P Parameter: Treatment Value: Drought vs. No Drought
  misc_feature: MA Experiment ID: 20001905 Result: Down-regulated in Transcription
  misc_feature: MA Experiment 20001905 PARAMETER Experiment Name: At_Drought_Reproduction_P Parameter: Age (day) Value: 40
  misc_feature: MA Experiment 20001905 PARAMETER Experiment Name: At_Drought_Reproduction_P Parameter: Organism Value: A. thaliana
  misc_feature: MA Experiment 20001905 PARAMETER Experiment Name: At_Drought_Reproduction_P Parameter: Plant Line Value: WS
  misc_feature: MA Experiment 20001905 PARAMETER Experiment Name: At_Drought_Reproduction_P Parameter: Timepoint (day) Value: 10
  misc_feature: MA Experiment 20001905 PARAMETER Experiment Name: At_Drought_Reproduction_P Parameter: Tissue Value: Rosettes
  misc_feature: MA Experiment 20001905 PARAMETER Experiment Name: At_Drought_Reproduction_P Parameter: Treatment Value: Drought vs. No Drought
  misc_feature: MA Experiment ID: 20001906 Result: Down-regulated in Transcription
  misc_feature: MA Experiment 20001906 PARAMETER Experiment Name: At_Drought_Reproduction_P Parameter: Age (day) Value: 35
  misc_feature: MA Experiment 20001906 PARAMETER Experiment Name: At_Drought_Reproduction_P Parameter: Organism Value: A. thaliana
  misc_feature: MA Experiment 20001906 PARAMETER Experiment Name: At_Drought_Reproduction_P Parameter: Plant Line Value: WS
  misc_feature: MA Experiment 20001906 PARAMETER Experiment Name: At_Drought_Reproduction_P Parameter: Timepoint (day) Value: 5
  misc_feature: MA Experiment 20001906 PARAMETER Experiment Name: At_Drought_Reproduction_P Parameter: Tissue Value: Siliques
  misc_feature: MA Experiment 20001906 PARAMETER Experiment Name: At_Drought_Reproduction_P Parameter: Treatment Value: Drought vs. No Drought
  misc_feature: MA Experiment ID: 20001908 Result: Down-regulated in Transcription
  misc_feature: MA Experiment 20001908 PARAMETER Experiment Name: At_Drought_Reproduction_P Parameter: Age (day) Value: 40
  misc_feature: MA Experiment 20001908 PARAMETER Experiment Name: At_Drought_Reproduction_P Parameter: Organism Value: A. thaliana
  misc_feature: MA Experiment 20001908 PARAMETER Experiment Name: At_Drought_Reproduction_P Parameter: Plant Line Value: WS
  misc_feature: MA Experiment 20001908 PARAMETER Experiment Name: At_Drought_Reproduction_P Parameter: Timepoint (day) Value: 10
  misc_feature: MA Experiment 20001908 PARAMETER Experiment Name: At_Drought_Reproduction_P Parameter: Tissue Value: Siliques
  misc_feature: MA Experiment 20001908 PARAMETER Experiment Name: At_Drought_Reproduction_P Parameter: Treatment Value: Drought vs. No Drought

SEQ ID NO: 30001 - protein, 235 aa, Arabidopsis thaliana; identical to SEQ ID NO: 26743
  peptide (1)..(235): Ceres Seq. ID no. 12482240
  misc_feature (127)..(160): Pfam Name: Photosystem II protein Y (PsbY) Pfam Description: Photosystem II protein Y (PsbY)
  misc_feature (127)..(160): Pfam Name: Photosystem II protein Y (PsbY) Pfam Description: Photosystem II protein Y (PsbY)
  misc_feature (46)..(233): Homolog of NCBI NO: 6093830 NR Description: Photosystem II core complex proteins psbY,
  misc_feature (51)..(235): Homolog of NCBI NO: 21593330 NR Description: unknown [Arabidopsis thaliana]
  misc_feature (51)..(235): Homolog of NCBI NO: 21593330 NR Description: unknown [Arabidopsis thaliana]
  misc_feature (47)..(235): Homolog of NCBI NO: 15220530 NR Description: F12A21.13
  misc_feature (46)..(233): Homolog of NCBI NO: 6093830 NR Description: Photosystem II core complex proteins psbY,
  misc_feature (47)..(235): Homolog of NCBI NO: 15220530 NR Description: F12A21.13

SEQ ID NO: 30002 - protein, 189 aa, Arabidopsis thaliana; identical to SEQ ID NO: 26744
  peptide (1)..(189): Ceres Seq. ID no. 12482241
  misc_feature (81)..(114): Pfam Name: Photosystem II protein Y (PsbY) Pfam Description: Photosystem II protein Y (PsbY)
  misc_feature (81)..(114): Pfam Name: Photosystem II protein Y (PsbY) Pfam Description: Photosystem II protein Y (PsbY)
  misc_feature (1)..(187): Homolog of NCBI NO: 6093830 NR Description: Photosystem II core complex proteins psbY,
  misc_feature (5)..(189): Homolog of NCBI NO: 21593330 NR Description: unknown [Arabidopsis thaliana]
  misc_feature (5)..(189): Homolog of NCBI NO: 21593330 NR Description: unknown [Arabidopsis thaliana]
  misc_feature (1)..(189): Homolog of NCBI NO: 15220530 NR Description: F12A21.13
  misc_feature (1)..(187): Homolog of NCBI NO: 6093830 NR Description: Photosystem II core complex proteins psbY,
  misc_feature (1)..(189): Homolog of NCBI NO: 15220530 NR Description: F12A21.13

SEQ ID NO: 30003 - protein, 185 aa, Arabidopsis thaliana; identical to SEQ ID NO: 26745
  peptide (1)..(185): Ceres Seq. ID no. 12482242
  misc_feature (77)..(110): Pfam Name: Photosystem II protein Y (PsbY) Pfam Description: Photosystem II protein Y (PsbY)
  misc_feature (77)..(110): Pfam Name: Photosystem II protein Y (PsbY) Pfam Description: Photosystem II protein Y (PsbY)
  misc_feature (1)..(183): Homolog of NCBI NO: 6093830 NR Description: Photosystem II core complex proteins psbY,
  misc_feature (1)..(185): Homolog of NCBI NO: 21593330 NR Description: unknown [Arabidopsis thaliana]
  misc_feature (1)..(185): Homolog of NCBI NO: 21593330 NR Description: unknown [Arabidopsis thaliana]
  misc_feature (1)..(185): Homolog of NCBI NO: 15220530 NR Description: F12A21.13
  misc_feature (1)..(183): Homolog of NCBI NO: 6093830 NR Description: Photosystem II core complex proteins psbY,
  misc_feature (1)..(185): Homolog of NCBI NO: 15220530 NR Description: F12A21.13

SEQ ID NO: 30004 - DNA, 1055 bp, Arabidopsis thaliana
  misc_feature (1)..(1055): Ceres Seq. ID no. 13503881
  misc_feature: MA Experiment ID: 108433 Result: Up-regulated in Transcription
  misc_feature: MA Experiment 108433 PARAMETER Experiment Name: At_rhl_Mutant2_cDNA_P Parameter: Age (day) Value: 7
  misc_feature: MA Experiment 108433 PARAMETER Experiment Name: At_rhl_Mutant2_cDNA_P Parameter: Organism Value: A. thaliana
  misc_feature: MA Experiment 108433 PARAMETER Experiment Name: At_rhl_Mutant2_cDNA_P Parameter: Plant Line Value: rhl Mutant vs. wt landsburg
  misc_feature: MA Experiment 108433 PARAMETER Experiment Name: At_rhl_Mutant2_cDNA_P Parameter: Tissue Value: Roots
  misc_feature: MA Experiment ID: 108461 Result: Up-regulated in Transcription
  misc_feature: MA Experiment 108461 PARAMETER Experiment Name: At_Germinating_Seeds_cDNA_P Parameter: Age (day) Value: 1 vs. 0
  misc_feature: MA Experiment 108461 PARAMETER Experiment Name: At_Germinating_Seeds_cDNA_P Parameter: Tissue Value: Germinating Seeds
  misc_feature: MA Experiment ID: 108462 Result: Up-regulated in Transcription
  misc_feature: MA Experiment 108462 PARAMETER Experiment Name: At_Germinating_Seeds_cDNA_P Parameter: Age (day) Value: 2 vs. 0
  misc_feature: MA Experiment 108462 PARAMETER Experiment Name: At_Germinating_Seeds_cDNA_P Parameter: Tissue Value: Germinating Seeds
  misc_feature: MA Experiment ID: 108463 Result: Up-regulated in Transcription
  misc_feature: MA Experiment 108463 PARAMETER Experiment Name: At_Germinating_Seeds_cDNA_P Parameter: Age (day) Value: 3 vs. 0
  misc_feature: MA Experiment 108463 PARAMETER Experiment Name: At_Germinating_Seeds_cDNA_P Parameter: Tissue Value: Germinating Seeds
  misc_feature: MA Experiment ID: 108464 Result: Up-regulated in Transcription
  misc_feature: MA Experiment 108464 PARAMETER Experiment Name: At_Germinating_Seeds_cDNA_P Parameter: Age (day) Value: 4 vs. 0
  misc_feature: MA Experiment 108464 PARAMETER Experiment Name: At_Germinating_Seeds_cDNA_P Parameter: Tissue Value: Germinating Seeds
  misc_feature: MA Experiment ID: 20000179 Result: Up-regulated in Transcription
  misc_feature: MA Experiment 20000179 PARAMETER Experiment Name: At_Germinating_Seeds_P Parameter: Age (hr) Value: 6 vs. 0
  misc_feature: MA Experiment 20000179 PARAMETER Experiment Name: At_Germinating_Seeds_P Parameter: Tissue Value: Germinating Seeds
  misc_feature: MA Experiment ID: 20000180 Result: Up-regulated in Transcription
  misc_feature: MA Experiment 20000180 PARAMETER Experiment Name: At_Germinating_Seeds_P Parameter: Age (hr) Value: 24 vs. 0
  misc_feature: MA Experiment 20000180 PARAMETER Experiment Name: At_Germinating_Seeds_P Parameter: Tissue Value: Germinating Seeds
  misc_feature: MA Experiment ID: 20000185 Result: Up-regulated in Transcription
  misc_feature: MA Experiment 20000185 PARAMETER Experiment Name: At_Roots__P Parameter: Age (day) Value: 7 vs. 21
  misc_feature: MA Experiment 20000185 PARAMETER Experiment Name: At_Roots__P Parameter: Organism Value: A. thaliana
  misc_feature: MA Experiment 20000185 PARAMETER Experiment Name: At_Roots__P Parameter: Tissue Value: Roots vs. Whole Plant
  misc_feature: MA Experiment ID: 20000224 Result: Up-regulated in Transcription
  misc_feature: MA Experiment ID: 20000227 Result: Down-regulated in Transcription
  misc_feature: MA Experiment 20000227 PARAMETER Experiment Name: At_Root-Tips-vs-Tops_P Parameter: Tissue Value: Root Tips vs. Root Tops
  misc_feature: MA Experiment ID: 20000235 Result: Up-regulated in Transcription
  misc_feature: MA Experiment 20000235 PARAMETER Experiment Name: At_Siliques_P Parameter: Age (day) Value: 21
  misc_feature: MA Experiment 20000235 PARAMETER Experiment Name: At_Siliques_P Parameter: Organism Value: A. thaliana
  misc_feature: MA Experiment 20000235 PARAMETER Experiment Name: At_Siliques_P Parameter: Plant Line Value: WS
  misc_feature: MA Experiment 20000235 PARAMETER Experiment Name: At_Siliques_P Parameter: Tissue Value: 5-10mm Siliques vs. Whole Plant
  misc_feature: MA Experiment ID: 20000439 Result: Up-regulated in Transcription
  misc_feature: MA Experiment 20000439 PARAMETER Experiment Name: At_Roots__P Parameter: Age (day) Value: 14 vs. 21
  misc_feature: MA Experiment 20000439 PARAMETER Experiment Name: At_Roots__P Parameter: Organism Value: A. thaliana
  misc_feature: MA Experiment 20000439 PARAMETER Experiment Name: At_Roots__P Parameter: Tissue Value: Roots vs. Whole Plant
  misc_feature: MA Experiment ID: 20001905 Result: Down-regulated in Transcription
  misc_feature: MA Experiment 20001905 PARAMETER Experiment Name: At_Drought_Reproduction_P Parameter: Age (day) Value: 40
  misc_feature: MA Experiment 20001905 PARAMETER Experiment Name: At_Drought_Reproduction_P Parameter: Organism Value: A. thaliana
  misc_feature: MA Experiment 20001905 PARAMETER Experiment Name: At_Drought_Reproduction_P Parameter: Plant Line Value: WS
  misc_feature: MA Experiment 20001905 PARAMETER Experiment Name: At_Drought_Reproduction_P Parameter: Timepoint (day) Value: 10
  misc_feature: MA Experiment 20001905 PARAMETER Experiment Name: At_Drought_Reproduction_P Parameter: Tissue Value: Rosettes
  misc_feature: MA Experiment 20001905 PARAMETER Experiment Name: At_Drought_Reproduction_P Parameter: Treatment Value: Drought vs. No Drought
agcactataccatatctcttttttcttccgtttttccacacattgtctctacctttccctttttcagatttgaccctttgttttcaaaagaaacgatttttagtagccgccggggaatcaggagaatggtgtctccggagaatacgaactggcttagtgattaccctttgattgaaggtgctttctctgatcagaaccccactttcccttggcagatagatggctcagctactgtcagtgttgaagtggatggcttcctttgtgatgcagatgtgatcaaagaaccaagttcaaggaagaggatcaaaactgaatcttgcactggttctaactcgaaagcttgtagggagaaacaaagacgtgatagactaaatgacaagtttacggagttgagttccgtattggaacctgggagaactccaaaaacagacaaggttgctattatcaatgatgcaattcgcatggtgaatcaagcaagagatgaagcgcagaaactaaaggacttgaactcaagcctccaggagaaaatcaaggagttgaaggatgagaagaacgagctgcgtgatgagaaacagaagcttaaggtcgagaaggagagaatcgatcagcaactgaaagctattaagacacagcctcagcctcaaccttgtttcttaccaaatccgcaaacactctctcaagctcaagctcctggaagcaagcttgtccctttcacaacttatcccggctttgcaatgtggcaattcatgcctcctgctgctgttgatacctcacaggaccatgtccttcgtcctccagttgcttaaagctgctgcttctctctactactattaacggttctgtaagattacttcttacgcgcttttttctgatgtaatgattctcacattctgtgattggtgacatagtccactgcaacttaaaatgtaaaattgaaataagcttgcactaaaaatcaaatctcattgtgcaaaaagttggataatttggaaatcattgttttacagattgtggattcagaggaatatgtaaatgtgtaggaagtttctttgaat

SEQ ID NO: 30005 - protein, 267 aa, Arabidopsis thaliana
  peptide (1)..(267): Ceres Seq. ID no. 13503882
  misc_feature (108)..(159): Pfam Name: Helix-loop-helix DNA-binding domain Pfam Description: Helix-loop-helix DNA-binding domain
  misc_feature (73)..(227): Homolog of NCBI NO: 7487183 NR Description: hypothetical protein T19K4.190 - Arabidopsis
  misc_feature (93)..(267): Homolog of NCBI NO: 22331274 NR Description: bHLH protein [Arabidopsis thaliana]
  misc_feature (93)..(267): Homolog of NCBI NO: 20127030 NR Description: putative bHLH transcription factor [Arabidopsis
  misc_feature (92)..(267): Homolog of NCBI NO: 30682847 NR Description: bHLH protein [Arabidopsis thaliana]
  misc_feature (92)..(267): Homolog of NCBI NO: 18414212 NR Description: bHLH protein [Arabidopsis thaliana]
  misc_feature (68)..(267): Homolog of NCBI NO: 29367409 NR Description: helix-loop-helix-like protein
  misc_feature (49)..(267): Homolog of NCBI NO: 38636768 NR Description: helix-loop-helix-like protein
  misc_feature (42)..(267): Homolog of NCBI NO: 15239706 NR Description: bHLH protein [Arabidopsis thaliana]
  misc_feature (42)..(267): Homolog of NCBI NO: 21592325 NR Description: bHLH transcription factor, putative [Arabidopsis
  misc_feature (42)..(267): Homolog of NCBI NO: 15223710 NR Description: bHLH protein [Arabidopsis thaliana]
HYTISLFSSVFPHIVSTFPFFRFDPLFSKETIFSSRRGIRRMVSPENTNWLSDYPLIEGAFSDQNPTFPWQIDGSATVSVEVDGFLCDADVIKEPSSRKRIKTESCTGSNSKACREKQRRDRLNDKFTELSSVLEPGRTPKTDKVAIINDAIRMVNQARDEAQKLKDLNSSLQEKIKELKDEKNELRDEKQKLKVEKERIDQQLKAIKTQPQPQPCFLPNPQTLSQAQAPGSKLVPFTTYPGFAMWQFMPPAAVDTSQDHVLRPPVA

SEQ ID NO: 30006 - protein, 226 aa, Arabidopsis thaliana
  peptide (1)..(226): Ceres Seq. ID no. 13503883
  misc_feature (67)..(118): Pfam Name: Helix-loop-helix DNA-binding domain Pfam Description: Helix-loop-helix DNA-binding domain
  misc_feature (32)..(186): Homolog of NCBI NO: 7487183 NR Description: hypothetical protein T19K4.190 - Arabidopsis
  misc_feature (52)..(226): Homolog of NCBI NO: 22331274 NR Description: bHLH protein [Arabidopsis thaliana]
  misc_feature (52)..(226): Homolog of NCBI NO: 20127030 NR Description: putative bHLH transcription factor [Arabidopsis
  misc_feature (51)..(226): Homolog of NCBI NO: 30682847 NR Description: bHLH protein [Arabidopsis thaliana]
  misc_feature (51)..(226): Homolog of NCBI NO: 18414212 NR Description: bHLH protein [Arabidopsis thaliana]
  misc_feature (27)..(226): Homolog of NCBI NO: 29367409 NR Description: helix-loop-helix-like protein
  misc_feature (8)..(226): Homolog of NCBI NO: 38636768 NR Description: helix-loop-helix-like protein
  misc_feature (1)..(226): Homolog of NCBI NO: 15239706 NR Description: bHLH protein [Arabidopsis thaliana]
  misc_feature (1)..(226): Homolog of NCBI NO: 21592325 NR Description: bHLH transcription factor, putative [Arabidopsis
  misc_feature (1)..(226): Homolog of NCBI NO: 15223710 NR Description: bHLH protein [Arabidopsis thaliana]
MVSPENTNWLSDYPLIEGAFSDQNPTFPWQIDGSATVSVEVDGFLCDADVIKEPSSRKRIKTESCTGSNSKACREKQRRDRLNDKFTELSSVLEPGRTPKTDKVAIINDAIRMVNQARDEAQKLKDLNSSLQEKIKELKDEKNELRDEKQKLKVEKERIDQQLKAIKTQPQPQPCFLPNPQTLSQAQAPGSKLVPFTTYPGFAMWQFMPPAAVDTSQDHVLRPPVA

SEQ ID NO: 30007 - DNA, 810 bp, Arabidopsis thaliana
  misc_feature (1)..(810): Ceres Seq. ID no. 12332907
  misc_feature: MA Experiment ID: 108434 Result: Up-regulated in Transcription
  misc_feature: MA Experiment 108434 PARAMETER Experiment Name: At_Root_Tips_cDNA_P Parameter: Tissue Value: Root Tips
  misc_feature: MA Experiment ID: 20000495 Result: Up-regulated in Transcription
  misc_feature: MA Experiment 20000495 PARAMETER Experiment Name: At_Guard_Cells_P Parameter: Harvest Date Value: 8/2/2002
  misc_feature: MA Experiment 20000495 PARAMETER Experiment Name: At_Guard_Cells_P Parameter: Organism Value: A. thaliana
  misc_feature: MA Experiment 20000495 PARAMETER Experiment Name: At_Guard_Cells_P Parameter: Tissue Value: Guard Cells vs. Leaves
aagaaaacattcgtagatctatttccgcatctgcttaaacacctacatcgtcgtagatcgcaaaccatggccgtcgctgtagctaagcttctgatctccgccatggcggttttcatgcttgtttctgcttcgttcgcgacctcggaagtgccgttcatggtggttcacaagaaagccactctcaacaggctcaaatctggcgccgaacgcgtctccgtttcctacgacatctataaccaaggatcctcgtcggcgtatgatgtgactctgacagataatagctgggataaaaagacttttgaagttgttaatggaaacacttcaaaatcatgggaaagacttgatgcaggaggtattctgtctcattctatcgaattggaggccaaggttaaaggagtcttctacggtgctcctgctgtcgttactttccgcatccccactaagccagctcttcaggaagcatactcaactccactactacctctagatatcctcgcagacaaacctccaacgaaacctttggacgtggccaagaggttgctggcgaaatatggatcactcgtctccgtgatctccatggtggtttgtttcatatacttggtggcaacacctaagtccaacgtatcaaaggcaagcagcaagaagaagcgttaagttagtgaaatgaaaggtgagaaaggttggtacggtgctgttttctgtttaacagttaaacacagtttcaaaacttgtaagaattagagaacacactttaattttggtgttgcagaggacatacttcaagttcaaagagttattttggttttactt

SEQ ID NO: 30008 - protein, 217 aa, Arabidopsis thaliana
  peptide (1)..(217): Ceres Seq. ID no. 12332908
  misc_feature (35)..(214): Pfam Name: Translocon-associated protein beta (TRAPB) Pfam Description: Translocon-associated protein beta (TRAPB)
  misc_feature (43)..(143): Homolog of NCBI NO: 134931 NR Description: TRANSLOCON-ASSOCIATED PROTEIN, BETA SUBUNIT (TRAP-BETA) (SIGNAL SEQUENCE RECEPTOR BETA SUBUNIT) (SSR-BETA)
  misc_feature (29)..(150): Homolog of NCBI NO: 40643038 NR Description: signal sequence receptor beta-like protein
  misc_feature (34)..(143): Homolog of NCBI NO: 27692921 NR Description: similar to RIKEN cDNA 1500032E05
  misc_feature (35)..(143): Homolog of NCBI NO: 16307352 NR Description: RIKEN cDNA 1500032E05 gene [Mus musculus]
  misc_feature (35)..(143): Homolog of NCBI NO: 13384850 NR Description: RIKEN cDNA 1500032E05 [Mus musculus]
  misc_feature (35)..(143): Homolog of NCBI NO: 12860639 NR Description: unnamed protein product [Mus musculus]
  misc_feature (31)..(217): Homolog of NCBI NO: 9945068 NR Description: rice EST BE041002 corresponds to a region of the
  misc_feature (33)..(216): Homolog of NCBI NO: 34894034 NR Description: P0672D08.29 [Oryza sativa (japonica
  misc_feature (23)..(217): Homolog of NCBI NO: 9757784 NR Description: gene_id:MUA22.2~similar to unknown
  misc_feature (23)..(217): Homolog of NCBI NO: 18417271 NR Description: expressed protein
KKTFVDLFPHLLKHLHRRRSQTMAVAVAKLLISAMAVFMLVSASFATSEVPFMVVHKKATLNRLKSGAERVSVSYDIYNQGSSSAYDVTLTDNSWDKKTFEVVNGNTSKSWERLDAGGILSHSIELEAKVKGVFYGAPAVVTFRIPTKPALQEAYSTPLLPLDILADKPPTKPLDVAKRLLAKYGSLVSVISMVVCFIYLVATPKSNVSKASSKKKR

SEQ ID NO: 30009 - protein, 195 aa, Arabidopsis thaliana
  peptide (1)..(195): Ceres Seq. ID no. 12332909
  misc_feature (13)..(192): Pfam Name: Translocon-associated protein beta (TRAPB) Pfam Description: Translocon-associated protein beta (TRAPB)
  misc_feature (21)..(121): Homolog of NCBI NO: 134931 NR Description: TRANSLOCON-ASSOCIATED PROTEIN, BETA SUBUNIT (TRAP-BETA) (SIGNAL SEQUENCE RECEPTOR BETA SUBUNIT) (SSR-BETA)
  misc_feature (7)..(128): Homolog of NCBI NO: 40643038 NR Description: signal sequence receptor beta-like protein
  misc_feature (12)..(121): Homolog of NCBI NO: 27692921 NR Description: similar to RIKEN cDNA 1500032E05
  misc_feature (13)..(121): Homolog of NCBI NO: 13384850 NR Description: RIKEN cDNA 1500032E05 [Mus musculus]
  misc_feature (13)..(121): Homolog of NCBI NO: 16307352 NR Description: RIKEN cDNA 1500032E05 gene [Mus musculus]
  misc_feature (13)..(121): Homolog of NCBI NO: 12860639 NR Description: unnamed protein product [Mus musculus]
  misc_feature (9)..(195): Homolog of NCBI NO: 9945068 NR Description: rice EST BE041002 corresponds to a region of the
  misc_feature (11)..(194): Homolog of NCBI NO: 34894034 NR Description: P0672D08.29 [Oryza sativa (japonica
  misc_feature (1)..(195): Homolog of NCBI NO: 9757784 NR Description: gene_id:MUA22.2~similar to unknown
  misc_feature (1)..(195): Homolog of NCBI NO: 18417271 NR Description: expressed protein
MAVAVAKLLISAMAVFMLVSASFATSEVPFMVVHKKATLNRLKSGAERVSVSYDIYNQGSSSAYDVTLTDNSWDKKTFEVVNGNTSKSWERLDAGGILSHSIELEAKVKGVFYGAPAVVTFRIPTKPALQEAYSTPLLPLDILADKPPTKPLDVAKRLLAKYGSLVSVISMVVCFIYLVATPKSNVSKASSKKKR

SEQ ID NO: 30010 - protein, 183 aa, Arabidopsis thaliana
  peptide (1)..(183): Ceres Seq. ID no. 12332910
  misc_feature (1)..(180): Pfam Name: Translocon-associated protein beta (TRAPB) Pfam Description: Translocon-associated protein beta (TRAPB)
  misc_feature (9)..(109): Homolog of NCBI NO: 134931 NR Description: TRANSLOCON-ASSOCIATED PROTEIN, BETA SUBUNIT (TRAP-BETA) (SIGNAL SEQUENCE RECEPTOR BETA SUBUNIT) (SSR-BETA)
  misc_feature (1)..(116): Homolog of NCBI NO: 40643038 NR Description: signal sequence receptor beta-like protein
  misc_feature (1)..(109): Homolog of NCBI NO: 27692921 NR Description: similar to RIKEN cDNA 1500032E05
  misc_feature (1)..(109): Homolog of NCBI NO: 13384850 NR Description: RIKEN cDNA 1500032E05 [Mus musculus]
  misc_feature (1)..(109): Homolog of NCBI NO: 16307352 NR Description: RIKEN cDNA 1500032E05 gene [Mus musculus]
  misc_feature (1)..(109): Homolog of NCBI NO: 12860639 NR Description: unnamed protein product [Mus musculus]
  misc_feature (1)..(183): Homolog of NCBI NO: 9945068 NR Description: rice EST BE041002 corresponds to a region of the
  misc_feature (1)..(182): Homolog of NCBI NO: 34894034 NR Description: P0672D08.29 [Oryza sativa (japonica
  misc_feature (1)..(183): Homolog of NCBI NO: 9757784 NR Description: gene_id:MUA22.2~similar to unknown
  misc_feature (1)..(183): Homolog of NCBI NO: 18417271 NR Description: expressed protein
MAVFMLVSASFATSEVPFMVVHKKATLNRLKSGAERVSVSYDIYNQGSSSAYDVTLTDNSWDKKTFEVVNGNTSKSWERLDAGGILSHSIELEAKVKGVFYGAPAVVTFRIPTKPALQEAYSTPLLPLDILADKPPTKPLDVAKRLLAKYGSLVSVISMVVCFIYLVATPKSNVSKASSKKKR

SEQ ID NO: 30011 - DNA, 688 bp, Arabidopsis thaliana
  misc_feature (1)..(688): Ceres Seq. ID no. 12348526
  misc_feature: MA Experiment ID: 20000307 Result: Down-regulated in Transcription
  misc_feature: MA Experiment 20000307 PARAMETER Experiment Name: At_Germinating_Seeds_Sub_P Parameter: Age (hr) Value: 24 vs. 0
  misc_feature: MA Experiment 20000307 PARAMETER Experiment Name: At_Germinating_Seeds_Sub_P Parameter: Organism Value: A. thaliana
  misc_feature: MA Experiment 20000307 PARAMETER Experiment Name: At_Germinating_Seeds_Sub_P Parameter: Plant Line Value: WS
  misc_feature: MA Experiment 20000307 PARAMETER Experiment Name: At_Germinating_Seeds_Sub_P Parameter: Tissue Value: Germinating Seeds
  misc_feature: MA Experiment ID: 20000440 Result: Up-regulated in Transcription
  misc_feature: MA Experiment 20000440 PARAMETER Experiment Name: At_Closed-Flower__Sub_P Parameter: Tissue Value: Closed Flower vs. Whole Plant
attctacatttcctctgcctctttctcagatcacaaaaccctaatttcgaatctttattcttcagaatggctttctgtaacaaactcggtggtctattgagacagaacatttcttctaacggaaatgttccggttacgtctatgctcggatctctccggttgatgtctaccaagcttttcatcggaggtctctcatggggaaccgatgacgcatccttaagggatgcttttgctcacttcggtgacgttgttgatgctaaagttatcgttgatagagagacaggaagatcaagggggtttggatttgtcaacttcaatgatgagggtgctgcaactgctgccatatcagagatggacggaaaggaactgaatggtcgtcacatccgagtgaatcctgctaatgatagaccaagtgctccacgggcttatggaggtggtggtggatacagtggtggaggtggaggctacggaggaggtggtggtgggtacggaggaggaggtggtggctatggaggaggtggtgatggtggtggtggtttctaaacagaggaggtgcttgtgaagaagaagagttaatggttctgtttagttggtttcttctattgaatcttatgttagtacaaaacctgaatgggatttgctgaaaactctttactctttttttggttaccaatcaattcggtttaat

SEQ ID NO: 30012 - protein, 180 aa, Arabidopsis thaliana
  peptide (1)..(180): Ceres Seq. ID no. 12348527
  misc_feature (59)..(130): Pfam Name: RNA recognition motif. (a.k.a. RRM, RBD, or RNP domain) Pfam Description: RNA recognition motif. (a.k.a. RRM, RBD, or RNP
  misc_feature (23)..(172): Homolog of NCBI NO: 34906972 NR Description: putative glycine-rich RNA-binding protein 2
  misc_feature (23)..(179): Homolog of NCBI NO: 15239505 NR Description: glycine-rich RNA-binding protein
  misc_feature (23)..(161): Homolog of NCBI NO: 7439995 NR Description: RNA binding protein 3 - wood tobacco
  misc_feature (23)..(171): Homolog of NCBI NO: 7439994 NR Description: glycine-rich RNA-binding protein - garden pea
  misc_feature (23)..(155): Homolog of NCBI NO: 21553972 NR Description: glycine-rich RNA binding protein, putative
  misc_feature (23)..(155): Homolog of NCBI NO: 15229525 NR Description: glycine-rich RNA-binding protein
  misc_feature (42)..(180): Homolog of NCBI NO: 322514 NR Description: glycine-rich RNA-binding protein (clone A81) -
  misc_feature (23)..(170): Homolog of NCBI NO: 2826811 NR Description: AtGRP2 [Arabidopsis thaliana]
  misc_feature (23)..(180): Homolog of NCBI NO: 30682622 NR Description: glycine-rich RNA-binding protein (AtGRP2)
  misc_feature (23)..(180): Homolog of NCBI NO: 15236359 NR Description: glycine-rich RNA-binding protein AtGRP2
ILHFLCLFLRSQNPNFESLFFRMAFCNKLGGLLRQNISSNGNVPVTSMLGSLRLMSTKLFIGGLSWGTDDASLRDAFAHFGDVVDAKVIVDRETGRSRGFGFVNFNDEGAATAAISEMDGKELNGRHIRVNPANDRPSAPRAYGGGGGYSGGGGGYGGGGGGYGGGGGGYGGGGDGGGGF

SEQ ID NO: 30013 - protein, 158 aa, Arabidopsis thaliana
  peptide (1)..(158): Ceres Seq. ID no. 12348528
  misc_feature (37)..(108): Pfam Name: RNA recognition motif. (a.k.a. RRM, RBD, or RNP domain) Pfam Description: RNA recognition motif. (a.k.a. RRM, RBD, or RNP
  misc_feature (1)..(150): Homolog of NCBI NO: 34906972 NR Description: putative glycine-rich RNA-binding protein 2
  misc_feature (1)..(157): Homolog of NCBI NO: 15239505 NR Description: glycine-rich RNA-binding protein
  misc_feature (1)..(139): Homolog of NCBI NO: 7439995 NR Description: RNA binding protein 3 - wood tobacco
  misc_feature (1)..(149): Homolog of NCBI NO: 7439994 NR Description: glycine-rich RNA-binding protein - garden pea
  misc_feature (1)..(133): Homolog of NCBI NO: 21553972 NR Description: glycine-rich RNA binding protein, putative
  misc_feature (1)..(133): Homolog of NCBI NO: 15229525 NR Description: glycine-rich RNA-binding protein
  misc_feature (20)..(158): Homolog of NCBI NO: 322514 NR Description: glycine-rich RNA-binding protein (clone A81) -
  misc_feature (1)..(148): Homolog of NCBI NO: 2826811 NR Description: AtGRP2 [Arabidopsis thaliana]
  misc_feature (1)..(158): Homolog of NCBI NO: 30682622 NR Description: glycine-rich RNA-binding protein (AtGRP2)
  misc_feature (1)..(158): Homolog of NCBI NO: 15236359 NR Description: glycine-rich RNA-binding protein AtGRP2
MAFCNKLGGLLRQNISSNGNVPVTSMLGSLRLMSTKLFIGGLSWGTDDASLRDAFAHFGDVVDAKVIVDRETGRSRGFGFVNFNDEGAATAAISEMDGKELNGRHIRVNPANDRPSAPRAYGGGGGYSGGGGGYGGGGGGYGGGGGGYGGGGDGGGGF

SEQ ID NO: 30014 - protein, 133 aa, Arabidopsis thaliana
  peptide (1)..(133): Ceres Seq. ID no. 12348529
  misc_feature (12)..(83): Pfam Name: RNA recognition motif. (a.k.a. RRM, RBD, or RNP domain) Pfam Description: RNA recognition motif. (a.k.a. RRM, RBD, or RNP
  misc_feature (1)..(125): Homolog of NCBI NO: 34906972 NR Description: putative glycine-rich RNA-binding protein 2
  misc_feature (1)..(132): Homolog of NCBI NO: 15239505 NR Description: glycine-rich RNA-binding protein
  misc_feature (1)..(114): Homolog of NCBI NO: 7439995 NR Description: RNA binding protein 3 - wood tobacco
  misc_feature (1)..(124): Homolog of NCBI NO: 7439994 NR Description: glycine-rich RNA-binding protein - garden pea
  misc_feature (1)..(108): Homolog of NCBI NO: 21553972 NR Description: glycine-rich RNA binding protein, putative
  misc_feature (1)..(108): Homolog of NCBI NO: 15229525 NR Description: glycine-rich RNA-binding protein
  misc_feature (1)..(133): Homolog of NCBI NO: 322514 NR Description: glycine-rich RNA-binding protein (clone A81) -
  misc_feature (1)..(123): Homolog of NCBI NO: 2826811 NR Description: AtGRP2 [Arabidopsis thaliana]
  misc_feature (1)..(133): Homolog of NCBI NO: 30682622 NR Description: glycine-rich RNA-binding protein (AtGRP2)
  misc_feature (1)..(133): Homolog of NCBI NO: 15236359 NR Description: glycine-rich RNA-binding protein AtGRP2
MLGSLRLMSTKLFIGGLSWGTDDASLRDAFAHFGDVVDAKVIVDRETGRSRGFGFVNFNDEGAATAAISEMDGKELNGRHIRVNPANDRPSAPRAYGGGGGYSGGGGGYGGGGGGYGGGGGGYGGGGDGGGGF

SEQ ID NO: 30015 - DNA, 927 bp, Arabidopsis thaliana
  misc_feature (1)..(927): Ceres Seq. ID no. 13490173
  misc_feature: MA Experiment ID: 108434 Result: Down-regulated in Transcription
  misc_feature: MA Experiment 108434 PARAMETER Experiment Name: At_Root_Tips_cDNA_P Parameter: Tissue Value: Root Tips
  misc_feature: MA Experiment ID: 108595 Result: Down-regulated in Transcription
  misc_feature: MA Experiment 108595 PARAMETER Experiment Name: At_Ler-pi_Ovule_cDNA_P Parameter: Plant Line Value: null
  misc_feature: MA Experiment ID: 20000070 Result: Up-regulated in Transcription
  misc_feature: MA Experiment 20000070 PARAMETER Experiment Name: At_100uM_ABA_Mutants_cDNA_P Parameter: Plant Line Value: CS24
  misc_feature: MA Experiment 20000070 PARAMETER Experiment Name: At_100uM_ABA_Mutants_cDNA_P Parameter: Timepoint (hr) Value: 6
  misc_feature: MA Experiment 20000070 PARAMETER Experiment Name: At_100uM_ABA_Mutants_cDNA_P Parameter: Tissue Value: Aerial
  misc_feature: MA Experiment 20000070 PARAMETER Experiment Name: At_100uM_ABA_Mutants_cDNA_P Parameter: Treatment Value: 100uM ABA vs. No Treatment
  misc_feature: MA Experiment ID: 20000071 Result: Up-regulated in Transcription
  misc_feature: MA Experiment 20000071 PARAMETER Experiment Name: At_100uM_ABA_Mutants_cDNA_P Parameter: Plant Line Value: CS8104
  misc_feature: MA Experiment 20000071 PARAMETER Experiment Name: At_100uM_ABA_Mutants_cDNA_P Parameter: Timepoint (hr) Value: 6
  misc_feature: MA Experiment 20000071 PARAMETER Experiment Name: At_100uM_ABA_Mutants_cDNA_P Parameter: Tissue Value: Aerial
  misc_feature: MA Experiment 20000071 PARAMETER Experiment Name: At_100uM_ABA_Mutants_cDNA_P Parameter: Treatment Value: 100uM ABA vs. No Treatment
  misc_feature: MA Experiment ID: 20000072 Result: Up-regulated in Transcription
  misc_feature: MA Experiment 20000072 PARAMETER Experiment Name: At_100uM_ABA_Mutants_cDNA_P Parameter: Plant Line Value: CS8105
  misc_feature: MA Experiment 20000072 PARAMETER Experiment Name: At_100uM_ABA_Mutants_cDNA_P Parameter: Timepoint (hr) Value: 6
  misc_feature: MA Experiment 20000072 PARAMETER Experiment Name: At_100uM_ABA_Mutants_cDNA_P Parameter: Tissue Value: Aerial
  misc_feature: MA Experiment 20000072 PARAMETER Experiment Name: At_100uM_ABA_Mutants_cDNA_P Parameter: Treatment Value: 100uM ABA vs. No Treatment
  misc_feature: MA Experiment ID: 20000086 Result: Up-regulated in Transcription
  misc_feature: MA Experiment 20000086 PARAMETER Experiment Name: At_100uM_ABA_Mutants_cDNA_P Parameter: Plant Line Value: CS22
  misc_feature: MA Experiment 20000086 PARAMETER Experiment Name: At_100uM_ABA_Mutants_cDNA_P Parameter: Timepoint (hr) Value: 6
  misc_feature: MA Experiment 20000086 PARAMETER Experiment Name: At_100uM_ABA_Mutants_cDNA_P Parameter: Tissue Value: Aerial
  misc_feature: MA Experiment 20000086 PARAMETER Experiment Name: At_100uM_ABA_Mutants_cDNA_P Parameter: Treatment Value: 100uM ABA vs. No Treatment
  misc_feature: MA Experiment ID: 20000087 Result: Up-regulated in Transcription
  misc_feature: MA Experiment 20000087 PARAMETER Experiment Name: At_100uM_ABA_Mutants_cDNA_P Parameter: Plant Line Value: WS
  misc_feature: MA Experiment 20000087 PARAMETER Experiment Name: At_100uM_ABA_Mutants_cDNA_P Parameter: Timepoint (hr) Value: 6
  misc_feature: MA Experiment 20000087 PARAMETER Experiment Name: At_100uM_ABA_Mutants_cDNA_P Parameter: Tissue Value: Aerial
  misc_feature: MA Experiment 20000087 PARAMETER Experiment Name: At_100uM_ABA_Mutants_cDNA_P Parameter: Treatment Value: 100uM ABA vs. No Treatment
  misc_feature: MA Experiment ID: 20000088 Result: Up-regulated in Transcription
  misc_feature: MA Experiment 20000088 PARAMETER Experiment Name: At_100uM_ABA_Mutants_cDNA_P Parameter: Plant Line Value: Landsberg
  misc_feature: MA Experiment 20000088 PARAMETER Experiment Name: At_100uM_ABA_Mutants_cDNA_P Parameter: Timepoint (hr) Value: 6
  misc_feature: MA Experiment 20000088 PARAMETER Experiment Name: At_100uM_ABA_Mutants_cDNA_P Parameter: Tissue Value: Aerial
  misc_feature: MA Experiment 20000088 PARAMETER Experiment Name: At_100uM_ABA_Mutants_cDNA_P Parameter: Treatment Value: 100uM ABA vs. No Treatment
  misc_feature: MA Experiment ID: 20000089 Result: Up-regulated in Transcription
  misc_feature: MA Experiment ID: 20000117 Result: Up-regulated in Transcription
  misc_feature: MA Experiment 20000117 PARAMETER Experiment Name: At_100uM_ABA_Mutants_cDNA_P Parameter: Plant Line Value: Columbia
  misc_feature: MA Experiment 20000117 PARAMETER Experiment Name: At_100uM_ABA_Mutants_cDNA_P Parameter: Timepoint (hr) Value: 6
  misc_feature: MA Experiment 20000117 PARAMETER Experiment Name: At_100uM_ABA_Mutants_cDNA_P Parameter: Tissue Value: Aerial
  misc_feature: MA Experiment 20000117 PARAMETER Experiment Name: At_100uM_ABA_Mutants_cDNA_P Parameter: Treatment Value: 100uM ABA vs. No Treatment
  misc_feature: MA Experiment ID: 20000184 Result: Down-regulated in Transcription
  misc_feature: MA Experiment 20000184 PARAMETER Experiment Name: At_Shoots__P Parameter: Age (day) Value: 7
  misc_feature: MA Experiment 20000184 PARAMETER Experiment Name: At_Shoots__P Parameter: Tissue Value: Shoots vs. Whole Plant
  misc_feature: MA Experiment ID: 20001247 Result: Down-regulated in Transcription
  misc_feature: MA Experiment 20001247 PARAMETER Experiment Name: At_Far-red-induction_P Parameter: Age (day) Value: 7
  misc_feature: MA Experiment 20001247 PARAMETER Experiment Name: At_Far-red-induction_P Parameter: Light Value: Far-red vs. White
  misc_feature: MA Experiment 20001247 PARAMETER Experiment Name: At_Far-red-induction_P Parameter: Organism Value: A. thaliana
  misc_feature: MA Experiment 20001247 PARAMETER Experiment Name: At_Far-red-induction_P Parameter: Plant Line Value: Columbia
  misc_feature: MA Experiment 20001247 PARAMETER Experiment Name: At_Far-red-induction_P Parameter: Timepoint (hr) Value: 1
  misc_feature: MA Experiment 20001247 PARAMETER Experiment Name: At_Far-red-induction_P Parameter: Tissue Value: Whole Plant
  misc_feature: MA Experiment ID: 20001451 Result: Down-regulated in Transcription
  misc_feature: MA Experiment 20001451 PARAMETER Experiment Name: At_Far-red-induction_P Parameter: Age (day) Value: 7
  misc_feature: MA Experiment 20001451 PARAMETER Experiment Name: At_Far-red-induction_P Parameter: Light Value: Far-red vs. White
  misc_feature: MA Experiment 20001451 PARAMETER Experiment Name: At_Far-red-induction_P Parameter: Organism Value: A. thaliana
  misc_feature: MA Experiment 20001451 PARAMETER Experiment Name: At_Far-red-induction_P Parameter: Plant Line Value: Columbia
  misc_feature: MA Experiment 20001451 PARAMETER Experiment Name: At_Far-red-induction_P Parameter: Timepoint (hr) Value: 24
  misc_feature: MA Experiment 20001451 PARAMETER Experiment Name: At_Far-red-induction_P Parameter: Tissue Value: Whole Plant
  misc_feature: MA Experiment ID: 20001558 Result: Down-regulated in Transcription
  misc_feature: MA Experiment 20001558 PARAMETER Experiment Name: At_Drought_Soil_Dry_P Parameter: Age (day) Value: 27
  misc_feature: MA Experiment 20001558 PARAMETER Experiment Name: At_Drought_Soil_Dry_P Parameter: Organism Value: A. thaliana
  misc_feature: MA Experiment 20001558 PARAMETER Experiment Name: At_Drought_Soil_Dry_P Parameter: Plant Line Value: WS
  misc_feature: MA Experiment 20001558 PARAMETER Experiment Name: At_Drought_Soil_Dry_P Parameter: Post Timepoint (hr) Value: 6
  misc_feature: MA Experiment 20001558 PARAMETER Experiment Name: At_Drought_Soil_Dry_P Parameter: Post-Treatment Value: Re-Water vs. No Drought
  misc_feature: MA Experiment 20001558 PARAMETER Experiment Name: At_Drought_Soil_Dry_P Parameter: Timepoint (day) Value: 13
  misc_feature: MA Experiment 20001558 PARAMETER Experiment Name: At_Drought_Soil_Dry_P Parameter: Treatment Value: Drought vs. No Drought
tccctgttttaaaaagaagaatcgagtaatcgcgtggttttgaagacgaagaaggaataagacatcacgaggaacacgatgggtgaagcggtcaaggatgggagagaagaagtgattcaagcttggtatatggatgatagtgaagaggatcagagacttcctcaccacaaggatcctaaagagtttgtatcgttgggcaaacttgcagagctgggagtacttagctggagacttgatgctgataactacgaaaccgatgaggatttgaaaaagatccgtgaatctcgtggttactcttacatggacttttgtgaggtatgcccggaaaagcttccaaactatgaagtgaaagtaaagagctttttcgaagaacatttgcatactgatgaagagatccgttactgcgttgcaggaagtggttactttgatgtgagagatcgcaatgaagcttggattagggtatgggtaaagaagggagctatgagtcttacctgctgggatctatcatcgcttcaccgtggactctgacaactatatcaaggcaatgcggcttttcgtgggtgaaccggtatggacaccatacaatcgcccacacgaccatcttcctgcaaggaaagaatatgtcgataacttcatggtcaatgcctctgcttagagagcttcctctctctatatctggctttctgaaaccaggatctataaacaaggcctacaataaagaaagctttcctgtcaagtattggatatttatatatattcctgtgtagaatgatggcttttggtatgcttgagttgttgtaaacttagttacactctctgatatgtctctctttaccatctttgtcgtatcccatatacgaaaagattacattgggattcatattgtcttacgttcgttcctatgtgcaatatgttgagtttttacac

SEQ ID NO: 30016 - protein, 149 aa, Arabidopsis thaliana
  peptide (1)..(149): Ceres Seq. ID no. 15218712
  misc_feature (14)..(135): Pfam Name: ARD/ARD' family Pfam Description: ARD/ARD' family
  misc_feature (7)..(135): Homolog of NCBI NO: 37534408 NR Description: putative zinc finger protein ID1
  misc_feature (1)..(135): Homolog of NCBI NO: 7489558 NR Description: probable submergence induced protein 2 - rice
  misc_feature (5)..(135): Homolog of NCBI NO: 34902616 NR Description: Putative probable submergence induced,
  misc_feature (1)..(135): Homolog of NCBI NO: 14522834 NR Description: iron-deficiency induced gene [Hordeum vulgare]
  misc_feature (1)..(135): Homolog of NCBI NO: 7489559 NR Description: probable submergence induced, nickel-binding
  misc_feature (1)..(135): Homolog of NCBI NO: 15225298 NR Description: hypothetical protein [Arabidopsis thaliana]
  misc_feature (69)..(135): Homolog of NCBI NO: 7485194 NR Description: hypothetical protein - Arabidopsis thaliana
  misc_feature (1)..(75): Homolog of NCBI NO: 7485194 NR Description: hypothetical protein - Arabidopsis thaliana
  misc_feature (1)..(135): Homolog of NCBI NO: 18414289 NR Description: expressed protein [Arabidopsis thaliana]
  misc_feature (1)..(135): Homolog of NCBI NO: 18414293 NR Description: expressed protein [Arabidopsis thaliana]
MGEAVKDGREEVIQAWYMDDSEEDQRLPHHKDPKEFVSLGKLAELGVLSWRLDADNYETDEDLKKIRESRGYSYMDFCEVCPEKLPNYEVKVKSFFEEHLHTDEEIRYCVAGSGYFDVRDRNEAWIRVWVKKGAMSLTCWDLSSLHRGL

SEQ ID NO: 30017 - protein, 132 aa, Arabidopsis thaliana
  peptide (1)..(132): Ceres Seq. ID no. 15218713
  misc_feature (1)..(118): Pfam Name: ARD/ARD' family Pfam Description: ARD/ARD' family
  misc_feature (1)..(118): Homolog of NCBI NO: 37534408 NR Description: putative zinc finger protein ID1
  misc_feature (1)..(118): Homolog of NCBI NO: 7489558 NR Description: probable submergence induced protein 2 - rice
  misc_feature (1)..(118): Homolog of NCBI NO: 34902616 NR Description: Putative probable submergence induced,
  misc_feature (1)..(118): Homolog of NCBI NO: 14522834 NR Description: iron-deficiency induced gene [Hordeum vulgare]
  misc_feature (1)..(118): Homolog of NCBI NO: 7489559 NR Description: probable submergence induced, nickel-binding
  misc_feature (1)..(118): Homolog of NCBI NO: 15225298 NR Description: hypothetical protein [Arabidopsis thaliana]
  misc_feature (52)..(118): Homolog of NCBI NO: 7485194 NR Description: hypothetical protein - Arabidopsis thaliana
  misc_feature (1)..(58): Homolog of NCBI NO: 7485194 NR Description: hypothetical protein - Arabidopsis thaliana
  misc_feature (1)..(118): Homolog of NCBI NO: 18414289 NR Description: expressed protein [Arabidopsis thaliana]
  misc_feature (1)..(118): Homolog of NCBI NO: 18414293 NR Description: expressed protein [Arabidopsis thaliana]
MDDSEEDQRLPHHKDPKEFVSLGKLAELGVLSWRLDADNYETDEDLKKIRESRGYSYMDFCEVCPEKLPNYEVKVKSFFEEHLHTDEEIRYCVAGSGYFDVRDRNEAWIRVWVKKGAMSLTCWDLSSLHRGL

SEQ ID NO: 30018 - protein, 101 aa, Arabidopsis thaliana
  peptide (1)..(101): Ceres Seq. ID no. 15218714
MGKEGSYESYLLGSIIASPWTLTTISRQCGFSWVNRYGHHTIAHTTIFLQGKNMSITSWSMPLLRELPLSISGFLKPGSINKAYNKESFPVKYWIFIYIPV

SEQ ID NO: 30019 - DNA, 888 bp, Arabidopsis thaliana
  misc_feature (1)..(888): Ceres Seq. ID no. 12338180
  misc_feature: MA Experiment ID: 108434 Result: Down-regulated in Transcription
  misc_feature: MA Experiment 108434 PARAMETER Experiment Name: At_Root_Tips_cDNA_P Parameter: Tissue Value: Root Tips
  misc_feature: MA Experiment ID: 108461 Result: Up-regulated in Transcription
  misc_feature: MA Experiment 108461 PARAMETER Experiment Name: At_Germinating_Seeds_cDNA_P Parameter: Age (day) Value: 1 vs. 0
  misc_feature: MA Experiment 108461 PARAMETER Experiment Name: At_Germinating_Seeds_cDNA_P Parameter: Tissue Value: Germinating Seeds
  misc_feature: MA Experiment ID: 108462 Result: Up-regulated in Transcription
  misc_feature: MA Experiment 108462 PARAMETER Experiment Name: At_Germinating_Seeds_cDNA_P Parameter: Age (day) Value: 2 vs. 0
  misc_feature: MA Experiment 108462 PARAMETER Experiment Name: At_Germinating_Seeds_cDNA_P Parameter: Tissue Value: Germinating Seeds
  misc_feature: MA Experiment ID: 108464 Result: Up-regulated in Transcription
  misc_feature: MA Experiment 108464 PARAMETER Experiment Name: At_Germinating_Seeds_cDNA_P Parameter: Age (day) Value: 4 vs. 0
  misc_feature: MA Experiment 108464 PARAMETER Experiment Name: At_Germinating_Seeds_cDNA_P Parameter: Tissue Value: Germinating Seeds
  misc_feature: MA Experiment ID: 108605 Result: Up-regulated in Transcription
  misc_feature: MA Experiment 108605 PARAMETER Experiment Name: At_100uM_ABA_cDNA_P Parameter: Timepoint (hr) Value: 6
  misc_feature: MA Experiment 108605 PARAMETER Experiment Name: At_100uM_ABA_cDNA_P Parameter: Tissue Value: Aerial
  misc_feature: MA Experiment 108605 PARAMETER Experiment Name: At_100uM_ABA_cDNA_P Parameter: Treatment Value: 100uM ABA vs. No Treatment
  misc_feature: MA Experiment ID: 108607 Result: Up-regulated in Transcription
  misc_feature: MA Experiment 108607 PARAMETER Experiment Name: At_100uM_ABA_cDNA_P Parameter: Timepoint (hr) Value: 4
  misc_feature: MA Experiment 108607 PARAMETER Experiment Name: At_100uM_ABA_cDNA_P Parameter: Tissue Value: Aerial
  misc_feature: MA Experiment 108607 PARAMETER Experiment Name: At_100uM_ABA_cDNA_P Parameter: Treatment Value: 100uM ABA vs. No Treatment
  misc_feature: MA Experiment ID: 108609 Result: Up-regulated in Transcription
  misc_feature: MA Experiment 108609 PARAMETER Experiment Name: At_100uM_ABA_cDNA_P Parameter: Timepoint (hr) Value: 24
  misc_feature: MA Experiment 108609 PARAMETER Experiment Name: At_100uM_ABA_cDNA_P Parameter: Tissue Value: Aerial
  misc_feature: MA Experiment 108609 PARAMETER Experiment Name: At_100uM_ABA_cDNA_P Parameter: Treatment Value: 100uM ABA vs. No Treatment
  misc_feature: MA Experiment ID: 20000069 Result: Up-regulated in Transcription
  misc_feature: MA Experiment 20000069 PARAMETER Experiment Name: At_100uM_ABA_Mutants_cDNA_P Parameter: Plant Line Value: CS23
  misc_feature: MA Experiment 20000069 PARAMETER Experiment Name: At_100uM_ABA_Mutants_cDNA_P Parameter: Timepoint (hr) Value: 6
  misc_feature: MA Experiment 20000069 PARAMETER Experiment Name: At_100uM_ABA_Mutants_cDNA_P Parameter: Tissue Value: Aerial
  misc_feature: MA Experiment 20000069 PARAMETER Experiment Name: At_100uM_ABA_Mutants_cDNA_P Parameter: Treatment Value: 100uM ABA vs. No Treatment
  misc_feature: MA Experiment ID: 20000070 Result: Up-regulated in Transcription
  misc_feature: MA Experiment 20000070 PARAMETER Experiment Name: At_100uM_ABA_Mutants_cDNA_P Parameter: Plant Line Value: CS24
  misc_feature: MA Experiment 20000070 PARAMETER Experiment Name: At_100uM_ABA_Mutants_cDNA_P Parameter: Timepoint (hr) Value: 6
  misc_feature: MA Experiment 20000070 PARAMETER Experiment Name: At_100uM_ABA_Mutants_cDNA_P Parameter: Tissue Value: Aerial
  misc_feature: MA Experiment 20000070 PARAMETER Experiment Name: At_100uM_ABA_Mutants_cDNA_P Parameter: Treatment Value: 100uM ABA vs. No Treatment
  misc_feature: MA Experiment ID: 20000071 Result: Up-regulated in Transcription
  misc_feature: MA Experiment 20000071 PARAMETER Experiment Name: At_100uM_ABA_Mutants_cDNA_P Parameter: Plant Line Value: CS8104
  misc_feature: MA Experiment 20000071 PARAMETER Experiment Name: At_100uM_ABA_Mutants_cDNA_P Parameter: Timepoint (hr) Value: 6
  misc_feature: MA Experiment 20000071 PARAMETER Experiment Name: At_100uM_ABA_Mutants_cDNA_P Parameter: Tissue Value: Aerial
  misc_feature: MA Experiment 20000071 PARAMETER Experiment Name: At_100uM_ABA_Mutants_cDNA_P Parameter: Treatment Value: 100uM ABA vs. No Treatment
  misc_feature: MA Experiment ID: 20000086 Result: Up-regulated in Transcription
  misc_feature: MA Experiment 20000086 PARAMETER Experiment Name: At_100uM_ABA_Mutants_cDNA_P Parameter: Plant Line Value: CS22
  misc_feature: MA Experiment 20000086 PARAMETER Experiment Name: At_100uM_ABA_Mutants_cDNA_P Parameter: Timepoint (hr) Value: 6
  misc_feature: MA Experiment 20000086 PARAMETER Experiment Name: At_100uM_ABA_Mutants_cDNA_P Parameter: Tissue Value: Aerial
  misc_feature: MA Experiment 20000086 PARAMETER Experiment Name: At_100uM_ABA_Mutants_cDNA_P Parameter: Treatment Value: 100uM ABA vs. No Treatment
  misc_feature: MA Experiment ID: 20000087 Result: Up-regulated in Transcription
  misc_feature: MA Experiment 20000087 PARAMETER Experiment Name: At_100uM_ABA_Mutants_cDNA_P Parameter: Plant Line Value: WS
  misc_feature: MA Experiment 20000087 PARAMETER Experiment Name: At_100uM_ABA_Mutants_cDNA_P Parameter: Timepoint (hr) Value: 6
  misc_feature: MA Experiment 20000087 PARAMETER Experiment Name: At_100uM_ABA_Mutants_cDNA_P Parameter: Tissue Value: Aerial
  misc_feature: MA Experiment 20000087 PARAMETER Experiment Name: At_100uM_ABA_Mutants_cDNA_P Parameter: Treatment Value: 100uM ABA vs. No Treatment
  misc_feature: MA Experiment ID: 20000088 Result: Up-regulated in Transcription
  misc_feature: MA Experiment 20000088 PARAMETER Experiment Name: At_100uM_ABA_Mutants_cDNA_P Parameter: Plant Line Value: Landsberg
  misc_feature: MA Experiment 20000088 PARAMETER Experiment Name: At_100uM_ABA_Mutants_cDNA_P Parameter: Timepoint (hr) Value: 6
  misc_feature: MA Experiment 20000088 PARAMETER Experiment Name: At_100uM_ABA_Mutants_cDNA_P Parameter: Tissue Value: Aerial
  misc_feature: MA Experiment 20000088 PARAMETER Experiment Name: At_100uM_ABA_Mutants_cDNA_P Parameter: Treatment Value: 100uM ABA vs. No Treatment
  misc_feature: MA Experiment ID: 20000113 Result: Down-regulated in Transcription
  misc_feature: MA Experiment 20000113 PARAMETER Experiment Name: At_42deg_Heat_cDNA_P Parameter: Temperature (deg C) Value: 42 vs. 22
  misc_feature: MA Experiment 20000113 PARAMETER Experiment Name: At_42deg_Heat_cDNA_P Parameter: Timepoint (hr) Value: 8
  misc_feature: MA Experiment 20000113 PARAMETER Experiment Name: At_42deg_Heat_cDNA_P Parameter: Tissue Value: Aerial
  misc_feature: MA Experiment ID: 20000117 Result: Up-regulated in Transcription
  misc_feature: MA Experiment 20000117 PARAMETER Experiment Name: At_100uM_ABA_Mutants_cDNA_P Parameter: Plant Line Value: Columbia
  misc_feature: MA Experiment 20000117 PARAMETER Experiment Name: At_100uM_ABA_Mutants_cDNA_P Parameter: Timepoint (hr) Value: 6
  misc_feature: MA Experiment 20000117 PARAMETER Experiment Name: At_100uM_ABA_Mutants_cDNA_P Parameter: Tissue Value: Aerial
  misc_feature: MA Experiment 20000117 PARAMETER Experiment Name: At_100uM_ABA_Mutants_cDNA_P Parameter: Treatment Value: 100uM ABA vs. No Treatment
  misc_feature: MA Experiment ID: 20000169 Result: Up-regulated in Transcription
  misc_feature: MA Experiment 20000169 PARAMETER Experiment Name: At_100uM_ABA_P Parameter: Age (day) Value: 14
  misc_feature: MA Experiment 20000169 PARAMETER Experiment Name: At_100uM_ABA_P Parameter: Organism Value: A. thaliana
  misc_feature: MA Experiment 20000169 PARAMETER Experiment Name: At_100uM_ABA_P Parameter: Plant Line Value: WS
  misc_feature: MA Experiment 20000169 PARAMETER Experiment Name: At_100uM_ABA_P Parameter: Timepoint (hr) Value: 6
  misc_feature: MA Experiment 20000169 PARAMETER Experiment Name: At_100uM_ABA_P Parameter: Tissue Value: Aerial
  misc_feature: MA Experiment 20000169 PARAMETER Experiment Name: At_100uM_ABA_P Parameter: Treatment Value: 100uM ABA vs. No Treatment
  misc_feature: MA Experiment ID: 20000180 Result: Up-regulated in Transcription
  misc_feature: MA Experiment 20000180 PARAMETER Experiment Name: At_Germinating_Seeds_P Parameter: Age (hr) Value: 24 vs. 0
  misc_feature: MA Experiment 20000180 PARAMETER Experiment Name: At_Germinating_Seeds_P Parameter: Tissue Value: Germinating Seeds
  misc_feature: MA Experiment ID: 20000211 Result: Up-regulated in Transcription
  misc_feature: MA Experiment 20000211 PARAMETER Experiment Name: At_0.001percent_MeJA__P Parameter: Age (day) Value: 14
  misc_feature: MA Experiment 20000211 PARAMETER Experiment Name: At_0.001percent_MeJA__P Parameter: Organism Value: A. thaliana
  misc_feature: MA Experiment 20000211 PARAMETER Experiment Name: At_0.001percent_MeJA__P Parameter: Plant Line Value: WS
  misc_feature: MA Experiment 20000211 PARAMETER Experiment Name: At_0.001percent_MeJA__P Parameter: Timepoint (hr) Value: 1
  misc_feature: MA Experiment 20000211 PARAMETER Experiment Name: At_0.001percent_MeJA__P Parameter: Tissue Value: Aerial
  misc_feature: MA Experiment 20000211 PARAMETER Experiment Name: At_0.001percent_MeJA__P Parameter: Treatment Value: 0.001percent MeJA vs. No Treatment
  misc_feature: MA Experiment ID: 20000227 Result: Down-regulated in Transcription
  misc_feature: MA Experiment 20000227 PARAMETER Experiment Name: At_Root-Tips-vs-Tops_P Parameter: Tissue Value: Root Tips vs. Root Tops
  misc_feature: MA Experiment ID: 20000265 Result: Up-regulated in Transcription
  misc_feature: MA Experiment 20000265 PARAMETER Experiment Name: At_Open_Flower_P Parameter: Age (day) Value: 21
  misc_feature: MA Experiment 20000265 PARAMETER Experiment Name: At_Open_Flower_P Parameter: Plant Line Value: WS
  misc_feature: MA Experiment 20000265 PARAMETER Experiment Name: At_Open_Flower_P Parameter: Tissue Value: Closed Flower vs. Whole Plant
  misc_feature: MA Experiment ID: 20000436 Result: Up-regulated in Transcription
  misc_feature: MA Experiment 20000436 PARAMETER Experiment Name: At_Drought_P Parameter: Age (day) Value: 7
  misc_feature: MA Experiment 20000436 PARAMETER Experiment Name: At_Drought_P Parameter: Organism Value: A. thaliana
  misc_feature: MA Experiment 20000436 PARAMETER Experiment Name: At_Drought_P Parameter: Plant Line Value: WS
  misc_feature: MA Experiment 20000436 PARAMETER Experiment Name: At_Drought_P Parameter: Timepoint (hr) Value: 12
  misc_feature: MA Experiment 20000436 PARAMETER Experiment Name: At_Drought_P Parameter: Tissue Value: Whole Plant
  misc_feature: MA Experiment 20000436 PARAMETER Experiment Name: At_Drought_P Parameter: Treatment Value: Drought vs. No Drought
  misc_feature: MA Experiment ID: 20000451 Result: Down-regulated in Transcription
  misc_feature: MA Experiment 20000451 PARAMETER Experiment Name: At_CS6879_Shoots-Roots_P Parameter: Age (day) Value: 14
  misc_feature: MA Experiment 20000451 PARAMETER Experiment Name: At_CS6879_Shoots-Roots_P Parameter: Organism Value: A. thaliana
  misc_feature: MA Experiment 20000451 PARAMETER Experiment Name: At_CS6879_Shoots-Roots_P Parameter: Plant Line Value: CS6879 vs. WS
  misc_feature: MA Experiment 20000451 PARAMETER Experiment Name: At_CS6879_Shoots-Roots_P Parameter: Tissue Value: Roots
  misc_feature: MA Experiment ID: 20000453 Result: Up-regulated in Transcription
  misc_feature: MA Experiment 20000453 PARAMETER Experiment Name: At_100uM_ABA_P Parameter: Age (day) Value: 15
  misc_feature: MA Experiment 20000453 PARAMETER Experiment Name: At_100uM_ABA_P Parameter: Organism Value: A. thaliana
  misc_feature: MA Experiment 20000453 PARAMETER Experiment Name: At_100uM_ABA_P Parameter: Plant Line Value: WS
  misc_feature: MA Experiment 20000453 PARAMETER Experiment Name: At_100uM_ABA_P Parameter: Timepoint (hr) Value: 24
  misc_feature: MA Experiment 20000453 PARAMETER Experiment Name: At_100uM_ABA_P Parameter: Tissue Value: Aerial
  misc_feature: MA Experiment 20000453 PARAMETER Experiment Name: At_100uM_ABA_P Parameter: Treatment Value: 100uM ABA vs. No Treatment
  misc_feature: MA Experiment ID: 20001451 Result: Down-regulated in Transcription
  misc_feature: MA Experiment 20001451 PARAMETER Experiment Name: At_Far-red-induction_P Parameter: Age (day) Value: 7
  misc_feature: MA Experiment 20001451 PARAMETER Experiment Name: At_Far-red-induction_P Parameter: Light Value: Far-red vs. White
  misc_feature: MA Experiment 20001451 PARAMETER Experiment Name: At_Far-red-induction_P Parameter: Organism Value: A. thaliana
  misc_feature: MA Experiment 20001451 PARAMETER Experiment Name: At_Far-red-induction_P Parameter: Plant Line Value: Columbia
  misc_feature: MA Experiment 20001451 PARAMETER Experiment Name: At_Far-red-induction_P Parameter: Timepoint (hr) Value: 24
  misc_feature: MA Experiment 20001451 PARAMETER Experiment Name: At_Far-red-induction_P Parameter: Tissue Value: Whole Plant
  misc_feature: MA Experiment ID: 20001554 Result: Up-regulated in Transcription
  misc_feature: MA Experiment 20001554 PARAMETER Experiment Name: At_Drought_Soil_Dry_P Parameter: Age (day) Value: 21
  misc_feature: MA Experiment 20001554 PARAMETER Experiment Name: At_Drought_Soil_Dry_P Parameter: Organism Value: A. thaliana
  misc_feature: MA Experiment 20001554 PARAMETER Experiment Name: At_Drought_Soil_Dry_P Parameter: Plant Line Value: WS
  misc_feature: MA Experiment 20001554 PARAMETER Experiment Name: At_Drought_Soil_Dry_P Parameter: Post Timepoint (hr) Value: None
  misc_feature: MA Experiment 20001554 PARAMETER Experiment Name: At_Drought_Soil_Dry_P Parameter: Post-Treatment Value: None
  misc_feature: MA Experiment 20001554 PARAMETER Experiment Name: At_Drought_Soil_Dry_P Parameter: Timepoint (day) Value: 7
  misc_feature: MA Experiment 20001554 PARAMETER Experiment Name: At_Drought_Soil_Dry_P Parameter: Treatment Value: Drought vs. No Drought
  misc_feature: MA Experiment ID: 20001555 Result: Up-regulated in Transcription
  misc_feature: MA Experiment 20001555 PARAMETER Experiment Name: At_Drought_Soil_Dry_P Parameter: Age (day) Value: 24
  misc_feature: MA Experiment 20001555 PARAMETER Experiment Name: At_Drought_Soil_Dry_P Parameter: Organism Value: A. thaliana
  misc_feature: MA Experiment 20001555 PARAMETER Experiment Name: At_Drought_Soil_Dry_P Parameter: Plant Line Value: WS
  misc_feature: MA Experiment 20001555 PARAMETER Experiment Name: At_Drought_Soil_Dry_P Parameter: Post Timepoint (hr) Value: None
  misc_feature: MA Experiment 20001555 PARAMETER Experiment Name: At_Drought_Soil_Dry_P Parameter: Post-Treatment Value: None
  misc_feature: MA Experiment 20001555 PARAMETER Experiment Name: At_Drought_Soil_Dry_P Parameter: Timepoint (day) Value: 10
  misc_feature: MA Experiment 20001555 PARAMETER Experiment Name: At_Drought_Soil_Dry_P Parameter: Treatment Value: Drought vs. No Drought
  misc_feature: MA Experiment ID: 20001558 Result: Down-regulated in Transcription
  misc_feature: MA Experiment 20001558 PARAMETER Experiment Name: At_Drought_Soil_Dry_P Parameter: Age (day) Value: 27
  misc_feature: MA Experiment 20001558 PARAMETER Experiment Name: At_Drought_Soil_Dry_P Parameter: Organism Value: A. thaliana
  misc_feature: MA Experiment 20001558 PARAMETER Experiment Name: At_Drought_Soil_Dry_P Parameter: Plant Line Value: WS
  misc_feature: MA Experiment 20001558 PARAMETER Experiment Name: At_Drought_Soil_Dry_P Parameter: Post Timepoint (hr) Value: 6
  misc_feature: MA Experiment 20001558 PARAMETER Experiment Name: At_Drought_Soil_Dry_P Parameter: Post-Treatment Value: Re-Water vs. No Drought
  misc_feature: MA Experiment 20001558 PARAMETER Experiment Name: At_Drought_Soil_Dry_P Parameter: Timepoint (day) Value: 13
  misc_feature: MA Experiment 20001558 PARAMETER Experiment Name: At_Drought_Soil_Dry_P Parameter: Treatment Value: Drought vs. No Drought
  misc_feature: MA Experiment ID: 20001559 Result: Up-regulated in Transcription
  misc_feature: MA Experiment 20001559 PARAMETER Experiment Name: At_Drought_Soil_Dry_P Parameter: Age (day) Value: 28
  misc_feature: MA Experiment 20001559 PARAMETER Experiment Name: At_Drought_Soil_Dry_P Parameter: Organism Value: A. thaliana
  misc_feature: MA Experiment 20001559 PARAMETER Experiment Name: At_Drought_Soil_Dry_P Parameter: Plant Line Value: WS
  misc_feature: MA Experiment 20001559 PARAMETER Experiment Name: At_Drought_Soil_Dry_P Parameter: Post Timepoint (hr) Value: 29
  misc_feature: MA Experiment 20001559 PARAMETER Experiment Name: At_Drought_Soil_Dry_P Parameter: Post-Treatment Value: Re-Water vs. No Drought
  misc_feature: MA Experiment 20001559 PARAMETER Experiment Name: At_Drought_Soil_Dry_P Parameter: Timepoint (day) Value: 14
  misc_feature: MA Experiment 20001559 PARAMETER Experiment Name: At_Drought_Soil_Dry_P Parameter: Treatment Value: Drought vs. No Drought
aaaaatggcccactggtgggtggagaatggtaataattcagtttaaaagctaagccttctcactgattaactcaatcattcatccgtctctgcaaacaaaggaagaagaatcaagatggctctggaaatctgtgtgaaagctgctgttggtgctcctgatcatctcggcgactgtccgttcagccaacgggctcttctcacactcgaggagaagagtcttacctacaaaatccatctgattaacctctctgacaaaccccagtggttcttggacattagtcctcaagggaaagtaccagtgctcaagatcgacgacaagtgggtgactgattccgacgtcatcgttggtatcctcgaggagaagtatcctgatccacctctcaagactcctgctgaatttgcctctgttggatccaacatttttggtacttttgggacattcttgaagagcaaagactccaatgacggatctgaacatgccttgcttgttgagctagaagccttggagaaccatctcaagagtcacgatggtccttttatcgccggggaaagagtttccgcggtggatctaagcttagcaccaaagctttaccaccttcaagttgctcttggccatttcaaaagctggtctgtccctgagagctttccccatgtccataactacatgaagactctgttctcgctcgactcttttgagaaaactaagaccgaggaaaagtatgtgatctctggatgggctcccaaggttaacccttgaaactatgcaccgttatgcgatcgttggtgtggtaatgttgttcaaggtctctctcttatatcagtcaaataatgtacttggaccttttttatgtaatgtactgtatcaatcaaataagaaagcctattttg

SEQ ID NO: 30020 - protein, 213 aa, Arabidopsis thaliana; identical to SEQ ID NO: 29716
  peptide (1)..(213): Ceres Seq. ID no. 12338181
  misc_feature (119)..(191): Pfam Name: Glutathione S-transferase, C-terminal domain Pfam Description: Glutathione S-transferase, C-terminal domain
  misc_feature (128)..(213): Homolog of NCBI NO: 15223575 NR Description: GSH-dependent dehydroascorbate reductase 1,
  misc_feature (1)..(212): Homolog of NCBI NO: 6939839 NR Description: GSH-dependent dehydroascorbate reductase 1
  misc_feature (4)..(213): Homolog of NCBI NO: 28192421 NR Description: dehydroascorbate reductase [Triticum aestivum]
  misc_feature (1)..(212): Homolog of NCBI NO: 28192425 NR Description: dehydroascorbate reductase [Oryza sativa]
  misc_feature (1)..(212): Homolog of NCBI NO: 15239354 NR Description: dehydroascorbate reductase, putative; protein id:
  misc_feature (1)..(213): Homolog of NCBI NO: 28192427 NR Description: dehydroascorbate reductase [Nicotiana tabacum]
  misc_feature (1)..(212): Homolog of NCBI NO: 15222163 NR Description: dehydroascorbate reductase, putative
  misc_feature (1)..(212): Homolog of NCBI NO: 21593056 NR Description: GSH-dependent dehydroascorbate reductase 1,
  misc_feature (1)..(201): Homolog of NCBI NO: 25402899 NR Description: protein F18O14.33 [imported] - Arabidopsis
  misc_feature (1)..(213): Homolog of NCBI NO: 15223576 NR Description: dehydroascorbate reductase, putative

SEQ ID NO: 30021 - DNA, 796 bp, Arabidopsis thaliana
  misc_feature (1)..(796): Ceres Seq. ID no. 12332827
  misc_feature: MA Experiment ID: 108464 Result: Up-regulated in Transcription
  misc_feature: MA Experiment 108464 PARAMETER Experiment Name: At_Germinating_Seeds_cDNA_P Parameter: Age (day) Value: 4 vs. 0
  misc_feature: MA Experiment 108464 PARAMETER Experiment Name: At_Germinating_Seeds_cDNA_P Parameter: Tissue Value: Germinating Seeds
  misc_feature: MA Experiment ID: 20000348 Result: Up-regulated in Transcription
  misc_feature: MA Experiment 20000348 PARAMETER Experiment Name: At_100uM_ABA_Sub_P Parameter: Age (day) Value: 14
  misc_feature: MA Experiment 20000348 PARAMETER Experiment Name: At_100uM_ABA_Sub_P Parameter: Organism Value: A. thaliana
  misc_feature: MA Experiment 20000348 PARAMETER Experiment Name: At_100uM_ABA_Sub_P Parameter: Plant Line Value: WS
  misc_feature: MA Experiment 20000348 PARAMETER Experiment Name: At_100uM_ABA_Sub_P Parameter: Timepoint (hr) Value: 1
  misc_feature: MA Experiment 20000348 PARAMETER Experiment Name: At_100uM_ABA_Sub_P Parameter: Tissue Value: Aerial
  misc_feature: MA Experiment 20000348 PARAMETER Experiment Name: At_100uM_ABA_Sub_P Parameter: Treatment Value: 100uM ABA vs. No Treatment
  misc_feature: MA Experiment ID: 20000355 Result: Up-regulated in Transcription
  misc_feature: MA Experiment 20000355 PARAMETER Experiment Name: At_Siliques_Sub_P Parameter: Age (day) Value: 21
  misc_feature: MA Experiment 20000355 PARAMETER Experiment Name: At_Siliques_Sub_P Parameter: Organism Value: A. thaliana
  misc_feature: MA Experiment 20000355 PARAMETER Experiment Name: At_Siliques_Sub_P Parameter: Plant Line Value: WS
  misc_feature: MA Experiment 20000355 PARAMETER Experiment Name: At_Siliques_Sub_P Parameter: Tissue Value: Less Than 5mm Siliques vs. Whole Plant
  misc_feature: MA Experiment ID: 20000440 Result: Up-regulated in Transcription
  misc_feature: MA Experiment 20000440 PARAMETER Experiment Name: At_Closed-Flower__Sub_P Parameter: Tissue Value: Closed Flower vs. Whole Plant
atacactctgctttttcctctttcttctctcactcttactctgtctttcttcatcagaccaaaaacaaaccctaatttctcagctcgatttctctcttactccatttctcaatccttcacaaaatgcaccaacttccatttccgagatcgtaaaaaagcttgtggtactttctgataatagagagggaaaaaacgagagagagagaaaacacaaaatgctggaagctccggtgaacaagtcaagcatcctcaatggaggaggaggaggattctctcagctacagagttgcttcggcgattgcagtagcgaagaagaattgtcagtgttgccacgtcataccaaagttgtcgttactggaaacaaccgtaccaaatctgttctcgtcggtcttcaaggcgtcgttaaaaaagccgtcggactcggtggttggcattggctggttttgactaatggaattgaagtgaagttgcagaggaatgcgcttagtgttcttgaacatcctacagggaacgaagaagacaatgatcttgaagtcgaccattctacacagtggaatcatccctccgatatgacaactgaggacactttgaagcctcataagtcgaagaagagaggacacagatcatcgcggttatctcaaaaggctttgtacagggaagtttcttgtgactcacactcaaaaatctcgagtattactcctcgtctgaacatggttgatcttaccaagttggatatggctgcattactgagatattggcgacattttaacctcgtggatgctcttccgaatcccac

SEQ ID NO: 30022 - protein, 264 aa, Arabidopsis thaliana
  peptide (1)..(264): Ceres Seq. ID no. 12332828
  misc_feature (101)..(173): Homolog of NCBI NO: 38567956 NR Description: OSJNBb0115I21.12 [Oryza sativa (japonica
  misc_feature (101)..(263): Homolog of NCBI NO: 38346468 NR Description: OSJNBa0019G23.16 [Oryza sativa (japonica
  misc_feature (103)..(263): Homolog of NCBI NO: 37533376 NR Description: hypothetical protein [Oryza sativa (japonica
  misc_feature (103)..(263): Homolog of NCBI NO: 18767383 NR Description: Hypothetical protein [Oryza sativa]
  misc_feature (72)..(263): Homolog of NCBI NO: 18394724 NR Description: expressed protein
  misc_feature (72)..(263): Homolog of NCBI NO: 25372870 NR Description: protein F18O14.5 [imported] - Arabidopsis
  misc_feature (72)..(263): Homolog of NCBI NO: 15222092 NR Description: hypothetical protein; protein id: At1g75060.1
TLCFFLFLLSLLLCLSSSDQKQTLISQLDFSLTPFLNPSQNAPTSISEIVKKLVVLSDNREGKNERERKHKMLEAPVNKSSILNGGGGGFSQLQSCFGDCSSEEELSVLPRHTKVVVTGNNRTKSVLVGLQGVVKKAVGLGGWHWLVLTNGIEVKLQRNALSVLEHPTGNEEDNDLEVDHSTQWNHPSDMTTEDTLKPHKSKKRGHRSSRLSQKALYREVSCDSHSKISSITPRLNMVDLTKLDMAALLRYWRHFNLVDALPNP

SEQ ID NO: 30023 - protein, 193 aa, Arabidopsis thaliana
  peptide (1)..(193): Ceres Seq. ID no. 12332829
  misc_feature (30)..(102): Homolog of NCBI NO: 38567956 NR Description: OSJNBb0115I21.12 [Oryza sativa (japonica
  misc_feature (30)..(192): Homolog of NCBI NO: 38346468 NR Description: OSJNBa0019G23.16 [Oryza sativa (japonica
  misc_feature (32)..(192): Homolog of NCBI NO: 37533376 NR Description: hypothetical protein [Oryza sativa (japonica
  misc_feature (32)..(192): Homolog of NCBI NO: 18767383 NR Description: Hypothetical protein [Oryza sativa]
  misc_feature (1)..(192): Homolog of NCBI NO: 18394724 NR Description: expressed protein
  misc_feature (1)..(192): Homolog of NCBI NO: 25372870 NR Description: protein F18O14.5 [imported] - Arabidopsis
  misc_feature (1)..(192): Homolog of NCBI NO: 15222092 NR Description: hypothetical protein; protein id: At1g75060.1
MLEAPVNKSSILNGGGGGFSQLQSCFGDCSSEEELSVLPRHTKVVVTGNNRTKSVLVGLQGVVKKAVGLGGWHWLVLTNGIEVKLQRNALSVLEHPTGNEEDNDLEVDHSTQWNHPSDMTTEDTLKPHKSKKRGHRSSRLSQKALYREVSCDSHSKISSITPRLNMVDLTKLDMAALLRYWRHFNLVDALPNP

SEQ ID NO: 30024 - DNA, 589 bp, Arabidopsis thaliana
  misc_feature (1)..(589): Ceres Seq. ID no. 13591389
  misc_feature: MA Experiment ID: 20000440 Result: Down-regulated in Transcription
  misc_feature: MA Experiment 20000440 PARAMETER Experiment Name: At_Closed-Flower__Sub_P Parameter: Tissue Value: Closed Flower vs. Whole Plant
aaaacaaaaaatttcagaaacttatcatataatggatcatggtaacatgccaccatcatcaccatcatcaatggtaaatcataccaattccaacatgatcatgatgcatatgactttcttctggggaaagaacacggagatactcttctccggctggcccgggacaagtctcggcatgtacgttctatgtctcatcgtcgtcttcctccttgctgttatcgtcgagtggcttgcccattcttcgatccttcgtggacgtggctccactagccgcgccaaggggctcgttcagaccgcagtctacacactcaagacaggccttgcttatctcgtgatgctcgccgttatgtcctttaacggtggagttttcattgtcgctatcgccggattcgccgtgggtttcatgctcttcggaagcactgctttcaagaacccctctgatgacgagaaacccttcgaacaactatgatcactctttattttacttggaaagaacatttcgtttgtgtgtatttaatttgcgtttctttgaattttgatattttgtgactagaatttggaattttatgaagaatatagccatttttgc

SEQ ID NO: 30025 - protein, 155 aa, Arabidopsis thaliana
  peptide (1)..(155): Ceres Seq. ID no. 13591390
  misc_feature (35)..(149): Pfam Name: Ctr copper transporter family Pfam Description: Ctr copper transporter family
  misc_feature (12)..(150): Homolog of NCBI NO: 34909916 NR Description: P0665A11.18 [Oryza sativa (japonica
  misc_feature (34)..(144): Homolog of NCBI NO: 18496856 NR Description: COPT4 [Arabidopsis thaliana]
  misc_feature (34)..(144): Homolog of NCBI NO: 30687312 NR Description: COPT4 protein [Arabidopsis thaliana]
  misc_feature (27)..(148): Homolog of NCBI NO: 18496854 NR Description: copper transporter-like protein COPT3
  misc_feature (17)..(148): Homolog of NCBI NO: 21592951 NR Description: copper transport protein-like [Arabidopsis
  misc_feature (17)..(148): Homolog of NCBI NO: 15237804 NR Description: copper transport protein - like [Arabidopsis
  misc_feature (19)..(150): Homolog of NCBI NO: 15237802 NR Description: copper transport protein [Arabidopsis thaliana]
  misc_feature (13)..(150): Homolog of NCBI NO: 11288418 NR Description: copper transport protein [imported] - Arabidopsis
  misc_feature (11)..(155): Homolog of NCBI NO: 15232677 NR Description: copper transport protein - like protein
  misc_feature (11)..(155): Homolog of NCBI NO: 30683324 NR Description: copper transport protein -related protein
KQKISETYHIMDHGNMPPSSPSSMVNHTNSNMIMMHMTFFWGKNTEILFSGWPGTSLGMYVLCLIVVFLLAVIVEWLAHSSILRGRGSTSRAKGLVQTAVYTLKTGLAYLVMLAVMSFNGGVFIVAIAGFAVGFMLFGSTAFKNPSDDEKPFEQL

SEQ ID NO: 30026 - protein, 145 aa, Arabidopsis thaliana
  peptide (1)..(145): Ceres Seq. ID no. 13591391
  misc_feature (25)..(139): Pfam Name: Ctr copper transporter family Pfam Description: Ctr copper transporter family
  misc_feature (2)..(140): Homolog of NCBI NO: 34909916 NR Description: P0665A11.18 [Oryza sativa (japonica
  misc_feature (24)..(134): Homolog of NCBI NO: 18496856 NR Description: COPT4 [Arabidopsis thaliana]
  misc_feature (24)..(134): Homolog of NCBI NO: 30687312 NR Description: COPT4 protein [Arabidopsis thaliana]
  misc_feature (17)..(138): Homolog of NCBI NO: 18496854 NR Description: copper transporter-like protein COPT3
  misc_feature (7)..(138): Homolog of NCBI NO: 21592951 NR Description: copper transport protein-like [Arabidopsis
  misc_feature (7)..(138): Homolog of NCBI NO: 15237804 NR Description: copper transport protein - like [Arabidopsis
  misc_feature (9)..(140): Homolog of NCBI NO: 15237802 NR Description: copper transport protein [Arabidopsis thaliana]
  misc_feature (3)..(140): Homolog of NCBI NO: 11288418 NR Description: copper transport protein [imported] - Arabidopsis
  misc_feature (1)..(145): Homolog of NCBI NO: 15232677 NR Description: copper transport protein - like protein
  misc_feature (1)..(145): Homolog of NCBI NO: 30683324 NR Description: copper transport protein -related protein
MDHGNMPPSSPSSMVNHTNSNMIMMHMTFFWGKNTEILFSGWPGTSLGMYVLCLIVVFLLAVIVEWLAHSSILRGRGSTSRAKGLVQTAVYTLKTGLAYLVMLAVMSFNGGVFIVAIAGFAVGFMLFGSTAFKNPSDDEKPFEQL

SEQ ID NO: 30027 - protein, 140 aa, Arabidopsis thaliana
  peptide (1)..(140): Ceres Seq. ID no. 13591392
  misc_feature (20)..(134): Pfam Name: Ctr copper transporter family Pfam Description: Ctr copper transporter family
  misc_feature (1)..(135): Homolog of NCBI NO: 34909916 NR Description: P0665A11.18 [Oryza sativa (japonica
  misc_feature (19)..(129): Homolog of NCBI NO: 18496856 NR Description: COPT4 [Arabidopsis thaliana]
  misc_feature (19)..(129): Homolog of NCBI NO: 30687312 NR Description: COPT4 protein [Arabidopsis thaliana]
  misc_feature (12)..(133): Homolog of NCBI NO: 18496854 NR Description: copper transporter-like protein COPT3
  misc_feature (2)..(133): Homolog of NCBI NO: 21592951 NR Description: copper transport protein-like [Arabidopsis
  misc_feature (2)..(133): Homolog of NCBI NO: 15237804 NR Description: copper transport protein - like [Arabidopsis
  misc_feature (4)..(135): Homolog of NCBI NO: 15237802 NR Description: copper transport protein [Arabidopsis thaliana]
  misc_feature (1)..(135): Homolog of NCBI NO: 11288418 NR Description: copper transport protein [imported] - Arabidopsis
  misc_feature (1)..(140): Homolog of NCBI NO: 15232677 NR Description: copper transport protein - like protein
  misc_feature (1)..(140): Homolog of NCBI NO: 30683324 NR Description: copper transport protein -related protein
MPPSSPSSMVNHTNSNMIMMHMTFFWGKNTEILFSGWPGTSLGMYVLCLIVVFLLAVIVEWLAHSSILRGRGSTSRAKGLVQTAVYTLKTGLAYLVMLAVMSFNGGVFIVAIAGFAVGFMLFGSTAFKNPSDDEKPFEQL

SEQ ID NO: 30028 - DNA, 1466 bp, Arabidopsis thaliana
  misc_feature (1)..(1466): Ceres Seq. ID no. 13486699
  misc_feature: MA Experiment ID: 20000184 Result: Down-regulated in Transcription
  misc_feature: MA Experiment 20000184 PARAMETER Experiment Name: At_Shoots__P Parameter: Age (day) Value: 7
  misc_feature: MA Experiment 20000184 PARAMETER Experiment Name: At_Shoots__P Parameter: Tissue Value: Shoots vs. Whole Plant
  misc_feature: MA Experiment ID: 20000185 Result: Down-regulated in Transcription
  misc_feature: MA Experiment 20000185 PARAMETER Experiment Name: At_Roots__P Parameter: Age (day) Value: 7 vs. 21
  misc_feature: MA Experiment 20000185 PARAMETER Experiment Name: At_Roots__P Parameter: Organism Value: A. thaliana
  misc_feature: MA Experiment 20000185 PARAMETER Experiment Name: At_Roots__P Parameter: Tissue Value: Roots vs. Whole Plant
  misc_feature: MA Experiment ID: 20000234 Result: Up-regulated in Transcription
  misc_feature: MA Experiment 20000234 PARAMETER Experiment Name: At_Siliques_P Parameter: Age (day) Value: 21
  misc_feature: MA Experiment 20000234 PARAMETER Experiment Name: At_Siliques_P Parameter: Organism Value: A. thaliana
  misc_feature: MA Experiment 20000234 PARAMETER Experiment Name: At_Siliques_P Parameter: Plant Line Value: WS
  misc_feature: MA Experiment 20000234 PARAMETER Experiment Name: At_Siliques_P Parameter: Tissue Value: Less Than 5mm Siliques vs. Whole Plant
  misc_feature: MA Experiment ID: 20000264 Result: Up-regulated in Transcription
  misc_feature: MA Experiment 20000264 PARAMETER Experiment Name: At_Open_Flower_P Parameter: Age (day) Value: 21
  misc_feature: MA Experiment 20000264 PARAMETER Experiment Name: At_Open_Flower_P Parameter: Plant Line Value: WS
  misc_feature: MA Experiment 20000264 PARAMETER Experiment Name: At_Open_Flower_P Parameter: Tissue Value: Open Flower vs. Whole Plant
  misc_feature: MA Experiment ID: 20000265 Result: Up-regulated in Transcription
  misc_feature: MA Experiment 20000265 PARAMETER Experiment Name: At_Open_Flower_P Parameter: Age (day) Value: 21
  misc_feature: MA Experiment 20000265 PARAMETER Experiment Name: At_Open_Flower_P Parameter: Plant Line Value: WS
  misc_feature: MA Experiment 20000265 PARAMETER Experiment Name: At_Open_Flower_P Parameter: Tissue Value: Closed Flower vs. Whole Plant
  misc_feature: MA Experiment ID: 20000286 Result: Up-regulated in Transcription
  misc_feature: MA Experiment 20000286 PARAMETER Experiment Name: At_Open_Flower_P Parameter: Age (day) Value: 21
  misc_feature: MA Experiment 20000286 PARAMETER Experiment Name: At_Open_Flower_P Parameter: Plant Line Value: WS
  misc_feature: MA Experiment 20000286 PARAMETER Experiment Name: At_Open_Flower_P Parameter: Tissue Value: Half Open vs. Whole Plant
  misc_feature: MA Experiment ID: 20000794 Result: Up-regulated in Transcription
  misc_feature: MA Experiment 20000794 PARAMETER Experiment Name: At_Petals_P Parameter: Age (day) Value: 23-25 days
  misc_feature: MA Experiment 20000794 PARAMETER Experiment Name: At_Petals_P Parameter: Plant Line Value: WS
  misc_feature: MA Experiment 20000794 PARAMETER Experiment Name: At_Petals_P Parameter: Tissue Value: Petals vs. Whole plant
  misc_feature: MA Experiment ID: 20001757 Result: Down-regulated in Transcription
  misc_feature: MA Experiment 20001757 PARAMETER Experiment Name: At_50mM_NH4NO3_L-to-H_P Parameter: Timepoint (hr) Value: 6
  misc_feature: MA Experiment 20001757 PARAMETER Experiment Name: At_50mM_NH4NO3_L-to-H_P Parameter: Tissue Value: Leaf
  misc_feature: MA Experiment 20001757 PARAMETER Experiment Name: At_50mM_NH4NO3_L-to-H_P Parameter: Treatment Value: 50mM NH4NO3 vs 100mM Mannitol
  misc_feature: MA Experiment ID: 20001910 Result: Up-regulated in Transcription
  misc_feature: MA Experiment 20001910 PARAMETER Experiment Name: At_Drought_Reproduction_P Parameter: Age (day) Value: 37
  misc_feature: MA Experiment 20001910 PARAMETER Experiment Name: At_Drought_Reproduction_P Parameter: Organism Value: A. thaliana
  misc_feature: MA Experiment 20001910 PARAMETER Experiment Name: At_Drought_Reproduction_P Parameter: Plant Line Value: WS
  misc_feature: MA Experiment 20001910 PARAMETER Experiment Name: At_Drought_Reproduction_P Parameter: Timepoint (day) Value: 7
  misc_feature: MA Experiment 20001910 PARAMETER Experiment Name: At_Drought_Reproduction_P Parameter: Tissue Value: Flowers
  misc_feature: MA Experiment 20001910 PARAMETER Experiment Name: At_Drought_Reproduction_P Parameter: Treatment Value: Drought vs. No Drought
  misc_feature: MA Experiment ID: 20001911 Result: Up-regulated in Transcription
  misc_feature: MA Experiment 20001911 PARAMETER Experiment Name: At_Drought_Reproduction_P Parameter: Age (day) Value: 40
  misc_feature: MA Experiment 20001911 PARAMETER Experiment Name: At_Drought_Reproduction_P Parameter: Organism Value: A. thaliana
  misc_feature: MA Experiment 20001911 PARAMETER Experiment Name: At_Drought_Reproduction_P Parameter: Plant Line Value: WS
  misc_feature: MA Experiment 20001911 PARAMETER Experiment Name: At_Drought_Reproduction_P Parameter: Timepoint (day) Value: 10
  misc_feature: MA Experiment 20001911 PARAMETER Experiment Name: At_Drought_Reproduction_P Parameter: Tissue Value: Flowers
  misc_feature: MA Experiment 20001911 PARAMETER Experiment Name: At_Drought_Reproduction_P Parameter: Treatment Value: Drought vs. No Drought
ataaaaaataaaaaatactgtaaaataaatagatagtcataactagtgtattacaaaaaaaaaataaagtaaataaaagtaatcactagctagtgactaaactaaatcccaattatgggtcgtgtacattttggtgtatcagcattctttgttttttgtttgttaggtttatcagctaatgcaaagatcttcaatattaattctcctccaggttctgatatcactaacgcattgttgaaagcattcaatgaggcatgccaattcccgacaaagagcaccgttatgatcccaaaaggtgaatacaagcttggggagatcgtgatgatgggtccatgcaaagctcctataaggattgctcttctaggtaccgtgaaagctgacggtaacgctaatggaaaggagaaatgggtcgctttccgcaacattaatgggtttaagttgaacggaggtggtgttttcgacggtgaaggaaacgcagcttggagggtcaacaactgccacaagactttcaactgcaagaagctccccatcagcattaggtttgatttcgtcaccgacgcgaaaattagaggcattacctccttagatgcaaagcacttccacattaacgtcattggagcaaagaacgtgacattcgaagacgtcaagatcattgcccctgcagagagtcccaacaccgatggtatccacgttggaagaagtgacggaatcaagatcatcaattcatttatctccacaggagatgactgtgtctctgttggagatgggatgaagaaccttcttgtcgaaagagttacatgcggtccgggacatggaatcagtattggaagtcttggaaggtacagccacgaggaaaacgttagtggcatcaagatcatcaactgcactctccaagagactgacaatggtctaaggatcaagacatggccttctgctgcttgtaccacaaccgcctccgatatccatttcgagaacatcctcctcaagaacgtcagcaaccccatcctcatcgaccaagagtactgcccatggaaccaatgcaacaagcagaaaccatcaacgatcaagttggccaacattagcttcaagaagatcagaggaacatcaggaaacaaagacgcagtgaagcttttgtgtagcaagggatatccatgtcagaacgttgaggttggtgacgtgaacatccagtataccggagcagatggtccagcgactttccaatgctctaacgtatcaccaaagcttgtgggaactcagattccaaaagcgtgtagcagcccggtgacaaagccaccaaagtagaatgtgtatatattataaactcaatacacaatctaaatgtacacccttagtgtatgctgtatgcttcaattgatatctttgtgaaatgacctattttttgagcttttggtatattgtaagaaatgaaccattcttgaaaaaaaaaaacatctaactaatttaat

SEQ ID NO: 30029 - protein, 395 aa, Arabidopsis thaliana
  peptide (1)..(395): Ceres Seq. ID no. 13486700
  misc_feature (48)..(386): Pfam Name: Glycosyl hydrolases family 28 Pfam Description: Glycosyl hydrolases family 28
  misc_feature (8)..(394): Homolog of NCBI NO: 3024386 NR Description: POLYGALACTURONASE PRECURSOR (PG) (PECTINASE)
  misc_feature (8)..(394): Homolog of NCBI NO: 3024385 NR Description: POLYGALACTURONASE PRECURSOR (PG) (PECTINASE)
  misc_feature (1)..(394): Homolog of NCBI NO: 548490 NR Description: Polygalacturonase precursor (PG) (Pectinase)
  misc_feature (1)..(394): Homolog of NCBI NO: 30984029 NR Description: polygalacturonase [Brassica napus]
  misc_feature (1)..(394): Homolog of NCBI NO: 21668071 NR Description: putative pollen polygalacturonase [Brassica
  misc_feature (1)..(392): Homolog of NCBI NO: 15231878 NR Description: exopolygalacturonase [Arabidopsis thaliana]
  misc_feature (1)..(395): Homolog of NCBI NO: 15231876 NR Description: polygalacturonase, putative [Arabidopsis
  misc_feature (5)..(389): Homolog of NCBI NO: 15231874 NR Description: polygalacturonase, putative [Arabidopsis
  misc_feature (5)..(389): Homolog of NCBI NO: 11263969 NR Description: polygalacturonase (EC 3.2.1.15) [imported] -
  misc_feature (1)..(395): Homolog of NCBI NO: 15238902 NR Description: polygalacturonase, putative [Arabidopsis
MGRVHFGVSAFFVFCLLGLSANAKIFNINSPPGSDITNALLKAFNEACQFPTKSTVMIPKGEYKLGEIVMMGPCKAPIRIALLGTVKADGNANGKEKWVAFRNINGFKLNGGGVFDGEGNAAWRVNNCHKTFNCKKLPISIRFDFVTDAKIRGITSLDAKHFHINVIGAKNVTFEDVKIIAPAESPNTDGIHVGRSDGIKIINSFISTGDDCVSVGDGMKNLLVERVTCGPGHGISIGSLGRYSHEENVSGIKIINCTLQETDNGLRIKTWPSAACTTTASDIHFENILLKNVSNPILIDQEYCPWNQCNKQKPSTIKLANISFKKIRGTSGNKDAVKLLCSKGYPCQNVEVGDVNIQYTGADGPATFQCSNVSPKLVGTQIPKACSSPVTKPPK

SEQ ID NO: 30030 - protein, 339 aa, Arabidopsis thaliana
  peptide (1)..(339): Ceres Seq. ID no. 13486701
  misc_feature (1)..(330): Pfam Name: Glycosyl hydrolases family 28 Pfam Description: Glycosyl hydrolases family 28
  misc_feature (1)..(338): Homolog of NCBI NO: 3024386 NR Description: POLYGALACTURONASE PRECURSOR (PG) (PECTINASE)
  misc_feature (1)..(338): Homolog of NCBI NO: 3024385 NR Description: POLYGALACTURONASE PRECURSOR (PG) (PECTINASE)
  misc_feature (1)..(338): Homolog of NCBI NO: 548490 NR Description: Polygalacturonase precursor (PG) (Pectinase)
  misc_feature (1)..(338): Homolog of NCBI NO: 30984029 NR Description: polygalacturonase [Brassica napus]
  misc_feature (1)..(338): Homolog of NCBI NO: 21668071 NR Description: putative pollen polygalacturonase [Brassica
  misc_feature (1)..(336): Homolog of NCBI NO: 15231878 NR Description: exopolygalacturonase [Arabidopsis thaliana]
  misc_feature (1)..(339): Homolog of NCBI NO: 15231876 NR Description: polygalacturonase, putative [Arabidopsis
  misc_feature (1)..(333): Homolog of NCBI NO: 15231874 NR Description: polygalacturonase, putative [Arabidopsis
  misc_feature (1)..(333): Homolog of NCBI NO: 11263969 NR Description: polygalacturonase (EC 3.2.1.15) [imported] -
  misc_feature (1)..(339): Homolog of NCBI NO: 15238902 NR Description: polygalacturonase, putative [Arabidopsis
MIPKGEYKLGEIVMMGPCKAPIRIALLGTVKADGNANGKEKWVAFRNINGFKLNGGGVFDGEGNAAWRVNNCHKTFNCKKLPISIRFDFVTDAKIRGITSLDAKHFHINVIGAKNVTFEDVKIIAPAESPNTDGIHVGRSDGIKIINSFISTGDDCVSVGDGMKNLLVERVTCGPGHGISIGSLGRYSHEENVSGIKIINCTLQETDNGLRIKTWPSAACTTTASDIHFENILLKNVSNPILIDQEYCPWNQCNKQKPSTIKLANISFKKIRGTSGNKDAVKLLCSKGYPCQNVEVGDVNIQYTGADGPATFQCSNVSPKLVGTQIPKACSSPVTKPPK

SEQ ID NO: 30031 - protein, 326 aa, Arabidopsis thaliana
  peptide (1)..(326): Ceres Seq. ID no. 13486702
  misc_feature (1)..(317): Pfam Name: Glycosyl hydrolases family 28 Pfam Description: Glycosyl hydrolases family 28
  misc_feature (1)..(325): Homolog of NCBI NO: 3024386 NR Description: POLYGALACTURONASE PRECURSOR (PG) (PECTINASE)
  misc_feature (1)..(325): Homolog of NCBI NO: 3024385 NR Description: POLYGALACTURONASE PRECURSOR (PG) (PECTINASE)
  misc_feature (1)..(325): Homolog of NCBI NO: 548490 NR Description: Polygalacturonase precursor (PG) (Pectinase)
  misc_feature (1)..(325): Homolog of NCBI NO: 30984029 NR Description: polygalacturonase [Brassica napus]
  misc_feature (1)..(325): Homolog of NCBI NO: 21668071 NR Description: putative pollen polygalacturonase [Brassica
  misc_feature (1)..(323): Homolog of NCBI NO: 15231878 NR Description: exopolygalacturonase [Arabidopsis thaliana]
  misc_feature (1)..(326): Homolog of NCBI NO: 15231876 NR Description: polygalacturonase, putative [Arabidopsis
  misc_feature (1)..(320): Homolog of NCBI NO: 15231874 NR Description: polygalacturonase, putative [Arabidopsis
  misc_feature (1)..(320): Homolog of NCBI NO: 11263969 NR Description: polygalacturonase (EC 3.2.1.15) [imported] -
  misc_feature (1)..(326): Homolog of NCBI NO: 15238902 NR Description: polygalacturonase, putative [Arabidopsis
MMGPCKAPIRIALLGTVKADGNANGKEKWVAFRNINGFKLNGGGVFDGEGNAAWRVNNCHKTFNCKKLPISIRFDFVTDAKIRGITSLDAKHFHINVIGAKNVTFEDVKIIAPAESPNTDGIHVGRSDGIKIINSFISTGDDCVSVGDGMKNLLVERVTCGPGHGISIGSLGRYSHEENVSGIKIINCTLQETDNGLRIKTWPSAACTTTASDIHFENILLKNVSNPILIDQEYCPWNQCNKQKPSTIKLANISFKKIRGTSGNKDAVKLLCSKGYPCQNVEVGDVNIQYTGADGPATFQCSNVSPKLVGTQIPKACSSPVTKPPK

SEQ ID NO: 30032 - DNA, 1558 bp, Arabidopsis thaliana
  misc_feature (1)..(1558): Ceres Seq. ID no. 13497382
  misc_feature: MA Experiment ID: 108462 Result: Down-regulated in Transcription
  misc_feature: MA Experiment 108462 PARAMETER Experiment Name: At_Germinating_Seeds_cDNA_P Parameter: Age (day) Value: 2 vs. 0
  misc_feature: MA Experiment 108462 PARAMETER Experiment Name: At_Germinating_Seeds_cDNA_P Parameter: Tissue Value: Germinating Seeds
  misc_feature: MA Experiment ID: 108463 Result: Down-regulated in Transcription
  misc_feature: MA Experiment 108463 PARAMETER Experiment Name: At_Germinating_Seeds_cDNA_P Parameter: Age (day) Value: 3 vs. 0
  misc_feature: MA Experiment 108463 PARAMETER Experiment Name: At_Germinating_Seeds_cDNA_P Parameter: Tissue Value: Germinating Seeds
  misc_feature: MA Experiment ID: 108464 Result: Down-regulated in Transcription
  misc_feature: MA Experiment 108464 PARAMETER Experiment Name: At_Germinating_Seeds_cDNA_P Parameter: Age (day) Value: 4 vs. 0
  misc_feature: MA Experiment 108464 PARAMETER Experiment Name: At_Germinating_Seeds_cDNA_P Parameter: Tissue Value: Germinating Seeds
  misc_feature: MA Experiment ID: 20000180 Result: Down-regulated in Transcription
  misc_feature: MA Experiment 20000180 PARAMETER Experiment Name: At_Germinating_Seeds_P Parameter: Age (hr) Value: 24 vs. 0
  misc_feature: MA Experiment 20000180 PARAMETER Experiment Name: At_Germinating_Seeds_P Parameter: Tissue Value: Germinating Seeds
ggggaagacaattccgagaaaatagagagtagagagatcctaaagagtcaaaagaggtcaggtgattgattaacccgttgaataatctccttctcccgttgaatcgggtcgaaatagttgaactttaagccaaaccctagcttgaggaggaagaggaatggtcggcgtgatgaacagattgaggaatctggacgcttaccctaaaatcaatgaagatttctacaggcgtactctttctggtggtgttatcaccctcgcctcttctattgtcatgctaattctcttcttctccgagcttcagctgtacattcacccggttactgagactcagcttcgtgttgatacatcaagaggagagaagctacggattaattttgatgttacattccctgcgcttcaatgttcgattattagtcttgattccatggatatcagtggggagaggcaccttgatgtgcgacatgacattattaaaaggagattagactcttctggcaatgtcatcgaggcaaaacaagacggaattggtcatactaagattgaaaaacctttacaaaaacatggtggaaggttggaacacaatgaaacatactgtggttcctgttttggagcagaagcgtcagatgatgcttgttgtaattcatgtgaggaagttcgcgaagcttaccgaaagaaaggttgggccctctcggaccctgaatcaatcgaccagtgtaaaagagaaggctttgtgcaaaaggtaaaagatgaagaaggtgaaggttgtaatgttcacggtttcttggaagttaacaaagttgctgggaactttcatttcattcctgggcaaagctttcatcaatccggttttcaatttcatgatatgttattgttccagcaaggcaactacaatattagccacaaggtcaacaggttggcctttggagactttttccccggtgtagtgaaccctcttgatggtgtgcagtggaatcaggggaaacagagtggcgtctatcaatacttcatcaaggtggtaccaagcatatacaccgatgttcaccagaatacaatacagtcaaaccagttctctgtgacagaacatttccagaacatggaagcaggtcgcatgcaatctccgcctggtgttttcttctactatgatctatcgccaattaaggtgatatttgaggagcaacatgtggagttcttgcacttcctaacaaatgtttgcgctatagtaggaggtatcttcacggtatcgggaatagtagattcgttcatataccatggacaacgagcaattaagaagaaaatggagattggtaaattcaactgagttgtttgatattctccacactttcttgatcagctactggagaatcatctctacgggttttacagttagacattaggtttgaatttgtgacaatgcgatgatttaaagaattttgtagtactgtaagatattccaggatctgaactttgcctttcactattcactatctcttcataggcaacatacaaagtgtaaaatgttgttatcaccgattgaaacgaatgttaatttttcctattc

SEQ ID NO: 30033 - protein, 386 aa, Arabidopsis thaliana
  peptide (1)..(386): Ceres Seq. ID no. 13497383
  misc_feature (5)..(384): Homolog of NCBI NO: 7706278 NR Description: serologically defined breast cancer antigen 84
  misc_feature (5)..(384): Homolog of NCBI NO: 34860248 NR Description: similar to serologically defined breast cancer
  misc_feature (5)..(384): Homolog of NCBI NO: 13384938 NR Description: serologically defined breast cancer antigen 84
  misc_feature (5)..(384): Homolog of NCBI NO: 28278376 NR Description: Similar to serologically defined breast cancer
  misc_feature (358)..(386): Homolog of NCBI NO: 6598578 NR Description: F5J5.4 [Arabidopsis thaliana]
  misc_feature (1)..(154): Homolog of NCBI NO: 6598578 NR Description: F5J5.4 [Arabidopsis thaliana]
  misc_feature (149)..(362): Homolog of NCBI NO: 6598578 NR Description: F5J5.4 [Arabidopsis thaliana]
  misc_feature (1)..(386): Homolog of NCBI NO: 38347102 NR Description: OSJNBa0006M15.17 [Oryza sativa (japonica
  misc_feature (1)..(386): Homolog of NCBI NO: 30693281 NR Description: expressed protein [Arabidopsis thaliana]
  misc_feature (1)..(386): Homolog of NCBI NO: 18395087 NR Description: expressed protein [Arabidopsis thaliana]
MVGVMNRLRNLDAYPKINEDFYRRTLSGGVITLASSIVMLILFFSELQLYIHPVTETQLRVDTSRGEKLRINFDVTFPALQCSIISLDSMDISGERHLDVRHDIIKRRLDSSGNVIEAKQDGIGHTKIEKPLQKHGGRLEHNETYCGSCFGAEASDDACCNSCEEVREAYRKKGWALSDPESIDQCKREGFVQKVKDEEGEGCNVHGFLEVNKVAGNFHFIPGQSFHQSGFQFHDMLLFQQGNYNISHKVNRLAFGDFFPGVVNPLDGVQWNQGKQSGVYQYFIKVVPSIYTDVHQNTIQSNQFSVTEHFQNMEAGRMQSPPGVFFYYDLSPIKVIFEEQHVEFLHFLTNVCAIVGGIFTVSGIVDSFIYHGQRAIKKKMEIGKFN

SEQ ID NO: 30034 - protein, 382 aa, Arabidopsis thaliana
  peptide (1)..(382): Ceres Seq. ID no. 13497384
  misc_feature (1)..(380): Homolog of NCBI NO: 7706278 NR Description: serologically defined breast cancer antigen 84
  misc_feature (1)..(380): Homolog of NCBI NO: 34860248 NR Description: similar to serologically defined breast cancer
  misc_feature (1)..(380): Homolog of NCBI NO: 13384938 NR Description: serologically defined breast cancer antigen 84
  misc_feature (1)..(380): Homolog of NCBI NO: 28278376 NR Description: Similar to serologically defined breast cancer
  misc_feature (354)..(382): Homolog of NCBI NO: 6598578 NR Description: F5J5.4 [Arabidopsis thaliana]
  misc_feature (1)..(150): Homolog of NCBI NO: 6598578 NR Description: F5J5.4 [Arabidopsis thaliana]
  misc_feature (145)..(358): Homolog of NCBI NO: 6598578 NR Description: F5J5.4 [Arabidopsis thaliana]
  misc_feature (1)..(382): Homolog of NCBI NO: 38347102 NR Description: OSJNBa0006M15.17 [Oryza sativa (japonica
  misc_feature (1)..(382): Homolog of NCBI NO: 30693281 NR Description: expressed protein [Arabidopsis thaliana]
  misc_feature (1)..(382): Homolog of NCBI NO: 18395087 NR Description: expressed protein [Arabidopsis thaliana]
MNRLRNLDAYPKINEDFYRRTLSGGVITLASSIVMLILFFSELQLYIHPVTETQLRVDTSRGEKLRINFDVTFPALQCSIISLDSMDISGERHLDVRHDIIKRRLDSSGNVIEAKQDGIGHTKIEKPLQKHGGRLEHNETYCGSCFGAEASDDACCNSCEEVREAYRKKGWALSDPESIDQCKREGFVQKVKDEEGEGCNVHGFLEVNKVAGNFHFIPGQSFHQSGFQFHDMLLFQQGNYNISHKVNRLAFGDFFPGVVNPLDGVQWNQGKQSGVYQYFIKVVPSIYTDVHQNTIQSNQFSVTEHFQNMEAGRMQSPPGVFFYYDLSPIKVIFEEQHVEFLHFLTNVCAIVGGIFTVSGIVDSFIYHGQRAIKKKMEIGKFN

SEQ ID NO: 30035 - protein, 348 aa, Arabidopsis thaliana
  peptide (1)..(348): Ceres Seq. ID no. 13497385
  misc_feature (1)..(346): Homolog of NCBI NO: 7706278 NR Description: serologically defined breast cancer antigen 84
  misc_feature (1)..(346): Homolog of NCBI NO: 34860248 NR Description: similar to serologically defined breast cancer
  misc_feature (1)..(346): Homolog of NCBI NO: 13384938 NR Description: serologically defined breast cancer antigen 84
  misc_feature (1)..(346): Homolog of NCBI NO: 28278376 NR Description: Similar to serologically defined breast cancer
  misc_feature (320)..(348): Homolog of NCBI NO: 6598578 NR Description: F5J5.4 [Arabidopsis thaliana]
  misc_feature (1)..(116): Homolog of NCBI NO: 6598578 NR Description: F5J5.4 [Arabidopsis thaliana]
  misc_feature (111)..(324): Homolog of NCBI NO: 6598578 NR Description: F5J5.4 [Arabidopsis thaliana]
  misc_feature (1)..(348): Homolog of NCBI NO: 38347102 NR Description: OSJNBa0006M15.17 [Oryza sativa (japonica
  misc_feature (1)..(348): Homolog of NCBI NO: 30693281 NR Description: expressed protein [Arabidopsis thaliana]
  misc_feature (1)..(348): Homolog of NCBI NO: 18395087 NR Description: expressed protein [Arabidopsis thaliana]
MLILFFSELQLYIHPVTETQLRVDTSRGEKLRINFDVTFPALQCSIISLDSMDISGERHLDVRHDIIKRRLDSSGNVIEAKQDGIGHTKIEKPLQKHGGRLEHNETYCGSCFGAEASDDACCNSCEEVREAYRKKGWALSDPESIDQCKREGFVQKVKDEEGEGCNVHGFLEVNKVAGNFHFIPGQSFHQSGFQFHDMLLFQQGNYNISHKVNRLAFGDFFPGVVNPLDGVQWNQGKQSGVYQYFIKVVPSIYTDVHQNTIQSNQFSVTEHFQNMEAGRMQSPPGVFFYYDLSPIKVIFEEQHVEFLHFLTNVCAIVGGIFTVSGIVDSFIYHGQRAIKKKMEIGKFN

SEQ ID NO: 30036 - DNA, 1613 bp, Arabidopsis thaliana
  misc_feature (1)..(1613): Ceres Seq. ID no. 13490265
  misc_feature: MA Experiment ID: 108434 Result: Up-regulated in Transcription
  misc_feature: MA Experiment 108434 PARAMETER Experiment Name: At_Root_Tips_cDNA_P Parameter: Tissue Value: Root Tips
  misc_feature: MA Experiment ID: 108461 Result: Down-regulated in Transcription
  misc_feature: MA Experiment 108461 PARAMETER Experiment Name: At_Germinating_Seeds_cDNA_P Parameter: Age (day) Value: 1 vs. 0
  misc_feature: MA Experiment 108461 PARAMETER Experiment Name: At_Germinating_Seeds_cDNA_P Parameter: Tissue Value: Germinating Seeds
  misc_feature: MA Experiment ID: 108462 Result: Down-regulated in Transcription
  misc_feature: MA Experiment 108462 PARAMETER Experiment Name: At_Germinating_Seeds_cDNA_P Parameter: Age (day) Value: 2 vs. 0
  misc_feature: MA Experiment 108462 PARAMETER Experiment Name: At_Germinating_Seeds_cDNA_P Parameter: Tissue Value: Germinating Seeds
  misc_feature: MA Experiment ID: 108463 Result: Down-regulated in Transcription
  misc_feature: MA Experiment 108463 PARAMETER Experiment Name: At_Germinating_Seeds_cDNA_P Parameter: Age (day) Value: 3 vs. 0
  misc_feature: MA Experiment 108463 PARAMETER Experiment Name: At_Germinating_Seeds_cDNA_P Parameter: Tissue Value: Germinating Seeds
  misc_feature: MA Experiment ID: 108464 Result: Down-regulated in Transcription
  misc_feature: MA Experiment 108464 PARAMETER Experiment Name: At_Germinating_Seeds_cDNA_P Parameter: Age (day) Value: 4 vs. 0
  misc_feature: MA Experiment 108464 PARAMETER Experiment Name: At_Germinating_Seeds_cDNA_P Parameter: Tissue Value: Germinating Seeds
  misc_feature: MA Experiment ID: 108572 Result: Down-regulated in Transcription
  misc_feature: MA Experiment 108572 PARAMETER Experiment Name: At_Drought_cDNA_P Parameter: Timepoint (hr) Value: 1
  misc_feature: MA Experiment 108572 PARAMETER Experiment Name: At_Drought_cDNA_P Parameter: Tissue Value: Aerial
  misc_feature: MA Experiment 108572 PARAMETER Experiment Name: At_Drought_cDNA_P Parameter: Treatment Value: Drought vs. No Drought
  misc_feature: MA Experiment ID: 108573 Result: Down-regulated in Transcription
  misc_feature: MA Experiment 108573 PARAMETER Experiment Name: At_Drought_cDNA_P Parameter: Timepoint (hr) Value: 6
  misc_feature: MA Experiment 108573 PARAMETER Experiment Name: At_Drought_cDNA_P Parameter: Tissue Value: Aerial
  misc_feature: MA Experiment 108573 PARAMETER Experiment Name: At_Drought_cDNA_P Parameter: Treatment Value: Drought vs. No Drought
  misc_feature: MA Experiment ID: 20000171 Result: Down-regulated in Transcription
  misc_feature: MA Experiment 20000171 PARAMETER Experiment Name: At_42deg_Heat_P Parameter: Age (day) Value: 14
  misc_feature: MA Experiment 20000171 PARAMETER Experiment Name: At_42deg_Heat_P Parameter: Organism Value: A. thaliana
  misc_feature: MA Experiment 20000171 PARAMETER Experiment Name: At_42deg_Heat_P Parameter: Plant Line Value: WS
  misc_feature: MA Experiment 20000171 PARAMETER Experiment Name: At_42deg_Heat_P Parameter: Temperature (deg C) Value: 42 vs. 22
  misc_feature: MA Experiment 20000171 PARAMETER Experiment Name: At_42deg_Heat_P Parameter: Timepoint (hr) Value: 1
  misc_feature: MA Experiment 20000171 PARAMETER Experiment Name: At_42deg_Heat_P Parameter: Tissue Value: Aerial
  misc_feature: MA Experiment ID: 20000180 Result: Down-regulated in Transcription
  misc_feature: MA Experiment 20000180 PARAMETER Experiment Name: At_Germinating_Seeds_P Parameter: Age (hr) Value: 24 vs. 0
  misc_feature: MA Experiment 20000180 PARAMETER Experiment Name: At_Germinating_Seeds_P Parameter: Tissue Value: Germinating Seeds
  misc_feature: MA Experiment ID: 20000224 Result: Down-regulated in Transcription
  misc_feature: MA Experiment ID: 20000437 Result: Down-regulated in Transcription
  misc_feature: MA Experiment 20000437 PARAMETER Experiment Name: At_Drought_P Parameter: Age (day) Value: 8
  misc_feature: MA Experiment 20000437 PARAMETER Experiment Name: At_Drought_P Parameter: Organism Value: A. thaliana
  misc_feature: MA Experiment 20000437 PARAMETER Experiment Name: At_Drought_P Parameter: Plant Line Value: WS
  misc_feature: MA Experiment 20000437 PARAMETER Experiment Name: At_Drought_P Parameter: Timepoint (hr) Value: 24
  misc_feature: MA Experiment 20000437 PARAMETER Experiment Name: At_Drought_P Parameter: Tissue Value: Whole Plant
  misc_feature: MA Experiment 20000437 PARAMETER Experiment Name: At_Drought_P Parameter: Treatment Value: Drought vs. No Drought
  misc_feature: MA Experiment ID: 20000573 Result: Down-regulated in Transcription
  misc_feature: MA Experiment 20000573 PARAMETER Experiment Name: At_100uM_ABA_Mutants__P Parameter: Organism Value: A. thaliana
  misc_feature: MA Experiment 20000573 PARAMETER Experiment Name: At_100uM_ABA_Mutants__P Parameter: Plant Line Value: CS22 vs. Ler wt
  misc_feature: MA Experiment 20000573 PARAMETER Experiment Name: At_100uM_ABA_Mutants__P Parameter: Timepoint (hr) Value: N/A
  misc_feature: MA Experiment 20000573 PARAMETER Experiment Name: At_100uM_ABA_Mutants__P Parameter: Tissue Value: Whole Plant
  misc_feature: MA Experiment 20000573 PARAMETER Experiment Name: At_100uM_ABA_Mutants__P Parameter: Treatment Value: None
  misc_feature: MA Experiment ID: 20000574 Result: Down-regulated in Transcription
  misc_feature: MA Experiment 20000574 PARAMETER Experiment Name: At_100uM_ABA_Mutants__P Parameter: Organism Value: A. thaliana
  misc_feature: MA Experiment 20000574 PARAMETER Experiment Name: At_100uM_ABA_Mutants__P Parameter: Plant Line Value: CS23 vs. Ler wt
  misc_feature: MA Experiment 20000574 PARAMETER Experiment Name: At_100uM_ABA_Mutants__P Parameter: Timepoint (hr) Value: N/A
  misc_feature: MA Experiment 20000574 PARAMETER Experiment Name: At_100uM_ABA_Mutants__P Parameter: Tissue Value: Whole Plant
  misc_feature: MA Experiment 20000574 PARAMETER Experiment Name: At_100uM_ABA_Mutants__P Parameter: Treatment Value: None
  misc_feature: MA Experiment ID: 20000794 Result: Down-regulated in Transcription
  misc_feature: MA Experiment 20000794 PARAMETER Experiment Name: At_Petals_P Parameter: Age (day) Value: 23-25 days
  misc_feature: MA Experiment 20000794 PARAMETER Experiment Name: At_Petals_P Parameter: Plant Line Value: WS
  misc_feature: MA Experiment 20000794 PARAMETER Experiment Name: At_Petals_P Parameter: Tissue Value: Petals vs. Whole plant
  misc_feature: MA Experiment ID: 20001451 Result: Down-regulated in Transcription
  misc_feature: MA Experiment 20001451 PARAMETER Experiment Name: At_Far-red-induction_P Parameter: Age (day) Value: 7
  misc_feature: MA Experiment 20001451 PARAMETER Experiment Name: At_Far-red-induction_P Parameter: Light Value: Far-red vs. White
  misc_feature: MA Experiment 20001451 PARAMETER Experiment Name: At_Far-red-induction_P Parameter: Organism Value: A. thaliana
  misc_feature: MA Experiment 20001451 PARAMETER Experiment Name: At_Far-red-induction_P Parameter: Plant Line Value: Columbia
  misc_feature: MA Experiment 20001451 PARAMETER Experiment Name: At_Far-red-induction_P Parameter: Timepoint (hr) Value: 24
  misc_feature: MA Experiment 20001451 PARAMETER Experiment Name: At_Far-red-induction_P Parameter: Tissue Value: Whole Plant
  misc_feature: MA Experiment ID: 20001911 Result: Down-regulated in Transcription
  misc_feature: MA Experiment 20001911 PARAMETER Experiment Name: At_Drought_Reproduction_P Parameter: Age (day) Value: 40
  misc_feature: MA Experiment 20001911 PARAMETER Experiment Name: At_Drought_Reproduction_P Parameter: Organism Value: A. thaliana
  misc_feature: MA Experiment 20001911 PARAMETER Experiment Name: At_Drought_Reproduction_P Parameter: Plant Line Value: WS
  misc_feature: MA Experiment 20001911 PARAMETER Experiment Name: At_Drought_Reproduction_P Parameter: Timepoint (day) Value: 10
  misc_feature: MA Experiment 20001911 PARAMETER Experiment Name: At_Drought_Reproduction_P Parameter: Tissue Value: Flowers
  misc_feature: MA Experiment 20001911 PARAMETER Experiment Name: At_Drought_Reproduction_P Parameter: Treatment Value: Drought vs. No Drought
agtctccgtcttcttctccatttcacagtcatcttcttcaacatctaaaaccctaagagaacaacaatggcgttactctctcgaatccgttcatcaacatctctcttccgttacctcaacgcatcaccacaaatccgatcactctcctcggcttcaacaatcctcgcaccagattcaaaaactcctctcacaagcaaagaaaaaagcaaagcagctctttctcttctcaaatccgagaaagatccagatcgtatcctcgaaatctgccgtgcagcttctcttactccagattgtcacattgatcgaatcgctttctccgcagccgtcgagaatctcgccgaaaagaatcatttctccgctgtatcgaatctcctcgacggattcatcgaaaacagacatctcaaatcggaacgtttcgctgctcacgccattgttttgtatgctcaagctaatatgcttgatcattctttaagagtttttcgtgatctcgagaaattcgaaatctctcgtacggttaagtctttaaacgctcttctctttgcttgtttagtagctaaggattacaaagaagctaaaagagtttacattgagatgcctaagatgtatggaattgaacctgatctcgagacttataatcgtatgatcaaagtgttttgtgaatccggttcagcgagttcgtcgtactccattgttgcggagatggagcggaaagggataaagccgaatagttcaagctttggtttgatgatttctgggttttatgcagaggataagagtgatgaagtagggaaagtgttggcgatgatgaaagctcgcggtgttaatatcggtgtttcgacttataacattaggattcagagtttgtgtaagaagaagaaatctaaagaagcaaaggctttgcttgatgggatgttatctgcagggatgaagccgaatacggtaacgtatagccatttgattcacgggttttgtaatgaagatgatttcgaggaagcgaagaagttgtttaaggttatggtgaacagaggatgtaagcctgatagtgagtgttacttcactctcatatattacttgtgcaaaggaggagactttgagacggctttgagtctttgtaaagagagtatggagaagaattgggttccgagttttagtatcatgaagtcgcttgttaacggactagctaaggattcaaaagtcgaagaagcaaaggagcttattgggcaagtgaaagagaagttcactagaaacgtcgagttgtggaacgaagtcgaagccgcattaccgcaatgaatcaaaagatagttcccgagatcggtattttcaaaattttacgaattttctctcttcatttgtcagcaatgaaataagtttatatcttcttagacgatagtaatcttttgctcatcatggtagctatagattaatggtttatcttgttagtttttggatttggaatcagagagatgttgagcagtttatctgtaagatttggtcaaagcattgtagcaatgttaagtgtcttcctatgtttatattatatagtatgatgactatataatatagaaagaagtttaatgtttacatgcttaccacgaactaatgtgttttggagc

SEQ ID NO: 30037 - protein, 407 aa, Arabidopsis thaliana
  peptide (1)..(407): Ceres Seq. ID no. 15218814
  misc_feature (327)..(361): Pfam Name: PPR repeat Pfam Description: PPR repeat
  misc_feature (1)..(388): Homolog of NCBI NO: 18399887 NR Description: pentatricopeptide (PPR) repeat-containing protein
  misc_feature (19)..(388): Homolog of NCBI NO: 21617993 NR Description: unknown [Arabidopsis thaliana]
  misc_feature (23)..(405): Homolog of NCBI NO: 18398767 NR Description: pentatricopeptide (PPR) repeat-containing protein
  misc_feature (23)..(405): Homolog of NCBI NO: 25455786 NR Description: membrane-associated salt-inducible protein like
  misc_feature (23)..(405): Homolog of NCBI NO: 15234493 NR Description: pentatricopeptide (PPR) repeat-containing protein
  misc_feature (1)..(384): Homolog of NCBI NO: 15222796 NR Description: pentatricopeptide (PPR) repeat-containing protein
  misc_feature (31)..(407): Homolog of NCBI NO: 34908820 NR Description: P0557A01.33 [Oryza sativa (japonica
  misc_feature (1)..(406): Homolog of NCBI NO: 15221069 NR Description: pentatricopeptide (PPR) repeat-containing protein
  misc_feature (1)..(407): Homolog of NCBI NO: 18407365 NR Description: pentatricopeptide (PPR) repeat-containing protein
  misc_feature (1)..(407): Homolog of NCBI NO: 21553755 NR Description: putative membrane-associated salt-inducible
MALLSRIRSSTSLFRYLNASPQIRSLSSASTILAPDSKTPLTSKEKSKAALSLLKSEKDPDRILEICRAASLTPDCHIDRIAFSAAVENLAEKNHFSAVSNLLDGFIENRHLKSERFAAHAIVLYAQANMLDHSLRVFRDLEKFEISRTVKSLNALLFACLVAKDYKEAKRVYIEMPKMYGIEPDLETYNRMIKVFCESGSASSSYSIVAEMERKGIKPNSSSFGLMISGFYAEDKSDEVGKVLAMMKARGVNIGVSTYNIRIQSLCKKKKSKEAKALLDGMLSAGMKPNTVTYSHLIHGFCNEDDFEEAKKLFKVMVNRGCKPDSECYFTLIYYLCKGGDFETALSLCKESMEKNWVPSFSIMKSLVNGLAKDSKVEEAKELIGQVKEKFTRNVELWNEVEAALPQ

SEQ ID NO: 30038 - protein, 278 aa, Arabidopsis thaliana
  peptide (1)..(278): Ceres Seq. ID no. 15218815
  misc_feature (198)..(232): Pfam Name: PPR repeat Pfam Description: PPR repeat
  misc_feature (1)..(259): Homolog of NCBI NO: 18399887 NR Description: pentatricopeptide (PPR) repeat-containing protein
  misc_feature (1)..(259): Homolog of NCBI NO: 21617993 NR Description: unknown [Arabidopsis thaliana]
  misc_feature (1)..(276): Homolog of NCBI NO: 18398767 NR Description: pentatricopeptide (PPR) repeat-containing protein
  misc_feature (1)..(276): Homolog of NCBI NO: 25455786 NR Description: membrane-associated salt-inducible protein like
  misc_feature (1)..(276): Homolog of NCBI NO: 15234493 NR Description: pentatricopeptide (PPR) repeat-containing protein
  misc_feature (1)..(255): Homolog of NCBI NO: 15222796 NR Description: pentatricopeptide (PPR) repeat-containing protein
  misc_feature (1)..(278): Homolog of NCBI NO: 34908820 NR Description: P0557A01.33 [Oryza sativa (japonica
  misc_feature (1)..(277): Homolog of NCBI NO: 15221069 NR Description: pentatricopeptide (PPR) repeat-containing protein
  misc_feature (1)..(278): Homolog of NCBI NO: 18407365 NR Description: pentatricopeptide (PPR) repeat-containing protein
  misc_feature (1)..(278): Homolog of NCBI NO: 21553755 NR Description: putative membrane-associated salt-inducible
MLDHSLRVFRDLEKFEISRTVKSLNALLFACLVAKDYKEAKRVYIEMPKMYGIEPDLETYNRMIKVFCESGSASSSYSIVAEMERKGIKPNSSSFGLMISGFYAEDKSDEVGKVLAMMKARGVNIGVSTYNIRIQSLCKKKKSKEAKALLDGMLSAGMKPNTVTYSHLIHGFCNEDDFEEAKKLFKVMVNRGCKPDSECYFTLIYYLCKGGDFETALSLCKESMEKNWVPSFSIMKSLVNGLAKDSKVEEAKELIGQVKEKFTRNVELWNEVEAALPQ

SEQ ID NO: 30039 - protein, 232 aa, Arabidopsis thaliana
  peptide (1)..(232): Ceres Seq. ID no. 15218816
  misc_feature (152)..(186): Pfam Name: PPR repeat Pfam Description: PPR repeat
  misc_feature (1)..(213): Homolog of NCBI NO: 18399887 NR Description: pentatricopeptide (PPR) repeat-containing protein
  misc_feature (1)..(213): Homolog of NCBI NO: 21617993 NR Description: unknown [Arabidopsis thaliana]
  misc_feature (1)..(230): Homolog of NCBI NO: 18398767 NR Description: pentatricopeptide (PPR) repeat-containing protein
  misc_feature (1)..(230): Homolog of NCBI NO: 25455786 NR Description: membrane-associated salt-inducible protein like
  misc_feature (1)..(230): Homolog of NCBI NO: 15234493 NR Description: pentatricopeptide (PPR) repeat-containing protein
  misc_feature (1)..(209): Homolog of NCBI NO: 15222796 NR Description: pentatricopeptide (PPR) repeat-containing protein
  misc_feature (1)..(232): Homolog of NCBI NO: 34908820 NR Description: P0557A01.33 [Oryza sativa (japonica
  misc_feature (1)..(231): Homolog of NCBI NO: 15221069 NR Description: pentatricopeptide (PPR) repeat-containing protein
  misc_feature (1)..(232): Homolog of NCBI NO: 18407365 NR Description: pentatricopeptide (PPR) repeat-containing protein
  misc_feature (1)..(232): Homolog of NCBI NO: 21553755 NR Description: putative membrane-associated salt-inducible
MPKMYGIEPDLETYNRMIKVFCESGSASSSYSIVAEMERKGIKPNSSSFGLMISGFYAEDKSDEVGKVLAMMKARGVNIGVSTYNIRIQSLCKKKKSKEAKALLDGMLSAGMKPNTVTYSHLIHGFCNEDDFEEAKKLFKVMVNRGCKPDSECYFTLIYYLCKGGDFETALSLCKESMEKNWVPSFSIMKSLVNGLAKDSKVEEAKELIGQVKEKFTRNVELWNEVEAALPQ

SEQ ID NO: 30040 - DNA, 1370 bp, Arabidopsis thaliana
  misc_feature (1)..(1370): Ceres Seq. ID no. 13490428
  misc_feature: MA Experiment ID: 108434 Result: Down-regulated in Transcription
  misc_feature: MA Experiment 108434 PARAMETER Experiment Name: At_Root_Tips_cDNA_P Parameter: Tissue Value: Root Tips
  misc_feature: MA Experiment ID: 108461 Result: Up-regulated in Transcription
  misc_feature: MA Experiment 108461 PARAMETER Experiment Name: At_Germinating_Seeds_cDNA_P Parameter: Age (day) Value: 1 vs. 0
  misc_feature: MA Experiment 108461 PARAMETER Experiment Name: At_Germinating_Seeds_cDNA_P Parameter: Tissue Value: Germinating Seeds
  misc_feature: MA Experiment ID: 108462 Result: Up-regulated in Transcription
  misc_feature: MA Experiment 108462 PARAMETER Experiment Name: At_Germinating_Seeds_cDNA_P Parameter: Age (day) Value: 2 vs. 0
  misc_feature: MA Experiment 108462 PARAMETER Experiment Name: At_Germinating_Seeds_cDNA_P Parameter: Tissue Value: Germinating Seeds
  misc_feature: MA Experiment ID: 108463 Result: Up-regulated in Transcription
  misc_feature: MA Experiment 108463 PARAMETER Experiment Name: At_Germinating_Seeds_cDNA_P Parameter: Age (day) Value: 3 vs. 0
  misc_feature: MA Experiment 108463 PARAMETER Experiment Name: At_Germinating_Seeds_cDNA_P Parameter: Tissue Value: Germinating Seeds
  misc_feature: MA Experiment ID: 108573 Result: Down-regulated in Transcription
  misc_feature: MA Experiment 108573 PARAMETER Experiment Name: At_Drought_cDNA_P Parameter: Timepoint (hr) Value: 6
  misc_feature: MA Experiment 108573 PARAMETER Experiment Name: At_Drought_cDNA_P Parameter: Tissue Value: Aerial
  misc_feature: MA Experiment 108573 PARAMETER Experiment Name: At_Drought_cDNA_P Parameter: Treatment Value: Drought vs. No Drought
  misc_feature: MA Experiment ID: 108594 Result: Down-regulated in Transcription
  misc_feature: MA Experiment 108594 PARAMETER Experiment Name: At_Ler-rhl_Root_cDNA_P Parameter: Plant Line Value: null
  misc_feature: MA Experiment ID: 108607 Result: Down-regulated in Transcription
  misc_feature: MA Experiment 108607 PARAMETER Experiment Name: At_100uM_ABA_cDNA_P Parameter: Timepoint (hr) Value: 4
  misc_feature: MA Experiment 108607 PARAMETER Experiment Name: At_100uM_ABA_cDNA_P Parameter: Tissue Value: Aerial
  misc_feature: MA Experiment 108607 PARAMETER Experiment Name: At_100uM_ABA_cDNA_P Parameter: Treatment Value: 100uM ABA vs. No Treatment
  misc_feature: MA Experiment ID: 108608 Result: Down-regulated in Transcription
  misc_feature: MA Experiment 108608 PARAMETER Experiment Name: At_100uM_ABA_cDNA_P Parameter: Timepoint (hr) Value: 1
  misc_feature: MA Experiment 108608 PARAMETER Experiment Name: At_100uM_ABA_cDNA_P Parameter: Tissue Value: Aerial
  misc_feature: MA Experiment 108608 PARAMETER Experiment Name: At_100uM_ABA_cDNA_P Parameter: Treatment Value: 100uM ABA vs. No Treatment
  misc_feature: MA Experiment ID: 108667 Result: Down-regulated in Transcription
  misc_feature: MA Experiment 108667 PARAMETER Experiment Name: At_2mM_SA_cDNA_P Parameter: Plant Line Value: WS
  misc_feature: MA Experiment 108667 PARAMETER Experiment Name: At_2mM_SA_cDNA_P Parameter: Timepoint (hr) Value: 1
  misc_feature: MA Experiment 108667 PARAMETER Experiment Name: At_2mM_SA_cDNA_P Parameter: Treatment Value: 2mM SA vs. No Treatment
  misc_feature: MA Experiment ID: 108668 Result: Down-regulated in Transcription
  misc_feature: MA Experiment 108668 PARAMETER Experiment Name: At_2mM_SA_cDNA_P Parameter: Plant Line Value: WS
  misc_feature: MA Experiment 108668 PARAMETER Experiment Name: At_2mM_SA_cDNA_P Parameter: Timepoint (hr) Value: 6
  misc_feature: MA Experiment 108668 PARAMETER Experiment Name: At_2mM_SA_cDNA_P Parameter: Treatment Value: 2mM SA vs. No Treatment
  misc_feature: MA Experiment ID: 20000069 Result: Down-regulated in Transcription
  misc_feature: MA Experiment 20000069 PARAMETER Experiment Name: At_100uM_ABA_Mutants_cDNA_P Parameter: Plant Line Value: CS23
  misc_feature: MA Experiment 20000069 PARAMETER Experiment Name: At_100uM_ABA_Mutants_cDNA_P Parameter: Timepoint (hr) Value: 6
  misc_feature: MA Experiment 20000069 PARAMETER Experiment Name: At_100uM_ABA_Mutants_cDNA_P Parameter: Tissue Value: Aerial
  misc_feature: MA Experiment 20000069 PARAMETER Experiment Name: At_100uM_ABA_Mutants_cDNA_P Parameter: Treatment Value: 100uM ABA vs. No Treatment
  misc_feature: MA Experiment ID: 20000070 Result: Down-regulated in Transcription
  misc_feature: MA Experiment 20000070 PARAMETER Experiment Name: At_100uM_ABA_Mutants_cDNA_P Parameter: Plant Line Value: CS24
  misc_feature: MA Experiment 20000070 PARAMETER Experiment Name: At_100uM_ABA_Mutants_cDNA_P Parameter: Timepoint (hr) Value: 6
  misc_feature: MA Experiment 20000070 PARAMETER Experiment Name: At_100uM_ABA_Mutants_cDNA_P Parameter: Tissue Value: Aerial
  misc_feature: MA Experiment 20000070 PARAMETER Experiment Name: At_100uM_ABA_Mutants_cDNA_P Parameter: Treatment Value: 100uM ABA vs. No Treatment
  misc_feature: MA Experiment ID: 20000071 Result: Down-regulated in Transcription
  misc_feature: MA Experiment 20000071 PARAMETER Experiment Name: At_100uM_ABA_Mutants_cDNA_P Parameter: Plant Line Value: CS8104
  misc_feature: MA Experiment 20000071 PARAMETER Experiment Name: At_100uM_ABA_Mutants_cDNA_P Parameter: Timepoint (hr) Value: 6
  misc_feature: MA Experiment 20000071 PARAMETER Experiment Name: At_100uM_ABA_Mutants_cDNA_P Parameter: Tissue Value: Aerial
  misc_feature: MA Experiment 20000071 PARAMETER Experiment Name: At_100uM_ABA_Mutants_cDNA_P Parameter: Treatment Value: 100uM ABA vs. No Treatment
  misc_feature: MA Experiment ID: 20000072 Result: Down-regulated in Transcription
  misc_feature: MA Experiment 20000072 PARAMETER Experiment Name: At_100uM_ABA_Mutants_cDNA_P Parameter: Plant Line Value: CS8105
  misc_feature: MA Experiment 20000072 PARAMETER Experiment Name: At_100uM_ABA_Mutants_cDNA_P Parameter: Timepoint (hr) Value: 6
  misc_feature: MA Experiment 20000072 PARAMETER Experiment Name: At_100uM_ABA_Mutants_cDNA_P Parameter: Tissue Value: Aerial
  misc_feature: MA Experiment 20000072 PARAMETER Experiment Name: At_100uM_ABA_Mutants_cDNA_P Parameter: Treatment Value: 100uM ABA vs. No Treatment
  misc_feature: MA Experiment ID: 20000087 Result: Down-regulated in Transcription
  misc_feature: MA Experiment 20000087 PARAMETER Experiment Name: At_100uM_ABA_Mutants_cDNA_P Parameter: Plant Line Value: WS
  misc_feature: MA Experiment 20000087 PARAMETER Experiment Name: At_100uM_ABA_Mutants_cDNA_P Parameter: Timepoint (hr) Value: 6
  misc_feature: MA Experiment 20000087 PARAMETER Experiment Name: At_100uM_ABA_Mutants_cDNA_P Parameter: Tissue Value: Aerial
  misc_feature: MA Experiment 20000087 PARAMETER Experiment Name: At_100uM_ABA_Mutants_cDNA_P Parameter: Treatment Value: 100uM ABA vs. No Treatment
  misc_feature: MA Experiment ID: 20000089 Result: Down-regulated in Transcription
  misc_feature: MA Experiment ID: 20000090 Result: Down-regulated in Transcription
  misc_feature: MA Experiment ID: 20000117 Result: Down-regulated in Transcription
  misc_feature: MA Experiment 20000117 PARAMETER Experiment Name: At_100uM_ABA_Mutants_cDNA_P Parameter: Plant Line Value: Columbia
  misc_feature: MA Experiment 20000117 PARAMETER Experiment Name: At_100uM_ABA_Mutants_cDNA_P Parameter: Timepoint (hr) Value: 6
  misc_feature: MA Experiment 20000117 PARAMETER Experiment Name: At_100uM_ABA_Mutants_cDNA_P Parameter: Tissue Value: Aerial
  misc_feature: MA Experiment 20000117 PARAMETER Experiment Name: At_100uM_ABA_Mutants_cDNA_P Parameter: Treatment Value: 100uM ABA vs. No Treatment
  misc_feature: MA Experiment ID: 20000166 Result: Down-regulated in Transcription
  misc_feature: MA Experiment 20000166 PARAMETER Experiment Name: At_100uM_ABA_P Parameter: Age (day) Value: 14
  misc_feature: MA Experiment 20000166 PARAMETER Experiment Name: At_100uM_ABA_P Parameter: Organism Value: A. thaliana
  misc_feature: MA Experiment 20000166 PARAMETER Experiment Name: At_100uM_ABA_P Parameter: Plant Line Value: WS
  misc_feature: MA Experiment 20000166 PARAMETER Experiment Name: At_100uM_ABA_P Parameter: Timepoint (hr) Value: 1
  misc_feature: MA Experiment 20000166 PARAMETER Experiment Name: At_100uM_ABA_P Parameter: Tissue Value: Aerial
  misc_feature: MA Experiment 20000166 PARAMETER Experiment Name: At_100uM_ABA_P Parameter: Treatment Value: 100uM ABA vs. No Treatment
  misc_feature: MA Experiment ID: 20000173 Result: Down-regulated in Transcription
  misc_feature: MA Experiment 20000173 PARAMETER Experiment Name: At_42deg_Heat_P Parameter: Age (day) Value: 14
  misc_feature: MA Experiment 20000173 PARAMETER Experiment Name: At_42deg_Heat_P Parameter: Organism Value: A. thaliana
  misc_feature: MA Experiment 20000173 PARAMETER Experiment Name: At_42deg_Heat_P Parameter: Plant Line Value: WS
  misc_feature: MA Experiment 20000173 PARAMETER Experiment Name: At_42deg_Heat_P Parameter: Temperature (deg C) Value: 42 vs. 22
  misc_feature: MA Experiment 20000173 PARAMETER Experiment Name: At_42deg_Heat_P Parameter: Timepoint (hr) Value: 6
  misc_feature: MA Experiment 20000173 PARAMETER Experiment Name: At_42deg_Heat_P Parameter: Tissue Value: Aerial
  misc_feature: MA Experiment ID: 20000179 Result: Up-regulated in Transcription
  misc_feature: MA Experiment 20000179 PARAMETER Experiment Name: At_Germinating_Seeds_P Parameter: Age (hr) Value: 6 vs. 0
  misc_feature: MA Experiment 20000179 PARAMETER Experiment Name: At_Germinating_Seeds_P Parameter: Tissue Value: Germinating Seeds
  misc_feature: MA Experiment ID: 20000180 Result: Up-regulated in Transcription
  misc_feature: MA Experiment 20000180 PARAMETER Experiment Name: At_Germinating_Seeds_P Parameter: Age (hr) Value: 24 vs. 0
  misc_feature: MA Experiment 20000180 PARAMETER Experiment Name: At_Germinating_Seeds_P Parameter: Tissue Value: Germinating Seeds
  misc_feature: MA Experiment ID: 20000182 Result: Down-regulated in Transcription
  misc_feature: MA Experiment 20000182 PARAMETER Experiment Name: At_2mM_SA_P Parameter: Age (day) Value: 14
  misc_feature: MA Experiment 20000182 PARAMETER Experiment Name: At_2mM_SA_P Parameter: Organism Value: A. thaliana
  misc_feature: MA Experiment 20000182 PARAMETER Experiment Name: At_2mM_SA_P Parameter: Plant Line Value: WS
  misc_feature: MA Experiment 20000182 PARAMETER Experiment Name: At_2mM_SA_P Parameter: Timepoint (hr) Value: 6
  misc_feature: MA Experiment 20000182 PARAMETER Experiment Name: At_2mM_SA_P Parameter: Tissue Value: Aerial
  misc_feature: MA Experiment 20000182 PARAMETER Experiment Name: At_2mM_SA_P Parameter: Treatment Value: 2mM SA vs. No Treatment
  misc_feature: MA Experiment ID: 20000184 Result: Down-regulated in Transcription
  misc_feature: MA Experiment 20000184 PARAMETER Experiment Name: At_Shoots__P Parameter: Age (day) Value: 7
  misc_feature: MA Experiment 20000184 PARAMETER Experiment Name: At_Shoots__P Parameter: Tissue Value: Shoots vs. Whole Plant
  misc_feature: MA Experiment ID: 20000234 Result: Down-regulated in Transcription
  misc_feature: MA Experiment 20000234 PARAMETER Experiment Name: At_Siliques_P Parameter: Age (day) Value: 21
  misc_feature: MA Experiment 20000234 PARAMETER Experiment Name: At_Siliques_P Parameter: Organism Value: A. thaliana
  misc_feature: MA Experiment 20000234 PARAMETER Experiment Name: At_Siliques_P Parameter: Plant Line Value: WS
  misc_feature: MA Experiment 20000234 PARAMETER Experiment Name: At_Siliques_P Parameter: Tissue Value: Less Than 5mm Siliques vs. Whole Plant
  misc_feature: MA Experiment ID: 20000264 Result: Up-regulated in Transcription
  misc_feature: MA Experiment 20000264 PARAMETER Experiment Name: At_Open_Flower_P Parameter: Age (day) Value: 21
  misc_feature: MA Experiment 20000264 PARAMETER Experiment Name: At_Open_Flower_P Parameter: Plant Line Value: WS
  misc_feature: MA Experiment 20000264 PARAMETER Experiment Name: At_Open_Flower_P Parameter: Tissue Value: Open Flower vs. Whole Plant
  misc_feature: MA Experiment ID: 20000437 Result: Down-regulated in Transcription
  misc_feature: MA Experiment 20000437 PARAMETER Experiment Name: At_Drought_P Parameter: Age (day) Value: 8
  misc_feature: MA Experiment 20000437 PARAMETER Experiment Name: At_Drought_P Parameter: Organism Value: A. thaliana
  misc_feature: MA Experiment 20000437 PARAMETER Experiment Name: At_Drought_P Parameter: Plant Line Value: WS
  misc_feature: MA Experiment 20000437 PARAMETER Experiment Name: At_Drought_P Parameter: Timepoint (hr) Value: 24
  misc_feature: MA Experiment 20000437 PARAMETER Experiment Name: At_Drought_P Parameter: Tissue Value: Whole Plant
  misc_feature: MA Experiment 20000437 PARAMETER Experiment Name: At_Drought_P Parameter: Treatment Value: Drought vs. No Drought
  misc_feature: MA Experiment ID: 20000438 Result: Down-regulated in Transcription
  misc_feature: MA Experiment 20000438 PARAMETER Experiment Name: At_Shoots__P Parameter: Age (day) Value: 14
  misc_feature: MA Experiment 20000438 PARAMETER Experiment Name: At_Shoots__P Parameter: Tissue Value: Shoots vs. Whole Plant
  misc_feature: MA Experiment ID: 20000451 Result: Down-regulated in Transcription
  misc_feature: MA Experiment 20000451 PARAMETER Experiment Name: At_CS6879_Shoots-Roots_P Parameter: Age (day) Value: 14
  misc_feature: MA Experiment 20000451 PARAMETER Experiment Name: At_CS6879_Shoots-Roots_P Parameter: Organism Value: A. thaliana
  misc_feature: MA Experiment 20000451 PARAMETER Experiment Name: At_CS6879_Shoots-Roots_P Parameter: Plant Line Value: CS6879 vs. WS
  misc_feature: MA Experiment 20000451 PARAMETER Experiment Name: At_CS6879_Shoots-Roots_P Parameter: Tissue Value: Roots
  misc_feature: MA Experiment ID: 20000495 Result: Up-regulated in Transcription
  misc_feature: MA Experiment 20000495 PARAMETER Experiment Name: At_Guard_Cells_P Parameter: Harvest Date Value: 8/2/2002
  misc_feature: MA Experiment 20000495 PARAMETER Experiment Name: At_Guard_Cells_P Parameter: Organism Value: A. thaliana
  misc_feature: MA Experiment 20000495 PARAMETER Experiment Name: At_Guard_Cells_P Parameter: Tissue Value: Guard Cells vs. Leaves
  misc_feature: MA Experiment ID: 20000794 Result: Up-regulated in Transcription
  misc_feature: MA Experiment 20000794 PARAMETER Experiment Name: At_Petals_P Parameter: Age (day) Value: 23-25 days
  misc_feature: MA Experiment 20000794 PARAMETER Experiment Name: At_Petals_P Parameter: Plant Line Value: WS
  misc_feature: MA Experiment 20000794 PARAMETER Experiment Name: At_Petals_P Parameter: Tissue Value: Petals vs. Whole plant
  misc_feature: MA Experiment ID: 20001248 Result: Down-regulated in Transcription
  misc_feature: MA Experiment 20001248 PARAMETER Experiment Name: At_Far-red-induction_P Parameter: Age (day) Value: 7
  misc_feature: MA Experiment 20001248 PARAMETER Experiment Name: At_Far-red-induction_P Parameter: Light Value: Far-red vs. White
  misc_feature: MA Experiment 20001248 PARAMETER Experiment Name: At_Far-red-induction_P Parameter: Organism Value: A. thaliana
  misc_feature: MA Experiment 20001248 PARAMETER Experiment Name: At_Far-red-induction_P Parameter: Plant Line Value: Columbia
  misc_feature: MA Experiment 20001248 PARAMETER Experiment Name: At_Far-red-induction_P Parameter: Timepoint (hr) Value: 4
  misc_feature: MA Experiment 20001248 PARAMETER Experiment Name: At_Far-red-induction_P Parameter: Tissue Value: Whole Plant
  misc_feature: MA Experiment ID: 20001555 Result: Down-regulated in Transcription
  misc_feature: MA Experiment 20001555 PARAMETER Experiment Name: At_Drought_Soil_Dry_P Parameter: Age (day) Value: 24
  misc_feature: MA Experiment 20001555 PARAMETER Experiment Name: At_Drought_Soil_Dry_P Parameter: Organism Value: A. thaliana
  misc_feature: MA Experiment 20001555 PARAMETER Experiment Name: At_Drought_Soil_Dry_P Parameter: Plant Line Value: WS
  misc_feature: MA Experiment 20001555 PARAMETER Experiment Name: At_Drought_Soil_Dry_P Parameter: Post Timepoint (hr) Value: None
  misc_feature: MA Experiment 20001555 PARAMETER Experiment Name: At_Drought_Soil_Dry_P Parameter: Post-Treatment Value: None
  misc_feature: MA Experiment 20001555 PARAMETER Experiment Name: At_Drought_Soil_Dry_P Parameter: Timepoint (day) Value: 10
  misc_feature: MA Experiment 20001555 PARAMETER Experiment Name: At_Drought_Soil_Dry_P Parameter: Treatment Value: Drought vs. No Drought
  misc_feature: MA Experiment ID: 20001556 Result: Down-regulated in Transcription
  misc_feature: MA Experiment 20001556 PARAMETER Experiment Name: At_Drought_Soil_Dry_P Parameter: Age (day) Value: 26
  misc_feature: MA Experiment 20001556 PARAMETER Experiment Name: At_Drought_Soil_Dry_P Parameter: Organism Value: A. thaliana
  misc_feature: MA Experiment 20001556 PARAMETER Experiment Name: At_Drought_Soil_Dry_P Parameter: Plant Line Value: WS
  misc_feature: MA Experiment 20001556 PARAMETER Experiment Name: At_Drought_Soil_Dry_P Parameter: Post Timepoint (hr) Value: None
  misc_feature: MA Experiment 20001556 PARAMETER Experiment Name: At_Drought_Soil_Dry_P Parameter: Post-Treatment Value: None
  misc_feature: MA Experiment 20001556 PARAMETER Experiment Name: At_Drought_Soil_Dry_P Parameter: Timepoint (day) Value: 12
  misc_feature: MA Experiment 20001556 PARAMETER Experiment Name: At_Drought_Soil_Dry_P Parameter: Treatment Value: Drought vs. No Drought
  misc_feature: MA Experiment ID: 20001560 Result: Down-regulated in Transcription
  misc_feature: MA Experiment 20001560 PARAMETER Experiment Name: At_Drought_Soil_Dry_P Parameter: Age (day) Value: 28
  misc_feature: MA Experiment 20001560 PARAMETER Experiment Name: At_Drought_Soil_Dry_P Parameter: Organism Value: A. thaliana
  misc_feature: MA Experiment 20001560 PARAMETER Experiment Name: At_Drought_Soil_Dry_P Parameter: Plant Line Value: WS
  misc_feature: MA Experiment 20001560 PARAMETER Experiment Name: At_Drought_Soil_Dry_P Parameter: Post Timepoint (hr) Value: None
  misc_feature: MA Experiment 20001560 PARAMETER Experiment Name: At_Drought_Soil_Dry_P Parameter: Post-Treatment Value: None
  misc_feature: MA Experiment 20001560 PARAMETER Experiment Name: At_Drought_Soil_Dry_P Parameter: Timepoint (day) Value: 14
  misc_feature: MA Experiment 20001560 PARAMETER Experiment Name: At_Drought_Soil_Dry_P Parameter: Treatment Value: Drought vs. No Drought
  misc_feature: MA Experiment ID: 20001757 Result: Down-regulated in Transcription
  misc_feature: MA Experiment 20001757 PARAMETER Experiment Name: At_50mM_NH4NO3_L-to-H_P Parameter: Timepoint (hr) Value: 6
  misc_feature: MA Experiment 20001757 PARAMETER Experiment Name: At_50mM_NH4NO3_L-to-H_P Parameter: Tissue Value: Leaf
  misc_feature: MA Experiment 20001757 PARAMETER Experiment Name: At_50mM_NH4NO3_L-to-H_P Parameter: Treatment Value: 50mM NH4NO3 vs 100mM Mannitol
  misc_feature: MA Experiment ID: 20001905 Result: Down-regulated in Transcription
  misc_feature: MA Experiment 20001905 PARAMETER Experiment Name: At_Drought_Reproduction_P Parameter: Age (day) Value: 40
  misc_feature: MA Experiment 20001905 PARAMETER Experiment Name: At_Drought_Reproduction_P Parameter: Organism Value: A. thaliana
  misc_feature: MA Experiment 20001905 PARAMETER Experiment Name: At_Drought_Reproduction_P Parameter: Plant Line Value: WS
  misc_feature: MA Experiment 20001905 PARAMETER Experiment Name: At_Drought_Reproduction_P Parameter: Timepoint (day) Value: 10
  misc_feature: MA Experiment 20001905 PARAMETER Experiment Name: At_Drought_Reproduction_P Parameter: Tissue Value: Rosettes
  misc_feature: MA Experiment 20001905 PARAMETER Experiment Name: At_Drought_Reproduction_P Parameter: Treatment Value: Drought vs. No Drought
  misc_feature: MA Experiment ID: 20001908 Result: Up-regulated in Transcription
  misc_feature: MA Experiment 20001908 PARAMETER Experiment Name: At_Drought_Reproduction_P Parameter: Age (day) Value: 40
  misc_feature: MA Experiment 20001908 PARAMETER Experiment Name: At_Drought_Reproduction_P Parameter: Organism Value: A. thaliana
  misc_feature: MA Experiment 20001908 PARAMETER Experiment Name: At_Drought_Reproduction_P Parameter: Plant Line Value: WS
  misc_feature: MA Experiment 20001908 PARAMETER Experiment Name: At_Drought_Reproduction_P Parameter: Timepoint (day) Value: 10
  misc_feature: MA Experiment 20001908 PARAMETER Experiment Name: At_Drought_Reproduction_P Parameter: Tissue Value: Siliques
  misc_feature: MA Experiment 20001908 PARAMETER Experiment Name: At_Drought_Reproduction_P Parameter: Treatment Value: Drought vs. No Drought
  misc_feature: MA Experiment ID: 20001911 Result: Down-regulated in Transcription
  misc_feature: MA Experiment 20001911 PARAMETER Experiment Name: At_Drought_Reproduction_P Parameter: Age (day) Value: 40
  misc_feature: MA Experiment 20001911 PARAMETER Experiment Name: At_Drought_Reproduction_P Parameter: Organism Value: A. thaliana
  misc_feature: MA Experiment 20001911 PARAMETER Experiment Name: At_Drought_Reproduction_P Parameter: Plant Line Value: WS
  misc_feature: MA Experiment 20001911 PARAMETER Experiment Name: At_Drought_Reproduction_P Parameter: Timepoint (day) Value: 10
  misc_feature: MA Experiment 20001911 PARAMETER Experiment Name: At_Drought_Reproduction_P Parameter: Tissue Value: Flowers
  misc_feature: MA Experiment 20001911 PARAMETER Experiment Name: At_Drought_Reproduction_P Parameter: Treatment Value: Drought vs. No Drought
aacaactcatatcaattttttaaaaaaaactctccatatatctattacttctacgctaactagagagggagattattgctcttaagtgatggaggaagtaaagaagagggattgtatggagaaggcaaggccattcatttcaatggtagtgttgcaagtagggctagcaggaatggatattctctcaaaggctgttctaaacaaaggcatgagcaattacgtccttgttgtttaccgtcacgccgttgcaaccatcgttatggccccgttcgccttctatttcgacaagaaggtgagaccgaagatgacactgatgatattcttcaagatatcactccttggtttactcgagccagtgatcgaccagaacttatactatctcgggatgaaatatacgacagctacatttgcaaccgccatgtacaacgtcctacccgcaatcactttcgtccttgcctatatatttggcctcgaaagagtaaagctacggtgcattaggagcacgggtaaggtggttggaacattggctactgttggaggagccatgatcatgacacttgtcaaaggcccagttctcgatctgttttggaccaaaggagtctctgcacataacacagctgggaccgacattcatagcgccatcaaaggcgcagtattggtcacgattggttgttttagctatgcatgtttcatgattctccaagcgataacattaaggacttaccctgctgagctctctctcacagcatggatatgtcttatggggacaatagaaggaaccgccgtggcattagtgatggagaaaggaaatcccagcgcatgggccattggttgggacactaaacttcttacagccacctatagtgggatagtgtgctcagcattggcttactacgttggaggagtggtgatgaaaaccagaggtcctgtgtttgtgacagctttcagtcctctttgtatgatcatagtagcgattatgtcgaccatcatctttgctgagcaaatgtaccttggaagggttcttggtgctgtagttatatgtgcaggattataccttgtgatatggggcaaaggaaaagattacaaatataattccacgctgcaattagatgacgaatcagcacaaccaaagctagaactaagcggaaacgggaaggataatgttgatcatgaagtcattactataagtaagcaaggagaacaaagaagaacagctgtagaaacagtctaacttaacggtatcggcacaaatgtttttcatggaggagtaattaacgtatagcagtttcatttgttgtccattatgtttcagagcaacaatgtcatagaattgctaactaccatgggagaataataattgtctaattaag

SEQ ID NO: 30041 - protein, 380 aa, Arabidopsis thaliana
  peptide (1)..(380): Ceres Seq. ID no. 13490429
  misc_feature (196)..(326): Pfam Name: Integral membrane protein DUF6 Pfam Description: Integral membrane protein DUF6
  misc_feature (7)..(379): Homolog of NCBI NO: 15219123 NR Description: nodulin N21 family protein [Arabidopsis thaliana]
  misc_feature (10)..(365): Homolog of NCBI NO: 26452235 NR Description: putative nodulin [Arabidopsis thaliana]
  misc_feature (1)..(355): Homolog of NCBI NO: 15240683 NR Description: nodulin MtN21 family protein [Arabidopsis
  misc_feature (10)..(365): Homolog of NCBI NO: 15236455 NR Description: nodulin MtN21 family protein [Arabidopsis
  misc_feature (10)..(365): Homolog of NCBI NO: 21593603 NR Description: nodulin-like protein [Arabidopsis thaliana]
  misc_feature (67)..(346): Homolog of NCBI NO: 18404429 NR Description: nodulin MtN21 family protein [Arabidopsis
  misc_feature (14)..(368): Homolog of NCBI NO: 15225480 NR Description: nodulin MtN21 family protein [Arabidopsis
  misc_feature (9)..(346): Homolog of NCBI NO: 25408555 NR Description: nodulin-like protein [imported] - Arabidopsis
  misc_feature (19)..(380): Homolog of NCBI NO: 21553757 NR Description: nodulin-like protein [Arabidopsis thaliana]
  misc_feature (1)..(380): Homolog of NCBI NO: 15224291 NR Description: nodulin MtN21 family protein [Arabidopsis
MEEVKKRDCMEKARPFISMVVLQVGLAGMDILSKAVLNKGMSNYVLVVYRHAVATIVMAPFAFYFDKKVRPKMTLMIFFKISLLGLLEPVIDQNLYYLGMKYTTATFATAMYNVLPAITFVLAYIFGLERVKLRCIRSTGKVVGTLATVGGAMIMTLVKGPVLDLFWTKGVSAHNTAGTDIHSAIKGAVLVTIGCFSYACFMILQAITLRTYPAELSLTAWICLMGTIEGTAVALVMEKGNPSAWAIGWDTKLLTATYSGIVCSALAYYVGGVVMKTRGPVFVTAFSPLCMIIVAIMSTIIFAEQMYLGRVLGAVVICAGLYLVIWGKGKDYKYNSTLQLDDESAQPKLELSGNGKDNVDHEVITISKQGEQRRTAVETV

SEQ ID NO: 30042 - protein, 371 aa, Arabidopsis thaliana
  peptide (1)..(371): Ceres Seq. ID no. 13490430
  misc_feature (187)..(317): Pfam Name: Integral membrane protein DUF6 Pfam Description: Integral membrane protein DUF6
  misc_feature (1)..(370): Homolog of NCBI NO: 15219123 NR Description: nodulin N21 family protein [Arabidopsis thaliana]
  misc_feature (1)..(356): Homolog of NCBI NO: 26452235 NR Description: putative nodulin [Arabidopsis thaliana]
  misc_feature (1)..(346): Homolog of NCBI NO: 15240683 NR Description: nodulin MtN21 family protein [Arabidopsis
  misc_feature (1)..(356): Homolog of NCBI NO: 15236455 NR Description: nodulin MtN21 family protein [Arabidopsis
  misc_feature (1)..(356): Homolog of NCBI NO: 21593603 NR Description: nodulin-like protein [Arabidopsis thaliana]
  misc_feature (58)..(337): Homolog of NCBI NO: 18404429 NR Description: nodulin MtN21 family protein [Arabidopsis
  misc_feature (5)..(359): Homolog of NCBI NO: 15225480 NR Description: nodulin MtN21 family protein [Arabidopsis
  misc_feature (1)..(337): Homolog of NCBI NO: 25408555 NR Description: nodulin-like protein [imported] - Arabidopsis
  misc_feature (10)..(371): Homolog of NCBI NO: 21553757 NR Description: nodulin-like protein [Arabidopsis thaliana]
  misc_feature (1)..(371): Homolog of NCBI NO: 15224291 NR Description: nodulin MtN21 family protein [Arabidopsis
MEKARPFISMVVLQVGLAGMDILSKAVLNKGMSNYVLVVYRHAVATIVMAPFAFYFDKKVRPKMTLMIFFKISLLGLLEPVIDQNLYYLGMKYTTATFATAMYNVLPAITFVLAYIFGLERVKLRCIRSTGKVVGTLATVGGAMIMTLVKGPVLDLFWTKGVSAHNTAGTDIHSAIKGAVLVTIGCFSYACFMILQAITLRTYPAELSLTAWICLMGTIEGTAVALVMEKGNPSAWAIGWDTKLLTATYSGIVCSALAYYVGGVVMKTRGPVFVTAFSPLCMIIVAIMSTIIFAEQMYLGRVLGAVVICAGLYLVIWGKGKDYKYNSTLQLDDESAQPKLELSGNGKDNVDHEVITISKQGEQRRTAVETV

SEQ ID NO: 30043 - protein, 362 aa, Arabidopsis thaliana
  peptide (1)..(362): Ceres Seq. ID no. 13490431
  misc_feature (178)..(308): Pfam Name: Integral membrane protein DUF6 Pfam Description: Integral membrane protein DUF6
  misc_feature (1)..(361): Homolog of NCBI NO: 15219123 NR Description: nodulin N21 family protein [Arabidopsis thaliana]
  misc_feature (1)..(347): Homolog of NCBI NO: 26452235 NR Description: putative nodulin [Arabidopsis thaliana]
  misc_feature (1)..(337): Homolog of NCBI NO: 15240683 NR Description: nodulin MtN21 family protein [Arabidopsis
  misc_feature (1)..(347): Homolog of NCBI NO: 15236455 NR Description: nodulin MtN21 family protein [Arabidopsis
  misc_feature (1)..(347): Homolog of NCBI NO: 21593603 NR Description: nodulin-like protein [Arabidopsis thaliana]
  misc_feature (49)..(328): Homolog of NCBI NO: 18404429 NR Description: nodulin MtN21 family protein [Arabidopsis
  misc_feature (1)..(350): Homolog of NCBI NO: 15225480 NR Description: nodulin MtN21 family protein [Arabidopsis
  misc_feature (1)..(328): Homolog of NCBI NO: 25408555 NR Description: nodulin-like protein [imported] - Arabidopsis
  misc_feature (1)..(362): Homolog of NCBI NO: 21553757 NR Description: nodulin-like protein [Arabidopsis thaliana]
  misc_feature (1)..(362): Homolog of NCBI NO: 15224291 NR Description: nodulin MtN21 family protein [Arabidopsis
MVVLQVGLAGMDILSKAVLNKGMSNYVLVVYRHAVATIVMAPFAFYFDKKVRPKMTLMIFFKISLLGLLEPVIDQNLYYLGMKYTTATFATAMYNVLPAITFVLAYIFGLERVKLRCIRSTGKVVGTLATVGGAMIMTLVKGPVLDLFWTKGVSAHNTAGTDIHSAIKGAVLVTIGCFSYACFMILQAITLRTYPAELSLTAWICLMGTIEGTAVALVMEKGNPSAWAIGWDTKLLTATYSGIVCSALAYYVGGVVMKTRGPVFVTAFSPLCMIIVAIMSTIIFAEQMYLGRVLGAVVICAGLYLVIWGKGKDYKYNSTLQLDDESAQPKLELSGNGKDNVDHEVITISKQGEQRRTAVETV

SEQ ID NO: 30044 - DNA, 1623 bp, Arabidopsis thaliana
  misc_feature (1)..(1623): Ceres Seq. ID no. 12335112
  misc_feature: MA Experiment ID: 108435 Result: Down-regulated in Transcription
  misc_feature: MA Experiment 108435 PARAMETER Experiment Name: At_stm_Mutants_cDNA_P Parameter: Plant Line Value: wt Landsburg vs stm
  misc_feature: MA Experiment 108435 PARAMETER Experiment Name: At_stm_Mutants_cDNA_P Parameter: Tissue Value: Shoot Apical Meristem Region
  misc_feature: MA Experiment ID: 108462 Result: Up-regulated in Transcription
  misc_feature: MA Experiment 108462 PARAMETER Experiment Name: At_Germinating_Seeds_cDNA_P Parameter: Age (day) Value: 2 vs. 0
  misc_feature: MA Experiment 108462 PARAMETER Experiment Name: At_Germinating_Seeds_cDNA_P Parameter: Tissue Value: Germinating Seeds
  misc_feature: MA Experiment ID: 108463 Result: Up-regulated in Transcription
  misc_feature: MA Experiment 108463 PARAMETER Experiment Name: At_Germinating_Seeds_cDNA_P Parameter: Age (day) Value: 3 vs. 0
  misc_feature: MA Experiment 108463 PARAMETER Experiment Name: At_Germinating_Seeds_cDNA_P Parameter: Tissue Value: Germinating Seeds
  misc_feature: MA Experiment ID: 108464 Result: Up-regulated in Transcription
  misc_feature: MA Experiment 108464 PARAMETER Experiment Name: At_Germinating_Seeds_cDNA_P Parameter: Age (day) Value: 4 vs. 0
  misc_feature: MA Experiment 108464 PARAMETER Experiment Name: At_Germinating_Seeds_cDNA_P Parameter: Tissue Value: Germinating Seeds
  misc_feature: MA Experiment ID: 108473 Result: Down-regulated in Transcription
  misc_feature: MA Experiment 108473 PARAMETER Experiment Name: At_Drought_Flowers_cDNA_P Parameter: Timepoint (hr) Value: 7 d
  misc_feature: MA Experiment 108473 PARAMETER Experiment Name: At_Drought_Flowers_cDNA_P Parameter: Tissue Value: Flower
  misc_feature: MA Experiment 108473 PARAMETER Experiment Name: At_Drought_Flowers_cDNA_P Parameter: Treatment Value: Drought vs. No Drought
  misc_feature: MA Experiment ID: 108585 Result: Down-regulated in Transcription
  misc_feature: MA Experiment 108585 PARAMETER Experiment Name: At_5mM_NaNP_cDNA_P Parameter: Timepoint (hr) Value: 6
  misc_feature: MA Experiment 108585 PARAMETER Experiment Name: At_5mM_NaNP_cDNA_P Parameter: Tissue Value: Aerial
  misc_feature: MA Experiment 108585 PARAMETER Experiment Name: At_5mM_NaNP_cDNA_P Parameter: Treatment Value: null
  misc_feature: MA Experiment ID: 108595 Result: Down-regulated in Transcription
  misc_feature: MA Experiment 108595 PARAMETER Experiment Name: At_Ler-pi_Ovule_cDNA_P Parameter: Plant Line Value: null
  misc_feature: MA Experiment ID: 108668 Result: Down-regulated in Transcription
  misc_feature: MA Experiment 108668 PARAMETER Experiment Name: At_2mM_SA_cDNA_P Parameter: Plant Line Value: WS
  misc_feature: MA Experiment 108668 PARAMETER Experiment Name: At_2mM_SA_cDNA_P Parameter: Timepoint (hr) Value: 6
  misc_feature: MA Experiment 108668 PARAMETER Experiment Name: At_2mM_SA_cDNA_P Parameter: Treatment Value: 2mM SA vs. No Treatment
  misc_feature: MA Experiment ID: 20000071 Result: Up-regulated in Transcription
  misc_feature: MA Experiment 20000071 PARAMETER Experiment Name: At_100uM_ABA_Mutants_cDNA_P Parameter: Plant Line Value: CS8104
  misc_feature: MA Experiment 20000071 PARAMETER Experiment Name: At_100uM_ABA_Mutants_cDNA_P Parameter: Timepoint (hr) Value: 6
  misc_feature: MA Experiment 20000071 PARAMETER Experiment Name: At_100uM_ABA_Mutants_cDNA_P Parameter: Tissue Value: Aerial
  misc_feature: MA Experiment 20000071 PARAMETER Experiment Name: At_100uM_ABA_Mutants_cDNA_P Parameter: Treatment Value: 100uM ABA vs. No Treatment
  misc_feature: MA Experiment ID: 20000111 Result: Down-regulated in Transcription
  misc_feature: MA Experiment 20000111 PARAMETER Experiment Name: At_42deg_Heat_cDNA_P Parameter: Temperature (deg C) Value: 42 vs. 22
  misc_feature: MA Experiment 20000111 PARAMETER Experiment Name: At_42deg_Heat_cDNA_P Parameter: Timepoint (hr) Value: 6
  misc_feature: MA Experiment 20000111 PARAMETER Experiment Name: At_42deg_Heat_cDNA_P Parameter: Tissue Value: Aerial
  misc_feature: MA Experiment ID: 20000113 Result: Down-regulated in Transcription
  misc_feature: MA Experiment 20000113 PARAMETER Experiment Name: At_42deg_Heat_cDNA_P Parameter: Temperature (deg C) Value: 42 vs. 22
  misc_feature: MA Experiment 20000113 PARAMETER Experiment Name: At_42deg_Heat_cDNA_P Parameter: Timepoint (hr) Value: 8
  misc_feature: MA Experiment 20000113 PARAMETER Experiment Name: At_42deg_Heat_cDNA_P Parameter: Tissue Value: Aerial
  misc_feature: Phenotype: ROSETTE LEAVES Curled-Curled 4
  misc_feature: Phenotype: ROSETTE LEAVES Shape-Lanceolate
  misc_feature: Phenotype: INFLORESCENCE Flowering Time-Late Flowering
  misc_feature: Phenotype: ROSETTE LEAVES Other
  misc_feature: Phenotype: WHOLE PLANT Size-Small
  misc_feature: Phenotype: ROSETTE LEAVES Other
  misc_feature: Phenotype: WHOLE PLANT Size-Small
  misc_feature: Phenotype: INFLORESCENCE Flowering Time-Late Flowering
  misc_feature: Phenotype: ROSETTE LEAVES Shape-Elliptic
  misc_feature: Phenotype: ROSETTE LEAVES Other
aaaaataaaaatgaaacctttctctagagtgttcattattttggtcatcgttttgttaacaagctacatagatgcctttaccagaaacgattttccagaggattttctcttcggagctgccacttctgcttatcagtgggaaggagctgttgatgaagatggaagaactcctagcgtctgggacacgacctctcactgttatagtggaagtaatggagatgtagcatgtgatgggtatcacaagtacaaggaagatgttaagttgatggtagatatgggcttacaagcattcagattctctatctcctggccaagacctaatggaagaggatccatgaacccaaaaggtctattgttttacaagaacctcatcaaagaattacggagccatggaattgaaccacacgttacactttaccactacgatcttccgcagcctcttgaagatgagtacggaggatggatcaaccgaaaaatcatagaagactttactgcttttgcagatgtatgcttcagagagtttggcgatgatgtgaagttatggactacaatcaacgaagctacaatattcgccattgctacttatggcgaaggtgtcacgtttggacattgtactcctaccaaattcaccaattgttcttccgggaattcttgtacagaaacatatattgcagggcataacatgttgctagcacatgcctctgcttcaaatttgtataaactaaagtatcagagtaagcaaagaggatccataggccttagtatatatgcattcgggttatctccttatacaaactccaaggacgatgaaatcgcaactcaaagagctaaagctttcctctatggatggatgttgaagccattggtatttggggactatccggatgaaatgaagagaaccttgggatcgagattaccggttttctcagaggcagagtcggaacaaatgaaagggtcatctgactttgtaggaattattcactacacgacagtctatgtcacaaaccaacccgcaccttatatctttcccagcagcgtcaacaaaggcttctttaaagatatgggcgcatatattatatccactgggaattcttcattatttgagtttgaagcaactccatggggtcttgaaggtgttcttgagtatctaaagcagagctataacaatcctccaatctatattcttgaaaatggtacaccaatgaaacacgattcgatgctacaagacacaccaagagttgaatacattcaagcttacattggtgctgtgctcaacgccatcaagaatggatcggacacgagaggttacttcgtatggtcgctgatagatttgtatgagataataggtggatataaaagcagcttcggaatgtaccatgtcaatttcagcgatcctgctcgcaagaggtcgtcaaagctctctgcttcttggtactcaggttttctcaatggtacaattgatgttgcttctcaaaatattactaagttgcagaacaagttctctggctcttcttcattgtaatgttcttaaactaaagtagcctggtttgattttgatctatctattctatgataaagacctcagggatttgcatatgaataaatgatgtgtcttgtgagacc

SEQ ID NO: 30045 - protein, 506 aa, Arabidopsis thaliana
  peptide (1)..(506): Ceres Seq. ID no. 12335113
  misc_feature (24)..(503): Homolog of NCBI NO: 25289447 NR Description: hypothetical protein T2K10.15 [imported] -
  misc_feature (24)..(503): Homolog of NCBI NO: 22330338 NR Description: glycosyl hydrolase family 1; protein id:
  misc_feature (28)..(505): Homolog of NCBI NO: 22328869 NR Description: glycosyl hydrolase family 1; protein id:
  misc_feature (4)..(220): Homolog of NCBI NO: 11264268 NR Description: beta-glucosidase-like protein - Arabidopsis
  misc_feature (253)..(506): Homolog of NCBI NO: 11264268 NR Description: beta-glucosidase-like protein - Arabidopsis
  misc_feature (4)..(506): Homolog of NCBI NO: 15228847 NR Description: glycosyl hydrolase family 1; protein id:
  misc_feature (4)..(506): Homolog of NCBI NO: 7435451 NR Description: beta-glucosidase homolog T27E11.60 - Arabidopsis
  misc_feature (4)..(506): Homolog of NCBI NO: 22331910 NR Description: glycosyl hydrolase family 1; protein id:
  misc_feature (4)..(506): Homolog of NCBI NO: 7435452 NR Description: beta-glucosidase homolog T27E11.70 - Arabidopsis
  misc_feature (4)..(506): Homolog of NCBI NO: 18417073 NR Description: glycosyl hydrolase family 1
KIKMKPFSRVFIILVIVLLTSYIDAFTRNDFPEDFLFGAATSAYQWEGAVDEDGRTPSVWDTTSHCYSGSNGDVACDGYHKYKEDVKLMVDMGLQAFRFSISWPRPNGRGSMNPKGLLFYKNLIKELRSHGIEPHVTLYHYDLPQPLEDEYGGWINRKIIEDFTAFADVCFREFGDDVKLWTTINEATIFAIATYGEGVTFGHCTPTKFTNCSSGNSCTETYIAGHNMLLAHASASNLYKLKYQSKQRGSIGLSIYAFGLSPYTNSKDDEIATQRAKAFLYGWMLKPLVFGDYPDEMKRTLGSRLPVFSEAESEQMKGSSDFVGIIHYTTVYVTNQPAPYIFPSSVNKGFFKDMGAYIISTGNSSLFEFEATPWGLEGVLEYLKQSYNNPPIYILENGTPMKHDSMLQDTPRVEYIQAYIGAVLNAIKNGSDTRGYFVWSLIDLYEIIGGYKSSFGMYHVNFSDPARKRSSKLSASWYSGFLNGTIDVASQNITKLQNKFSGSSSL

SEQ ID NO: 30046 - protein, 503 aa, Arabidopsis thaliana
  peptide (1)..(503): Ceres Seq. ID no. 12335114
  misc_feature (21)..(500): Homolog of NCBI NO: 25289447 NR Description: hypothetical protein T2K10.15 [imported] -
  misc_feature (21)..(500): Homolog of NCBI NO: 22330338 NR Description: glycosyl hydrolase family 1; protein id:
  misc_feature (25)..(502): Homolog of NCBI NO: 22328869 NR Description: glycosyl hydrolase family 1; protein id:
  misc_feature (1)..(217): Homolog of NCBI NO: 11264268 NR Description: beta-glucosidase-like protein - Arabidopsis
  misc_feature (250)..(503): Homolog of NCBI NO: 11264268 NR Description: beta-glucosidase-like protein - Arabidopsis
  misc_feature (1)..(503): Homolog of NCBI NO: 15228847 NR Description: glycosyl hydrolase family 1; protein id:
  misc_feature (1)..(503): Homolog of NCBI NO: 7435451 NR Description: beta-glucosidase homolog T27E11.60 - Arabidopsis
  misc_feature (1)..(503): Homolog of NCBI NO: 22331910 NR Description: glycosyl hydrolase family 1; protein id:
  misc_feature (1)..(503): Homolog of NCBI NO: 7435452 NR Description: beta-glucosidase homolog T27E11.70 - Arabidopsis
  misc_feature (1)..(503): Homolog of NCBI NO: 18417073 NR Description: glycosyl hydrolase family 1
MKPFSRVFIILVIVLLTSYIDAFTRNDFPEDFLFGAATSAYQWEGAVDEDGRTPSVWDTTSHCYSGSNGDVACDGYHKYKEDVKLMVDMGLQAFRFSISWPRPNGRGSMNPKGLLFYKNLIKELRSHGIEPHVTLYHYDLPQPLEDEYGGWINRKIIEDFTAFADVCFREFGDDVKLWTTINEATIFAIATYGEGVTFGHCTPTKFTNCSSGNSCTETYIAGHNMLLAHASASNLYKLKYQSKQRGSIGLSIYAFGLSPYTNSKDDEIATQRAKAFLYGWMLKPLVFGDYPDEMKRTLGSRLPVFSEAESEQMKGSSDFVGIIHYTTVYVTNQPAPYIFPSSVNKGFFKDMGAYIISTGNSSLFEFEATPWGLEGVLEYLKQSYNNPPIYILENGTPMKHDSMLQDTPRVEYIQAYIGAVLNAIKNGSDTRGYFVWSLIDLYEIIGGYKSSFGMYHVNFSDPARKRSSKLSASWYSGFLNGTIDVASQNITKLQNKFSGSSSL

SEQ ID NO: 30047 - protein, 418 aa, Arabidopsis thaliana
  peptide (1)..(418): Ceres Seq. ID no. 12335115
  misc_feature (1)..(415): Homolog of NCBI NO: 25289447 NR Description: hypothetical protein T2K10.15 [imported] -
  misc_feature (1)..(415): Homolog of NCBI NO: 22330338 NR Description: glycosyl hydrolase family 1; protein id:
  misc_feature (1)..(417): Homolog of NCBI NO: 22328869 NR Description: glycosyl hydrolase family 1; protein id:
  misc_feature (1)..(132): Homolog of NCBI NO: 11264268 NR Description: beta-glucosidase-like protein - Arabidopsis
  misc_feature (165)..(418): Homolog of NCBI NO: 11264268 NR Description: beta-glucosidase-like protein - Arabidopsis
  misc_feature (1)..(418): Homolog of NCBI NO: 15228847 NR Description: glycosyl hydrolase family 1; protein id:
  misc_feature (1)..(418): Homolog of NCBI NO: 7435451 NR Description: beta-glucosidase homolog T27E11.60 - Arabidopsis
  misc_feature (1)..(418): Homolog of NCBI NO: 22331910 NR Description: glycosyl hydrolase family 1; protein id:
  misc_feature (1)..(418): Homolog of NCBI NO: 7435452 NR Description: beta-glucosidase homolog T27E11.70 - Arabidopsis
  misc_feature (1)..(418): Homolog of NCBI NO: 18417073 NR Description: glycosyl hydrolase family 1
MVDMGLQAFRFSISWPRPNGRGSMNPKGLLFYKNLIKELRSHGIEPHVTLYHYDLPQPLEDEYGGWINRKIIEDFTAFADVCFREFGDDVKLWTTINEATIFAIATYGEGVTFGHCTPTKFTNCSSGNSCTETYIAGHNMLLAHASASNLYKLKYQSKQRGSIGLSIYAFGLSPYTNSKDDEIATQRAKAFLYGWMLKPLVFGDYPDEMKRTLGSRLPVFSEAESEQMKGSSDFVGIIHYTTVYVTNQPAPYIFPSSVNKGFFKDMGAYIISTGNSSLFEFEATPWGLEGVLEYLKQSYNNPPIYILENGTPMKHDSMLQDTPRVEYIQAYIGAVLNAIKNGSDTRGYFVWSLIDLYEIIGGYKSSFGMYHVNFSDPARKRSSKLSASWYSGFLNGTIDVASQNITKLQNKFSGSSSL

SEQ ID NO: 30048 - DNA, 1868 bp, Arabidopsis thaliana
  misc_feature (1)..(1868): Ceres Seq. ID no. 12333644
  misc_feature: MA Experiment ID: 108462 Result: Up-regulated in Transcription
  misc_feature: MA Experiment 108462 PARAMETER Experiment Name: At_Germinating_Seeds_cDNA_P Parameter: Age (day) Value: 2 vs. 0
  misc_feature: MA Experiment 108462 PARAMETER Experiment Name: At_Germinating_Seeds_cDNA_P Parameter: Tissue Value: Germinating Seeds
  misc_feature: MA Experiment ID: 108464 Result: Up-regulated in Transcription
  misc_feature: MA Experiment 108464 PARAMETER Experiment Name: At_Germinating_Seeds_cDNA_P Parameter: Age (day) Value: 4 vs. 0
  misc_feature: MA Experiment 108464 PARAMETER Experiment Name: At_Germinating_Seeds_cDNA_P Parameter: Tissue Value: Germinating Seeds
  misc_feature: MA Experiment ID: 108569 Result: Up-regulated in Transcription
  misc_feature: MA Experiment 108569 PARAMETER Experiment Name: At_0.001%_MeJA__cDNA_P Parameter: Timepoint (hr) Value: 6
  misc_feature: MA Experiment 108569 PARAMETER Experiment Name: At_0.001%_MeJA__cDNA_P Parameter: Tissue Value: Aerial
  misc_feature: MA Experiment 108569 PARAMETER Experiment Name: At_0.001%_MeJA__cDNA_P Parameter: Treatment Value: 0.001% MeJA vs. No Treatment
  misc_feature: MA Experiment ID: 108573 Result: Up-regulated in Transcription
  misc_feature: MA Experiment 108573 PARAMETER Experiment Name: At_Drought_cDNA_P Parameter: Timepoint (hr) Value: 6
  misc_feature: MA Experiment 108573 PARAMETER Experiment Name: At_Drought_cDNA_P Parameter: Tissue Value: Aerial
  misc_feature: MA Experiment 108573 PARAMETER Experiment Name: At_Drought_cDNA_P Parameter: Treatment Value: Drought vs. No Drought
  misc_feature: MA Experiment ID: 108574 Result: Up-regulated in Transcription
  misc_feature: MA Experiment 108574 PARAMETER Experiment Name: At_Wounding__cDNA_P Parameter: Timepoint (hr) Value: 1
  misc_feature: MA Experiment 108574 PARAMETER Experiment Name: At_Wounding__cDNA_P Parameter: Tissue Value: Aerial
  misc_feature: MA Experiment 108574 PARAMETER Experiment Name: At_Wounding__cDNA_P Parameter: Treatment Value: Wounding vs. No Wounding
  misc_feature: MA Experiment ID: 20000180 Result: Up-regulated in Transcription
  misc_feature: MA Experiment 20000180 PARAMETER Experiment Name: At_Germinating_Seeds_P Parameter: Age (hr) Value: 24 vs. 0
  misc_feature: MA Experiment 20000180 PARAMETER Experiment Name: At_Germinating_Seeds_P Parameter: Tissue Value: Germinating Seeds
  misc_feature: MA Experiment ID: 20000496 Result: Up-regulated in Transcription
  misc_feature: MA Experiment 20000496 PARAMETER Experiment Name: At_Guard_Cells_P Parameter: Harvest Date Value: 7/19/2002
  misc_feature: MA Experiment 20000496 PARAMETER Experiment Name: At_Guard_Cells_P Parameter: Organism Value: Canola
  misc_feature: MA Experiment 20000496 PARAMETER Experiment Name: At_Guard_Cells_P Parameter: Tissue Value: Guard Cells vs. Leaves
atcgctctttgattttgtttctcattgttttgcttcaaattacgcattcgaatctgatcttcgttgatctctgtggaagaaacagataagagaaaatcgcatgaatttttttagaaaactatgttttaattcttcgattgcaagctacttcactaatacgagtcttctgatctcaattcttagtttttctcctcaattgccgatttctctctttcttttcgagcagaaatcgttagatcctttatcgctgtgtaatagtaatactaattttaataatcttgagaataattactccgttcattgttgaatcatggagtccggaggcaaaactaatcgtcagctgcgtaaagctatttgcgtctcaacagacgagaagatgaagaagaagagatcaccttcagtgatagtaattggaggtggtatggctggaatttcagctgctcgcactcttcaagatgcttcctttcaggttgttgtattggagtctcgtgacagaattggtggacgagttcacactgattactcattcggttttccagttgatctcggtgcatcttggttgcatggtgtctgtaaagagaatcctttggctgcagtaattggtagattaggattacctctttatcgtactagcggtgacaattcggttttgtatgatcacgatcttgagagttatgctctgttcgacaaggctggtaaccaagtttctcaagagttggtgacaaaagttggcgaaaattttgagcacattctggaagagatctgtaaagtcagggatgagcaggacgaagacatgtcaatagctcaagccttttctattgtatttaagaggaaccctgaattgaggttggagggacttgcccataatgtgcttcagtggtacttgtgccgcatggaaggatggtttgctgctgatgctgaaaccatctcggcaaagtgttgggatcaggaagaactgttgcccggtggacatggtcttatggttagagggtatcgccctgtaatcaacactctctcgaaaggtcttgatatacgactaagccacagagttaccaagatttcaaggcgctacagtggtgtgaaggtgactacagagaaaggagacacgtttgttgcggatgctgcagtcattgctcttcctctaggagtcttaaagtcaggaatgataacattcgaaccaaagcttccacagtggaaacaagaagctatcaacgatctcggtgttggaatcgagaacaagatcatattgaattttgacaacgtcttttggccaaacgtagagtttttaggagtcgttgcagaaacttcctacggatgcagttatttcttgaacctgcataaagccacaagccatcctgtccttgtttacatgccggctggtcagctcgctagagacatcgagaaaaattccgatgaagcagctgcaaattttgccttttcgcaactacagaaaattcttccagatgcctcttcaccgataaattatttggtatcaaggtggggatcagacatcaattcaatgggatcatatagctatgacattgtgaacaaacctcacgacctctatgagagactgagagtgccattggataatctattctttgcgggggaagccactagctcgagctacccgggatcagttcacggtgcttattcaaccggagtgctggcagctgaagactgcaggatgcgtgtgcttgagcgctatggagagctcgaacatgagatggaagaggaagctcctgcttctgtccctcttctgatctcccgtatgtaatttaaacctcaggtgttttatatcacctccatatgggaacattgttagatttgattttatgagatatcacgagttggaactcttgtgcctg

SEQ ID NO: 30049 - protein, 488 aa, Arabidopsis thaliana
  peptide (1)..(488): Ceres Seq. ID no. 12333645
  misc_feature (38)..(459): Pfam Name: Flavin containing amine oxidoreductase Pfam Description: Flavin containing amine oxidoreductase
  misc_feature (16)..(457): Homolog of NCBI NO: 38505628 NR Description: slr5093 [Synechocystis sp. PCC 6803]
  misc_feature (373)..(488): Homolog of NCBI NO: 25404949 NR Description: protein F1E22.18 [imported] - Arabidopsis
  misc_feature (21)..(393): Homolog of NCBI NO: 25404949 NR Description: protein F1E22.18 [imported] - Arabidopsis
  misc_feature (21)..(488): Homolog of NCBI NO: 13877615 NR Description: putative protein kinase gb|AAD22129 [Arabidopsis
  misc_feature (21)..(488): Homolog of NCBI NO: 15218830 NR Description: polyamine oxidase, putative
  misc_feature (24)..(488): Homolog of NCBI NO: 38344167 NR Description: OSJNBa0053K19.6 [Oryza sativa (japonica
  misc_feature (1)..(488): Homolog of NCBI NO: 18650598 NR Description: At2g43020/MFL8.12 [Arabidopsis thaliana]
  misc_feature (1)..(488): Homolog of NCBI NO: 15224204 NR Description: putative amine oxidase
  misc_feature (1)..(488): Homolog of NCBI NO: 15231622 NR Description: putative protein
  misc_feature (1)..(488): Homolog of NCBI NO: 21553762 NR Description: putative amine oxidase [Arabidopsis thaliana]
MESGGKTNRQLRKAICVSTDEKMKKKRSPSVIVIGGGMAGISAARTLQDASFQVVVLESRDRIGGRVHTDYSFGFPVDLGASWLHGVCKENPLAAVIGRLGLPLYRTSGDNSVLYDHDLESYALFDKAGNQVSQELVTKVGENFEHILEEICKVRDEQDEDMSIAQAFSIVFKRNPELRLEGLAHNVLQWYLCRMEGWFAADAETISAKCWDQEELLPGGHGLMVRGYRPVINTLSKGLDIRLSHRVTKISRRYSGVKVTTEKGDTFVADAAVIALPLGVLKSGMITFEPKLPQWKQEAINDLGVGIENKIILNFDNVFWPNVEFLGVVAETSYGCSYFLNLHKATSHPVLVYMPAGQLARDIEKNSDEAAANFAFSQLQKILPDASSPINYLVSRWGSDINSMGSYSYDIVNKPHDLYERLRVPLDNLFFAGEATSSSYPGSVHGAYSTGVLAAEDCRMRVLERYGELEHEMEEEAPASVPLLISRM

SEQ ID NO: 30050 - protein, 466 aa, Arabidopsis thaliana
  peptide (1)..(466): Ceres Seq. ID no. 12333646
  misc_feature (16)..(437): Pfam Name: Flavin containing amine oxidoreductase Pfam Description: Flavin containing amine oxidoreductase
  misc_feature (1)..(435): Homolog of NCBI NO: 38505628 NR Description: slr5093 [Synechocystis sp. PCC 6803]
  misc_feature (351)..(466): Homolog of NCBI NO: 25404949 NR Description: protein F1E22.18 [imported] - Arabidopsis
  misc_feature (1)..(371): Homolog of NCBI NO: 25404949 NR Description: protein F1E22.18 [imported] - Arabidopsis
  misc_feature (1)..(466): Homolog of NCBI NO: 13877615 NR Description: putative protein kinase gb|AAD22129 [Arabidopsis
  misc_feature (1)..(466): Homolog of NCBI NO: 15218830 NR Description: polyamine oxidase, putative
  misc_feature (2)..(466): Homolog of NCBI NO: 38344167 NR Description: OSJNBa0053K19.6 [Oryza sativa (japonica
  misc_feature (1)..(466): Homolog of NCBI NO: 18650598 NR Description: At2g43020/MFL8.12 [Arabidopsis thaliana]
  misc_feature (1)..(466): Homolog of NCBI NO: 15224204 NR Description: putative amine oxidase
  misc_feature (1)..(466): Homolog of NCBI NO: 15231622 NR Description: putative protein
  misc_feature (1)..(466): Homolog of NCBI NO: 21553762 NR Description: putative amine oxidase [Arabidopsis thaliana]
MKKKRSPSVIVIGGGMAGISAARTLQDASFQVVVLESRDRIGGRVHTDYSFGFPVDLGASWLHGVCKENPLAAVIGRLGLPLYRTSGDNSVLYDHDLESYALFDKAGNQVSQELVTKVGENFEHILEEICKVRDEQDEDMSIAQAFSIVFKRNPELRLEGLAHNVLQWYLCRMEGWFAADAETISAKCWDQEELLPGGHGLMVRGYRPVINTLSKGLDIRLSHRVTKISRRYSGVKVTTEKGDTFVADAAVIALPLGVLKSGMITFEPKLPQWKQEAINDLGVGIENKIILNFDNVFWPNVEFLGVVAETSYGCSYFLNLHKATSHPVLVYMPAGQLARDIEKNSDEAAANFAFSQLQKILPDASSPINYLVSRWGSDINSMGSYSYDIVNKPHDLYERLRVPLDNLFFAGEATSSSYPGSVHGAYSTGVLAAEDCRMRVLERYGELEHEMEEEAPASVPLLISRM

SEQ ID NO: 30051 - protein, 451 aa, Arabidopsis thaliana
  peptide (1)..(451): Ceres Seq. ID no. 12333647
  misc_feature (1)..(422): Pfam Name: Flavin containing amine oxidoreductase Pfam Description: Flavin containing amine oxidoreductase
  misc_feature (1)..(420): Homolog of NCBI NO: 38505628 NR Description: slr5093 [Synechocystis sp. PCC 6803]
  misc_feature (336)..(451): Homolog of NCBI NO: 25404949 NR Description: protein F1E22.18 [imported] - Arabidopsis
  misc_feature (1)..(356): Homolog of NCBI NO: 25404949 NR Description: protein F1E22.18 [imported] - Arabidopsis
  misc_feature (1)..(451): Homolog of NCBI NO: 13877615 NR Description: putative protein kinase gb|AAD22129 [Arabidopsis
  misc_feature (1)..(451): Homolog of NCBI NO: 15218830 NR Description: polyamine oxidase, putative
  misc_feature (1)..(451): Homolog of NCBI NO: 38344167 NR Description: OSJNBa0053K19.6 [Oryza sativa (japonica
  misc_feature (1)..(451): Homolog of NCBI NO: 18650598 NR Description: At2g43020/MFL8.12 [Arabidopsis thaliana]
  misc_feature (1)..(451): Homolog of NCBI NO: 15224204 NR Description: putative amine oxidase
  misc_feature (1)..(451): Homolog of NCBI NO: 15231622 NR Description: putative protein
  misc_feature (1)..(451): Homolog of NCBI NO: 21553762 NR Description: putative amine oxidase [Arabidopsis thaliana]
MAGISAARTLQDASFQVVVLESRDRIGGRVHTDYSFGFPVDLGASWLHGVCKENPLAAVIGRLGLPLYRTSGDNSVLYDHDLESYALFDKAGNQVSQELVTKVGENFEHILEEICKVRDEQDEDMSIAQAFSIVFKRNPELRLEGLAHNVLQWYLCRMEGWFAADAETISAKCWDQEELLPGGHGLMVRGYRPVINTLSKGLDIRLSHRVTKISRRYSGVKVTTEKGDTFVADAAVIALPLGVLKSGMITFEPKLPQWKQEAINDLGVGIENKIILNFDNVFWPNVEFLGVVAETSYGCSYFLNLHKATSHPVLVYMPAGQLARDIEKNSDEAAANFAFSQLQKILPDASSPINYLVSRWGSDINSMGSYSYDIVNKPHDLYERLRVPLDNLFFAGEATSSSYPGSVHGAYSTGVLAAEDCRMRVLERYGELEHEMEEEAPASVPLLISRM

SEQ ID NO: 30052 - DNA, 872 bp, Arabidopsis thaliana
  misc_feature (1)..(872): Ceres Seq. ID no. 12333983
  misc_feature: MA Experiment ID: 108434 Result: Up-regulated in Transcription
  misc_feature: MA Experiment 108434 PARAMETER Experiment Name: At_Root_Tips_cDNA_P Parameter: Tissue Value: Root Tips
  misc_feature: MA Experiment ID: 108462 Result: Down-regulated in Transcription
  misc_feature: MA Experiment 108462 PARAMETER Experiment Name: At_Germinating_Seeds_cDNA_P Parameter: Age (day) Value: 2 vs. 0
  misc_feature: MA Experiment 108462 PARAMETER Experiment Name: At_Germinating_Seeds_cDNA_P Parameter: Tissue Value: Germinating Seeds
  misc_feature: MA Experiment ID: 108463 Result: Down-regulated in Transcription
  misc_feature: MA Experiment 108463 PARAMETER Experiment Name: At_Germinating_Seeds_cDNA_P Parameter: Age (day) Value: 3 vs. 0
  misc_feature: MA Experiment 108463 PARAMETER Experiment Name: At_Germinating_Seeds_cDNA_P Parameter: Tissue Value: Germinating Seeds
  misc_feature: MA Experiment ID: 108464 Result: Down-regulated in Transcription
  misc_feature: MA Experiment 108464 PARAMETER Experiment Name: At_Germinating_Seeds_cDNA_P Parameter: Age (day) Value: 4 vs. 0
  misc_feature: MA Experiment 108464 PARAMETER Experiment Name: At_Germinating_Seeds_cDNA_P Parameter: Tissue Value: Germinating Seeds
  misc_feature: MA Experiment ID: 108573 Result: Down-regulated in Transcription
  misc_feature: MA Experiment 108573 PARAMETER Experiment Name: At_Drought_cDNA_P Parameter: Timepoint (hr) Value: 6
  misc_feature: MA Experiment 108573 PARAMETER Experiment Name: At_Drought_cDNA_P Parameter: Tissue Value: Aerial
  misc_feature: MA Experiment 108573 PARAMETER Experiment Name: At_Drought_cDNA_P Parameter: Treatment Value: Drought vs. No Drought
  misc_feature: MA Experiment ID: 20000224 Result: Down-regulated in Transcription
  misc_feature: MA Experiment ID: 20001451 Result: Up-regulated in Transcription
  misc_feature: MA Experiment 20001451 PARAMETER Experiment Name: At_Far-red-induction_P Parameter: Age (day) Value: 7
  misc_feature: MA Experiment 20001451 PARAMETER Experiment Name: At_Far-red-induction_P Parameter: Light Value: Far-red vs. White
  misc_feature: MA Experiment 20001451 PARAMETER Experiment Name: At_Far-red-induction_P Parameter: Organism Value: A. thaliana
  misc_feature: MA Experiment 20001451 PARAMETER Experiment Name: At_Far-red-induction_P Parameter: Plant Line Value: Columbia
  misc_feature: MA Experiment 20001451 PARAMETER Experiment Name: At_Far-red-induction_P Parameter: Timepoint (hr) Value: 24
  misc_feature: MA Experiment 20001451 PARAMETER Experiment Name: At_Far-red-induction_P Parameter: Tissue Value: Whole Plant
acctttgaaagcaatcaattccattccatcaaaggggtttttagggtttcgtcactcgccgataatcctctctctctagaaaacatgactgccgaacagaaagtggagctcgccgccaaattggaagagcagaagatcgatcttgataaacctgaggttgaagatgatgatgacaatgatgaggatgattccgaggacgatgacgaggcggagggacatgatggggaggccggtggccggtcaaagcaaagcagaagtgagaaaaagagtcgtaaagctatgttgaagcttgggatgaaaccaatcactggtgttagccgtgtcaccgtcaaaaagagcaagaatatcttgtttgtgatatcaaaacctgatgtgttcaagagtccagcttcagatacatatgtgatctttggtgaggccaagatagaggatttgagctcgcagctgcagagtcaagccgcagagcagttcaaggctcccaacctcagcaacgtgatttcacagggagaaacatcgagtgctgcaactgcagctgctgttcaagatgatgatgatgaagaggtagacgaggagggagtagagccaaaggacatcgagcttgtgatgacccaagcaggagtgtctaagccaagggcagttaaggcgctcaagctcgctaatggagatatagtctctgccatcatggagcttaccacctaaatccgaaacttttcctactttgatgtgcttttcgtgtttttgttttcccattttcctttcaagtgattttgcatgttgtatcattatatactatacgtttggactcatttcatattttagaaatttgagtggattttcatgagtttatactctgtttattcacttatcatccc

SEQ ID NO: 30053 - protein, 232 aa, Arabidopsis thaliana
  peptide (1)..(232): Ceres Seq. ID no. 12333984
  misc_feature (85)..(144): Pfam Name: NAC domain Pfam Description: NAC domain
  misc_feature (32)..(232): Homolog of NCBI NO: 18398710 NR Description: expressed protein
  misc_feature (54)..(232): Homolog of NCBI NO: 4115918 NR Description: similar to nascent polypeptide associated complex
  misc_feature (36)..(231): Homolog of NCBI NO: 34902238 NR Description: Putative nascent polypeptide associated complex
  misc_feature (40)..(232): Homolog of NCBI NO: 15235122 NR Description: putative alpha NAC
  misc_feature (25)..(232): Homolog of NCBI NO: 15229149 NR Description: alpha NAC-like protein
  misc_feature (25)..(232): Homolog of NCBI NO: 13899101 NR Description: alpha NAC-like protein [Arabidopsis thaliana]
  misc_feature (29)..(168): Homolog of NCBI NO: 15240731 NR Description: putative protein
  misc_feature (25)..(232): Homolog of NCBI NO: 6752882 NR Description: nascent polypeptide associated complex alpha
  misc_feature (29)..(231): Homolog of NCBI NO: 34907258 NR Description: putative nascent polypeptide associated complex
  misc_feature (29)..(232): Homolog of NCBI NO: 15230476 NR Description: nascent polypeptide associated complex alpha
TFESNQFHSIKGVFRVSSLADNPLSLENMTAEQKVELAAKLEEQKIDLDKPEVEDDDDNDEDDSEDDDEAEGHDGEAGGRSKQSRSEKKSRKAMLKLGMKPITGVSRVTVKKSKNILFVISKPDVFKSPASDTYVIFGEAKIEDLSSQLQSQAAEQFKAPNLSNVISQGETSSAATAAAVQDDDDEEVDEEGVEPKDIELVMTQAGVSKPRAVKALKLANGDIVSAIMELTT

SEQ ID NO: 30054 - protein, 204 aa, Arabidopsis thaliana
  peptide (1)..(204): Ceres Seq. ID no. 12333985
  misc_feature (57)..(116): Pfam Name: NAC domain Pfam Description: NAC domain
  misc_feature (4)..(204): Homolog of NCBI NO: 18398710 NR Description: expressed protein
  misc_feature (26)..(204): Homolog of NCBI NO: 4115918 NR Description: similar to nascent polypeptide associated complex
  misc_feature (8)..(203): Homolog of NCBI NO: 34902238 NR Description: Putative nascent polypeptide associated complex
  misc_feature (12)..(204): Homolog of NCBI NO: 15235122 NR Description: putative alpha NAC
  misc_feature (1)..(204): Homolog of NCBI NO: 15229149 NR Description: alpha NAC-like protein
  misc_feature (1)..(204): Homolog of NCBI NO: 13899101 NR Description: alpha NAC-like protein [Arabidopsis thaliana]
  misc_feature (1)..(140): Homolog of NCBI NO: 15240731 NR Description: putative protein
  misc_feature (1)..(204): Homolog of NCBI NO: 6752882 NR Description: nascent polypeptide associated complex alpha
  misc_feature (1)..(203): Homolog of NCBI NO: 34907258 NR Description: putative nascent polypeptide associated complex
  misc_feature (1)..(204): Homolog of NCBI NO: 15230476 NR Description: nascent polypeptide associated complex alpha
MTAEQKVELAAKLEEQKIDLDKPEVEDDDDNDEDDSEDDDEAEGHDGEAGGRSKQSRSEKKSRKAMLKLGMKPITGVSRVTVKKSKNILFVISKPDVFKSPASDTYVIFGEAKIEDLSSQLQSQAAEQFKAPNLSNVISQGETSSAATAAAVQDDDDEEVDEEGVEPKDIELVMTQAGVSKPRAVKALKLANGDIVSAIMELTT

SEQ ID NO: 30055 - protein, 139 aa, Arabidopsis thaliana
  peptide (1)..(139): Ceres Seq. ID no. 12333986
  misc_feature (1)..(51): Pfam Name: NAC domain Pfam Description: NAC domain
  misc_feature (1)..(139): Homolog of NCBI NO: 18398710 NR Description: expressed protein
  misc_feature (1)..(139): Homolog of NCBI NO: 4115918 NR Description: similar to nascent polypeptide associated complex
  misc_feature (1)..(138): Homolog of NCBI NO: 34902238 NR Description: Putative nascent polypeptide associated complex
  misc_feature (1)..(139): Homolog of NCBI NO: 15235122 NR Description: putative alpha NAC
  misc_feature (1)..(139): Homolog of NCBI NO: 15229149 NR Description: alpha NAC-like protein
  misc_feature (1)..(139): Homolog of NCBI NO: 13899101 NR Description: alpha NAC-like protein [Arabidopsis thaliana]
  misc_feature (1)..(75): Homolog of NCBI NO: 15240731 NR Description: putative protein
  misc_feature (1)..(139): Homolog of NCBI NO: 6752882 NR Description: nascent polypeptide associated complex alpha
  misc_feature (1)..(138): Homolog of NCBI NO: 34907258 NR Description: putative nascent polypeptide associated complex
  misc_feature (1)..(139): Homolog of NCBI NO: 15230476 NR Description: nascent polypeptide associated complex alpha
MLKLGMKPITGVSRVTVKKSKNILFVISKPDVFKSPASDTYVIFGEAKIEDLSSQLQSQAAEQFKAPNLSNVISQGETSSAATAAAVQDDDDEEVDEEGVEPKDIELVMTQAGVSKPRAVKALKLANGDIVSAIMELTT

SEQ ID NO: 30056 - DNA, 1436 bp, Arabidopsis thaliana
  misc_feature (1)..(1436): Ceres Seq. ID no. 12333640
  misc_feature: MA Experiment ID: 108434 Result: Down-regulated in Transcription
  misc_feature: MA Experiment 108434 PARAMETER Experiment Name: At_Root_Tips_cDNA_P Parameter: Tissue Value: Root Tips
  misc_feature: MA Experiment ID: 108461 Result: Up-regulated in Transcription
  misc_feature: MA Experiment 108461 PARAMETER Experiment Name: At_Germinating_Seeds_cDNA_P Parameter: Age (day) Value: 1 vs. 0
  misc_feature: MA Experiment 108461 PARAMETER Experiment Name: At_Germinating_Seeds_cDNA_P Parameter: Tissue Value: Germinating Seeds
  misc_feature: MA Experiment ID: 108462 Result: Up-regulated in Transcription
  misc_feature: MA Experiment 108462 PARAMETER Experiment Name: At_Germinating_Seeds_cDNA_P Parameter: Age (day) Value: 2 vs. 0
  misc_feature: MA Experiment 108462 PARAMETER Experiment Name: At_Germinating_Seeds_cDNA_P Parameter: Tissue Value: Germinating Seeds
  misc_feature: MA Experiment ID: 108463 Result: Up-regulated in Transcription
  misc_feature: MA Experiment 108463 PARAMETER Experiment Name: At_Germinating_Seeds_cDNA_P Parameter: Age (day) Value: 3 vs. 0
  misc_feature: MA Experiment 108463 PARAMETER Experiment Name: At_Germinating_Seeds_cDNA_P Parameter: Tissue Value: Germinating Seeds
  misc_feature: MA Experiment ID: 108464 Result: Up-regulated in Transcription
  misc_feature: MA Experiment 108464 PARAMETER Experiment Name: At_Germinating_Seeds_cDNA_P Parameter: Age (day) Value: 4 vs. 0
  misc_feature: MA Experiment 108464 PARAMETER Experiment Name: At_Germinating_Seeds_cDNA_P Parameter: Tissue Value: Germinating Seeds
  misc_feature: MA Experiment ID: 108473 Result: Up-regulated in Transcription
  misc_feature: MA Experiment 108473 PARAMETER Experiment Name: At_Drought_Flowers_cDNA_P Parameter: Timepoint (hr) Value: 7 d
  misc_feature: MA Experiment 108473 PARAMETER Experiment Name: At_Drought_Flowers_cDNA_P Parameter: Tissue Value: Flower
  misc_feature: MA Experiment 108473 PARAMETER Experiment Name: At_Drought_Flowers_cDNA_P Parameter: Treatment Value: Drought vs. No Drought
  misc_feature: MA Experiment ID: 108488 Result: Down-regulated in Transcription
  misc_feature: MA Experiment ID: 108501 Result: Down-regulated in Transcription
  misc_feature: MA Experiment 108501 PARAMETER Experiment Name: At_ap2_floral_buds_cDNA_P Parameter: Plant Line Value: ap2 (Ler.)
  misc_feature: MA Experiment 108501 PARAMETER Experiment Name: At_ap2_floral_buds_cDNA_P Parameter: Tissue Value: Closed Flower
  misc_feature: MA Experiment ID: 108595 Result: Up-regulated in Transcription
  misc_feature: MA Experiment 108595 PARAMETER Experiment Name: At_Ler-pi_Ovule_cDNA_P Parameter: Plant Line Value: null
  misc_feature: MA Experiment ID: 108608 Result: Up-regulated in Transcription
  misc_feature: MA Experiment 108608 PARAMETER Experiment Name: At_100uM_ABA_cDNA_P Parameter: Timepoint (hr) Value: 1
  misc_feature: MA Experiment 108608 PARAMETER Experiment Name: At_100uM_ABA_cDNA_P Parameter: Tissue Value: Aerial
  misc_feature: MA Experiment 108608 PARAMETER Experiment Name: At_100uM_ABA_cDNA_P Parameter: Treatment Value: 100uM ABA vs. No Treatment
  misc_feature: MA Experiment ID: 108609 Result: Up-regulated in Transcription
  misc_feature: MA Experiment 108609 PARAMETER Experiment Name: At_100uM_ABA_cDNA_P Parameter: Timepoint (hr) Value: 24
  misc_feature: MA Experiment 108609 PARAMETER Experiment Name: At_100uM_ABA_cDNA_P Parameter: Tissue Value: Aerial
  misc_feature: MA Experiment 108609 PARAMETER Experiment Name: At_100uM_ABA_cDNA_P Parameter: Treatment Value: 100uM ABA vs. No Treatment
  misc_feature: MA Experiment ID: 20000069 Result: Up-regulated in Transcription
  misc_feature: MA Experiment 20000069 PARAMETER Experiment Name: At_100uM_ABA_Mutants_cDNA_P Parameter: Plant Line Value: CS23
  misc_feature: MA Experiment 20000069 PARAMETER Experiment Name: At_100uM_ABA_Mutants_cDNA_P Parameter: Timepoint (hr) Value: 6
  misc_feature: MA Experiment 20000069 PARAMETER Experiment Name: At_100uM_ABA_Mutants_cDNA_P Parameter: Tissue Value: Aerial
  misc_feature: MA Experiment 20000069 PARAMETER Experiment Name: At_100uM_ABA_Mutants_cDNA_P Parameter: Treatment Value: 100uM ABA vs. No Treatment
  misc_feature: MA Experiment ID: 20000070 Result: Up-regulated in Transcription
  misc_feature: MA Experiment 20000070 PARAMETER Experiment Name: At_100uM_ABA_Mutants_cDNA_P Parameter: Plant Line Value: CS24
  misc_feature: MA Experiment 20000070 PARAMETER Experiment Name: At_100uM_ABA_Mutants_cDNA_P Parameter: Timepoint (hr) Value: 6
  misc_feature: MA Experiment 20000070 PARAMETER Experiment Name: At_100uM_ABA_Mutants_cDNA_P Parameter: Tissue Value: Aerial
  misc_feature: MA Experiment 20000070 PARAMETER Experiment Name: At_100uM_ABA_Mutants_cDNA_P Parameter: Treatment Value: 100uM ABA vs. No Treatment
  misc_feature: MA Experiment ID: 20000071 Result: Up-regulated in Transcription
  misc_feature: MA Experiment 20000071 PARAMETER Experiment Name: At_100uM_ABA_Mutants_cDNA_P Parameter: Plant Line Value: CS8104
  misc_feature: MA Experiment 20000071 PARAMETER Experiment Name: At_100uM_ABA_Mutants_cDNA_P Parameter: Timepoint (hr) Value: 6
  misc_feature: MA Experiment 20000071 PARAMETER Experiment Name: At_100uM_ABA_Mutants_cDNA_P Parameter: Tissue Value: Aerial
  misc_feature: MA Experiment 20000071 PARAMETER Experiment Name: At_100uM_ABA_Mutants_cDNA_P Parameter: Treatment Value: 100uM ABA vs. No Treatment
  misc_feature: MA Experiment ID: 20000086 Result: Up-regulated in Transcription
  misc_feature: MA Experiment 20000086 PARAMETER Experiment Name: At_100uM_ABA_Mutants_cDNA_P Parameter: Plant Line Value: CS22
  misc_feature: MA Experiment 20000086 PARAMETER Experiment Name: At_100uM_ABA_Mutants_cDNA_P Parameter: Timepoint (hr) Value: 6
  misc_feature: MA Experiment 20000086 PARAMETER Experiment Name: At_100uM_ABA_Mutants_cDNA_P Parameter: Tissue Value: Aerial
  misc_feature: MA Experiment 20000086 PARAMETER Experiment Name: At_100uM_ABA_Mutants_cDNA_P Parameter: Treatment Value: 100uM ABA vs. No Treatment
  misc_feature: MA Experiment ID: 20000087 Result: Up-regulated in Transcription
  misc_feature: MA Experiment 20000087 PARAMETER Experiment Name: At_100uM_ABA_Mutants_cDNA_P Parameter: Plant Line Value: WS
  misc_feature: MA Experiment 20000087 PARAMETER Experiment Name: At_100uM_ABA_Mutants_cDNA_P Parameter: Timepoint (hr) Value: 6
  misc_feature: MA Experiment 20000087 PARAMETER Experiment Name: At_100uM_ABA_Mutants_cDNA_P Parameter: Tissue Value: Aerial
  misc_feature: MA Experiment 20000087 PARAMETER Experiment Name: At_100uM_ABA_Mutants_cDNA_P Parameter: Treatment Value: 100uM ABA vs. No Treatment
  misc_feature: MA Experiment ID: 20000088 Result: Up-regulated in Transcription
  misc_feature: MA Experiment 20000088 PARAMETER Experiment Name: At_100uM_ABA_Mutants_cDNA_P Parameter: Plant Line Value: Landsberg
  misc_feature: MA Experiment 20000088 PARAMETER Experiment Name: At_100uM_ABA_Mutants_cDNA_P Parameter: Timepoint (hr) Value: 6
  misc_feature: MA Experiment 20000088 PARAMETER Experiment Name: At_100uM_ABA_Mutants_cDNA_P Parameter: Tissue Value: Aerial
  misc_feature: MA Experiment 20000088 PARAMETER Experiment Name: At_100uM_ABA_Mutants_cDNA_P Parameter: Treatment Value: 100uM ABA vs. No Treatment
  misc_feature: MA Experiment ID: 20000113 Result: Down-regulated in Transcription
  misc_feature: MA Experiment 20000113 PARAMETER Experiment Name: At_42deg_Heat_cDNA_P Parameter: Temperature (deg C) Value: 42 vs. 22
  misc_feature: MA Experiment 20000113 PARAMETER Experiment Name: At_42deg_Heat_cDNA_P Parameter: Timepoint (hr) Value: 8
  misc_feature: MA Experiment 20000113 PARAMETER Experiment Name: At_42deg_Heat_cDNA_P Parameter: Tissue Value: Aerial
  misc_feature: MA Experiment ID: 20000117 Result: Up-regulated in Transcription
  misc_feature: MA Experiment 20000117 PARAMETER Experiment Name: At_100uM_ABA_Mutants_cDNA_P Parameter: Plant Line Value: Columbia
  misc_feature: MA Experiment 20000117 PARAMETER Experiment Name: At_100uM_ABA_Mutants_cDNA_P Parameter: Timepoint (hr) Value: 6
  misc_feature: MA Experiment 20000117 PARAMETER Experiment Name: At_100uM_ABA_Mutants_cDNA_P Parameter: Tissue Value: Aerial
  misc_feature: MA Experiment 20000117 PARAMETER Experiment Name: At_100uM_ABA_Mutants_cDNA_P Parameter: Treatment Value: 100uM ABA vs. No Treatment
  misc_feature: MA Experiment ID: 20000166 Result: Up-regulated in Transcription
  misc_feature: MA Experiment 20000166 PARAMETER Experiment Name: At_100uM_ABA_P Parameter: Age (day) Value: 14
  misc_feature: MA Experiment 20000166 PARAMETER Experiment Name: At_100uM_ABA_P Parameter: Organism Value: A. thaliana
  misc_feature: MA Experiment 20000166 PARAMETER Experiment Name: At_100uM_ABA_P Parameter: Plant Line Value: WS
  misc_feature: MA Experiment 20000166 PARAMETER Experiment Name: At_100uM_ABA_P Parameter: Timepoint (hr) Value: 1
  misc_feature: MA Experiment 20000166 PARAMETER Experiment Name: At_100uM_ABA_P Parameter: Tissue Value: Aerial
  misc_feature: MA Experiment 20000166 PARAMETER Experiment Name: At_100uM_ABA_P Parameter: Treatment Value: 100uM ABA vs. No Treatment
  misc_feature: MA Experiment ID: 20000224 Result: Down-regulated in Transcription
  misc_feature: MA Experiment ID: 20000227 Result: Down-regulated in Transcription
  misc_feature: MA Experiment 20000227 PARAMETER Experiment Name: At_Root-Tips-vs-Tops_P Parameter: Tissue Value: Root Tips vs. Root Tops
  misc_feature: MA Experiment ID: 20000234 Result: Down-regulated in Transcription
  misc_feature: MA Experiment 20000234 PARAMETER Experiment Name: At_Siliques_P Parameter: Age (day) Value: 21
  misc_feature: MA Experiment 20000234 PARAMETER Experiment Name: At_Siliques_P Parameter: Organism Value: A. thaliana
  misc_feature: MA Experiment 20000234 PARAMETER Experiment Name: At_Siliques_P Parameter: Plant Line Value: WS
  misc_feature: MA Experiment 20000234 PARAMETER Experiment Name: At_Siliques_P Parameter: Tissue Value: Less Than 5mm Siliques vs. Whole Plant
  misc_feature: MA Experiment ID: 20000235 Result: Down-regulated in Transcription
  misc_feature: MA Experiment 20000235 PARAMETER Experiment Name: At_Siliques_P Parameter: Age (day) Value: 21
  misc_feature: MA Experiment 20000235 PARAMETER Experiment Name: At_Siliques_P Parameter: Organism Value: A. thaliana
  misc_feature: MA Experiment 20000235 PARAMETER Experiment Name: At_Siliques_P Parameter: Plant Line Value: WS
  misc_feature: MA Experiment 20000235 PARAMETER Experiment Name: At_Siliques_P Parameter: Tissue Value: 5-10mm Siliques vs. Whole Plant
  misc_feature: MA Experiment ID: 20000264 Result: Down-regulated in Transcription
  misc_feature: MA Experiment 20000264 PARAMETER Experiment Name: At_Open_Flower_P Parameter: Age (day) Value: 21
  misc_feature: MA Experiment 20000264 PARAMETER Experiment Name: At_Open_Flower_P Parameter: Plant Line Value: WS
  misc_feature: MA Experiment 20000264 PARAMETER Experiment Name: At_Open_Flower_P Parameter: Tissue Value: Open Flower vs. Whole Plant
  misc_feature: MA Experiment ID: 20000265 Result: Down-regulated in Transcription
  misc_feature: MA Experiment 20000265 PARAMETER Experiment Name: At_Open_Flower_P Parameter: Age (day) Value: 21
  misc_feature: MA Experiment 20000265 PARAMETER Experiment Name: At_Open_Flower_P Parameter: Plant Line Value: WS
  misc_feature: MA Experiment 20000265 PARAMETER Experiment Name: At_Open_Flower_P Parameter: Tissue Value: Closed Flower vs. Whole Plant
  misc_feature: MA Experiment ID: 20000268 Result: Up-regulated in Transcription
  misc_feature: MA Experiment 20000268 PARAMETER Experiment Name: At_100mM_NaCl__P Parameter: Age (day) Value: 14
  misc_feature: MA Experiment 20000268 PARAMETER Experiment Name: At_100mM_NaCl__P Parameter: Organism Value: A. thaliana
  misc_feature: MA Experiment 20000268 PARAMETER Experiment Name: At_100mM_NaCl__P Parameter: Plant Line Value: WS
  misc_feature: MA Experiment 20000268 PARAMETER Experiment Name: At_100mM_NaCl__P Parameter: Timepoint (hr) Value: 6
  misc_feature: MA Experiment 20000268 PARAMETER Experiment Name: At_100mM_NaCl__P Parameter: Tissue Value: Whole Plant
  misc_feature: MA Experiment 20000268 PARAMETER Experiment Name: At_100mM_NaCl__P Parameter: Treatment Value: 100mM NaCl vs. No Treatment
  misc_feature: MA Experiment ID: 20000286 Result: Down-regulated in Transcription
  misc_feature: MA Experiment 20000286 PARAMETER Experiment Name: At_Open_Flower_P Parameter: Age (day) Value: 21
  misc_feature: MA Experiment 20000286 PARAMETER Experiment Name: At_Open_Flower_P Parameter: Plant Line Value: WS
  misc_feature: MA Experiment 20000286 PARAMETER Experiment Name: At_Open_Flower_P Parameter: Tissue Value: Half Open vs. Whole Plant
  misc_feature: MA Experiment ID: 20000436 Result: Up-regulated in Transcription
  misc_feature: MA Experiment 20000436 PARAMETER Experiment Name: At_Drought_P Parameter: Age (day) Value: 7
  misc_feature: MA Experiment 20000436 PARAMETER Experiment Name: At_Drought_P Parameter: Organism Value: A. thaliana
  misc_feature: MA Experiment 20000436 PARAMETER Experiment Name: At_Drought_P Parameter: Plant Line Value: WS
  misc_feature: MA Experiment 20000436 PARAMETER Experiment Name: At_Drought_P Parameter: Timepoint (hr) Value: 12
  misc_feature: MA Experiment 20000436 PARAMETER Experiment Name: At_Drought_P Parameter: Tissue Value: Whole Plant
  misc_feature: MA Experiment 20000436 PARAMETER Experiment Name: At_Drought_P Parameter: Treatment Value: Drought vs. No Drought
  misc_feature: MA Experiment ID: 20000437 Result: Up-regulated in Transcription
  misc_feature: MA Experiment 20000437 PARAMETER Experiment Name: At_Drought_P Parameter: Age (day) Value: 8
  misc_feature: MA Experiment 20000437 PARAMETER Experiment Name: At_Drought_P Parameter: Organism Value: A. thaliana
  misc_feature: MA Experiment 20000437 PARAMETER Experiment Name: At_Drought_P Parameter: Plant Line Value: WS
  misc_feature: MA Experiment 20000437 PARAMETER Experiment Name: At_Drought_P Parameter: Timepoint (hr) Value: 24
  misc_feature: MA Experiment 20000437 PARAMETER Experiment Name: At_Drought_P Parameter: Tissue Value: Whole Plant
  misc_feature: MA Experiment 20000437 PARAMETER Experiment Name: At_Drought_P Parameter: Treatment Value: Drought vs. No Drought
  misc_feature: MA Experiment ID: 20000439 Result: Down-regulated in Transcription
  misc_feature: MA Experiment 20000439 PARAMETER Experiment Name: At_Roots__P Parameter: Age (day) Value: 14 vs. 21
  misc_feature: MA Experiment 20000439 PARAMETER Experiment Name: At_Roots__P Parameter: Organism Value: A. thaliana
  misc_feature: MA Experiment 20000439 PARAMETER Experiment Name: At_Roots__P Parameter: Tissue Value: Roots vs. Whole Plant
  misc_feature: MA Experiment ID: 20000441 Result: Up-regulated in Transcription
  misc_feature: MA Experiment 20000441 PARAMETER Experiment Name: At_1uM_BR-BRZ__P Parameter: Tissue Value: Shoot Apices
  misc_feature: MA Experiment 20000441 PARAMETER Experiment Name: At_1uM_BR-BRZ__P Parameter: Treatment Value: 1uM BR vs. No Treatment
  misc_feature: MA Experiment ID: 20000453 Result: Up-regulated in Transcription
  misc_feature: MA Experiment 20000453 PARAMETER Experiment Name: At_100uM_ABA_P Parameter: Age (day) Value: 15
  misc_feature: MA Experiment 20000453 PARAMETER Experiment Name: At_100uM_ABA_P Parameter: Organism Value: A. thaliana
  misc_feature: MA Experiment 20000453 PARAMETER Experiment Name: At_100uM_ABA_P Parameter: Plant Line Value: WS
  misc_feature: MA Experiment 20000453 PARAMETER Experiment Name: At_100uM_ABA_P Parameter: Timepoint (hr) Value: 24
  misc_feature: MA Experiment 20000453 PARAMETER Experiment Name: At_100uM_ABA_P Parameter: Tissue Value: Aerial
  misc_feature: MA Experiment 20000453 PARAMETER Experiment Name: At_100uM_ABA_P Parameter: Treatment Value: 100uM ABA vs. No Treatment
  misc_feature: MA Experiment ID: 20000456 Result: Down-regulated in Transcription
  misc_feature: MA Experiment 20000456 PARAMETER Experiment Name: At_100uM_BA_P Parameter: Age (day) Value: 14
  misc_feature: MA Experiment 20000456 PARAMETER Experiment Name: At_100uM_BA_P Parameter: Organism Value: A. thaliana
  misc_feature: MA Experiment 20000456 PARAMETER Experiment Name: At_100uM_BA_P Parameter: Plant Line Value: WS
  misc_feature: MA Experiment 20000456 PARAMETER Experiment Name: At_100uM_BA_P Parameter: Timepoint (hr) Value: 6
  misc_feature: MA Experiment 20000456 PARAMETER Experiment Name: At_100uM_BA_P Parameter: Tissue Value: Aerial
  misc_feature: MA Experiment 20000456 PARAMETER Experiment Name: At_100uM_BA_P Parameter: Treatment Value: 100uM BA vs. No Treatment
  misc_feature: MA Experiment ID: 20000495 Result: Down-regulated in Transcription
  misc_feature: MA Experiment 20000495 PARAMETER Experiment Name: At_Guard_Cells_P Parameter: Harvest Date Value: 8/2/2002
  misc_feature: MA Experiment 20000495 PARAMETER Experiment Name: At_Guard_Cells_P Parameter: Organism Value: A. thaliana
  misc_feature: MA Experiment 20000495 PARAMETER Experiment Name: At_Guard_Cells_P Parameter: Tissue Value: Guard Cells vs. Leaves
  misc_feature: MA Experiment ID: 20000709 Result: Down-regulated in Transcription
  misc_feature: MA Experiment 20000709 PARAMETER Experiment Name: At_15mM_NH4NO3_L-to-H_P Parameter: Age (hr) Value: 14
  misc_feature: MA Experiment 20000709 PARAMETER Experiment Name: At_15mM_NH4NO3_L-to-H_P Parameter: Organism Value: A. thaliana
  misc_feature: MA Experiment 20000709 PARAMETER Experiment Name: At_15mM_NH4NO3_L-to-H_P Parameter: Plant Line Value: WS
  misc_feature: MA Experiment 20000709 PARAMETER Experiment Name: At_15mM_NH4NO3_L-to-H_P Parameter: Timepoint (hr) Value: 4
  misc_feature: MA Experiment 20000709 PARAMETER Experiment Name: At_15mM_NH4NO3_L-to-H_P Parameter: Tissue Value: Aerial
  misc_feature: MA Experiment 20000709 PARAMETER Experiment Name: At_15mM_NH4NO3_L-to-H_P Parameter: Treatment Value: 15mM NH4NO3 vs. 30mM Mannitol
  misc_feature: MA Experiment ID: 20000794 Result: Down-regulated in Transcription
  misc_feature: MA Experiment 20000794 PARAMETER Experiment Name: At_Petals_P Parameter: Age (day) Value: 23-25 days
  misc_feature: MA Experiment 20000794 PARAMETER Experiment Name: At_Petals_P Parameter: Plant Line Value: WS
  misc_feature: MA Experiment 20000794 PARAMETER Experiment Name: At_Petals_P Parameter: Tissue Value: Petals vs. Whole plant
  misc_feature: MA Experiment ID: 20001248 Result: Up-regulated in Transcription
  misc_feature: MA Experiment 20001248 PARAMETER Experiment Name: At_Far-red-induction_P Parameter: Age (day) Value: 7
  misc_feature: MA Experiment 20001248 PARAMETER Experiment Name: At_Far-red-induction_P Parameter: Light Value: Far-red vs. White
  misc_feature: MA Experiment 20001248 PARAMETER Experiment Name: At_Far-red-induction_P Parameter: Organism Value: A. thaliana
  misc_feature: MA Experiment 20001248 PARAMETER Experiment Name: At_Far-red-induction_P Parameter: Plant Line Value: Columbia
  misc_feature: MA Experiment 20001248 PARAMETER Experiment Name: At_Far-red-induction_P Parameter: Timepoint (hr) Value: 4
  misc_feature: MA Experiment 20001248 PARAMETER Experiment Name: At_Far-red-induction_P Parameter: Tissue Value: Whole Plant
  misc_feature: MA Experiment ID: 20001450 Result: Up-regulated in Transcription
  misc_feature: MA Experiment 20001450 PARAMETER Experiment Name: At_Far-red-induction_P Parameter: Age (day) Value: 7
  misc_feature: MA Experiment 20001450 PARAMETER Experiment Name: At_Far-red-induction_P Parameter: Light Value: Far-red vs. White
  misc_feature: MA Experiment 20001450 PARAMETER Experiment Name: At_Far-red-induction_P Parameter: Organism Value: A. thaliana
  misc_feature: MA Experiment 20001450 PARAMETER Experiment Name: At_Far-red-induction_P Parameter: Plant Line Value: Columbia
  misc_feature: MA Experiment 20001450 PARAMETER Experiment Name: At_Far-red-induction_P Parameter: Timepoint (hr) Value: 8
  misc_feature: MA Experiment 20001450 PARAMETER Experiment Name: At_Far-red-induction_P Parameter: Tissue Value: Whole Plant
  misc_feature: MA Experiment ID: 20001557 Result: Down-regulated in Transcription
  misc_feature: MA Experiment 20001557 PARAMETER Experiment Name: At_Drought_Soil_Dry_P Parameter: Age (day) Value: 27
  misc_feature: MA Experiment 20001557 PARAMETER Experiment Name: At_Drought_Soil_Dry_P Parameter: Organism Value: A. thaliana
  misc_feature: MA Experiment 20001557 PARAMETER Experiment Name: At_Drought_Soil_Dry_P Parameter: Plant Line Value: WS
  misc_feature: MA Experiment 20001557 PARAMETER Experiment Name: At_Drought_Soil_Dry_P Parameter: Post Timepoint (hr) Value: 3
  misc_feature: MA Experiment 20001557 PARAMETER Experiment Name: At_Drought_Soil_Dry_P Parameter: Post-Treatment Value: Re-Water vs. No Drought
  misc_feature: MA Experiment 20001557 PARAMETER Experiment Name: At_Drought_Soil_Dry_P Parameter: Timepoint (day) Value: 13
  misc_feature: MA Experiment 20001557 PARAMETER Experiment Name: At_Drought_Soil_Dry_P Parameter: Treatment Value: Drought vs. No Drought
  misc_feature: MA Experiment ID: 20001558 Result: Down-regulated in Transcription
  misc_feature: MA Experiment 20001558 PARAMETER Experiment Name: At_Drought_Soil_Dry_P Parameter: Age (day) Value: 27
  misc_feature: MA Experiment 20001558 PARAMETER Experiment Name: At_Drought_Soil_Dry_P Parameter: Organism Value: A. thaliana
  misc_feature: MA Experiment 20001558 PARAMETER Experiment Name: At_Drought_Soil_Dry_P Parameter: Plant Line Value: WS
  misc_feature: MA Experiment 20001558 PARAMETER Experiment Name: At_Drought_Soil_Dry_P Parameter: Post Timepoint (hr) Value: 6
  misc_feature: MA Experiment 20001558 PARAMETER Experiment Name: At_Drought_Soil_Dry_P Parameter: Post-Treatment Value: Re-Water vs. No Drought
  misc_feature: MA Experiment 20001558 PARAMETER Experiment Name: At_Drought_Soil_Dry_P Parameter: Timepoint (day) Value: 13
  misc_feature: MA Experiment 20001558 PARAMETER Experiment Name: At_Drought_Soil_Dry_P Parameter: Treatment Value: Drought vs. No Drought
  misc_feature: MA Experiment ID: 20001560 Result: Down-regulated in Transcription
  misc_feature: MA Experiment 20001560 PARAMETER Experiment Name: At_Drought_Soil_Dry_P Parameter: Age (day) Value: 28
  misc_feature: MA Experiment 20001560 PARAMETER Experiment Name: At_Drought_Soil_Dry_P Parameter: Organism Value: A. thaliana
  misc_feature: MA Experiment 20001560 PARAMETER Experiment Name: At_Drought_Soil_Dry_P Parameter: Plant Line Value: WS
  misc_feature: MA Experiment 20001560 PARAMETER Experiment Name: At_Drought_Soil_Dry_P Parameter: Post Timepoint (hr) Value: None
  misc_feature: MA Experiment 20001560 PARAMETER Experiment Name: At_Drought_Soil_Dry_P Parameter: Post-Treatment Value: None
  misc_feature: MA Experiment 20001560 PARAMETER Experiment Name: At_Drought_Soil_Dry_P Parameter: Timepoint (day) Value: 14
  misc_feature: MA Experiment 20001560 PARAMETER Experiment Name: At_Drought_Soil_Dry_P Parameter: Treatment Value: Drought vs. No Drought
  misc_feature: MA Experiment ID: 20001906 Result: Up-regulated in Transcription
  misc_feature: MA Experiment 20001906 PARAMETER Experiment Name: At_Drought_Reproduction_P Parameter: Age (day) Value: 35
  misc_feature: MA Experiment 20001906 PARAMETER Experiment Name: At_Drought_Reproduction_P Parameter: Organism Value: A. thaliana
  misc_feature: MA Experiment 20001906 PARAMETER Experiment Name: At_Drought_Reproduction_P Parameter: Plant Line Value: WS
  misc_feature: MA Experiment 20001906 PARAMETER Experiment Name: At_Drought_Reproduction_P Parameter: Timepoint (day) Value: 5
  misc_feature: MA Experiment 20001906 PARAMETER Experiment Name: At_Drought_Reproduction_P Parameter: Tissue Value: Siliques
  misc_feature: MA Experiment 20001906 PARAMETER Experiment Name: At_Drought_Reproduction_P Parameter: Treatment Value: Drought vs. No Drought
  misc_feature: MA Experiment ID: 20001908 Result: Up-regulated in Transcription
  misc_feature: MA Experiment 20001908 PARAMETER Experiment Name: At_Drought_Reproduction_P Parameter: Age (day) Value: 40
  misc_feature: MA Experiment 20001908 PARAMETER Experiment Name: At_Drought_Reproduction_P Parameter: Organism Value: A. thaliana
  misc_feature: MA Experiment 20001908 PARAMETER Experiment Name: At_Drought_Reproduction_P Parameter: Plant Line Value: WS
  misc_feature: MA Experiment 20001908 PARAMETER Experiment Name: At_Drought_Reproduction_P Parameter: Timepoint (day) Value: 10
  misc_feature: MA Experiment 20001908 PARAMETER Experiment Name: At_Drought_Reproduction_P Parameter: Tissue Value: Siliques
  misc_feature: MA Experiment 20001908 PARAMETER Experiment Name: At_Drought_Reproduction_P Parameter: Treatment Value: Drought vs. No Drought
  misc_feature: MA Experiment ID: 20001911 Result: Up-regulated in Transcription
  misc_feature: MA Experiment 20001911 PARAMETER Experiment Name: At_Drought_Reproduction_P Parameter: Age (day) Value: 40
  misc_feature: MA Experiment 20001911 PARAMETER Experiment Name: At_Drought_Reproduction_P Parameter: Organism Value: A. thaliana
  misc_feature: MA Experiment 20001911 PARAMETER Experiment Name: At_Drought_Reproduction_P Parameter: Plant Line Value: WS
  misc_feature: MA Experiment 20001911 PARAMETER Experiment Name: At_Drought_Reproduction_P Parameter: Timepoint (day) Value: 10
  misc_feature: MA Experiment 20001911 PARAMETER Experiment Name: At_Drought_Reproduction_P Parameter: Tissue Value: Flowers
  misc_feature: MA Experiment 20001911 PARAMETER Experiment Name: At_Drought_Reproduction_P Parameter: Treatment Value: Drought vs. No Drought
aacacaaacaaaaaaaaagaactctttcgtcgactaatgtgatttattgttcaccggagtattaaagaagatgatgatcggagaaactcgcaggacttatcccactgttgaaatacctccatggccggtacttgaagagcttacaacgtcggagtttttttctccggtgatgaatagtccagattgtagcatgcttgaagctttggcggggttgcagcgttatttgccgtctaacgaaccggatccggagtcatacccggatctattgggtccggattcaccaatcgatgcttactcatgcgaccatttccgtatgtacgatttcaaagtcaggaggtgtgctcgtggccggagtcatgattggacggagtgtccgtacgctcatcccggagaaaaagctcgccggagagatccgaggaagtaccattactctggtacggcttgtcctgattttcgtaaaggtggctgcaagaaaggtgactcttgtgagtttgctcatggtgttttcgagtgttggcttcatccagctcgttaccgtactcagccgtgtaaagacggtggtaactgtctccggaaaatttgtttctttgctcattcaccggatcagcttaggtttttacatactcggagccctgacagagttgattcttttgacgtttcgtctccgattcgtgctagagcatttcagctgtcgatttctccggtttctggttcgccaccgatgagtccaagagctgactcggagtcttctccgatgactcagtcactgagtcgatctctcgggtcttgttcgataaacgacgtcgttccttcgtttaggaatttacagtttaattcggtaaaatcatttcctcgtaacaatcctttattcggattcgggtcgccccgtggatcgatcttgggtcctgggtttcagtctctgcctacaacaccgacccgaccagggaatctggatatttgggagtatggtttggaggaagaacccgtaatggagcgtgtcgttgagtcgggtcgtgagctacgagaaaagatgcgcgagaaactgcacaaggagaattgcatggatcgagttgcccaggatccggatcagaatttgggtgaggctcctgatgtcgggtgggtatctgacctgctcatgtaaagaaaaaaatctgaccgtatttcgaagtctcattggcttttttggatatcttccaaggaaaagaggaagggatcttagtgtgttcatattattttatttactaatctcgtattttatctgctaataagaattaattatggattttggggcctgatttttctaagatgatcgttgtatagatgtgccttagggttttaattatgaaatagtattaatataatcgtgttttataagactataatgttagattgtaaccacttggtactaatctatgaatgaatgcaaattattatct

SEQ ID NO: 30057 - protein, 356 aa, Arabidopsis thaliana
  peptide (1)..(356): Ceres Seq. ID no. 12333641
  misc_feature (120)..(145): Pfam Name: Zinc finger C-x8-C-x5-C-x3-H type (and similar) Pfam Description: Zinc finger C-x8-C-x5-C-x3-H type (and similar)
  misc_feature (36)..(236): Homolog of NCBI NO: 28273376 NR Description: unknown protein [Oryza sativa (japonica
  misc_feature (52)..(222): Homolog of NCBI NO: 25408764 NR Description: probable CCCH-type zinc finger protein
  misc_feature (52)..(222): Homolog of NCBI NO: 18405834 NR Description: putative CCCH-type zinc finger protein
  misc_feature (11)..(230): Homolog of NCBI NO: 26449538 NR Description: unknown protein [Arabidopsis thaliana]
  misc_feature (11)..(230): Homolog of NCBI NO: 15219557 NR Description: hypothetical protein; protein id: At1g03790.1
  misc_feature (1)..(230): Homolog of NCBI NO: 34906436 NR Description: putative zinc finger transcription factor
  misc_feature (1)..(256): Homolog of NCBI NO: 21593538 NR Description: putative CCCH-type zinc finger protein
  misc_feature (1)..(256): Homolog of NCBI NO: 15225213 NR Description: putative CCCH-type zinc finger protein
  misc_feature (1)..(356): Homolog of NCBI NO: 15224852 NR Description: putative CCCH-type zinc finger protein
  misc_feature (1)..(356): Homolog of NCBI NO: 15233491 NR Description: putative protein
MMIGETRRTYPTVEIPPWPVLEELTTSEFFSPVMNSPDCSMLEALAGLQRYLPSNEPDPESYPDLLGPDSPIDAYSCDHFRMYDFKVRRCARGRSHDWTECPYAHPGEKARRRDPRKYHYSGTACPDFRKGGCKKGDSCEFAHGVFECWLHPARYRTQPCKDGGNCLRKICFFAHSPDQLRFLHTRSPDRVDSFDVSSPIRARAFQLSISPVSGSPPMSPRADSESSPMTQSLSRSLGSCSINDVVPSFRNLQFNSVKSFPRNNPLFGFGSPRGSILGPGFQSLPTTPTRPGNLDIWEYGLEEEPVMERVVESGRELREKMREKLHKENCMDRVAQDPDQNLGEAPDVGWVSDLLM

SEQ ID NO: 30058 - protein, 355 aa, Arabidopsis thaliana
  peptide (1)..(355): Ceres Seq. ID no. 12333642
  misc_feature (119)..(144): Pfam Name: Zinc finger C-x8-C-x5-C-x3-H type (and similar) Pfam Description: Zinc finger C-x8-C-x5-C-x3-H type (and similar)
  misc_feature (35)..(235): Homolog of NCBI NO: 28273376 NR Description: unknown protein [Oryza sativa (japonica
  misc_feature (51)..(221): Homolog of NCBI NO: 25408764 NR Description: probable CCCH-type zinc finger protein
  misc_feature (51)..(221): Homolog of NCBI NO: 18405834 NR Description: putative CCCH-type zinc finger protein
  misc_feature (10)..(229): Homolog of NCBI NO: 26449538 NR Description: unknown protein [Arabidopsis thaliana]
  misc_feature (10)..(229): Homolog of NCBI NO: 15219557 NR Description: hypothetical protein; protein id: At1g03790.1
  misc_feature (1)..(229): Homolog of NCBI NO: 34906436 NR Description: putative zinc finger transcription factor
  misc_feature (1)..(255): Homolog of NCBI NO: 21593538 NR Description: putative CCCH-type zinc finger protein
  misc_feature (1)..(255): Homolog of NCBI NO: 15225213 NR Description: putative CCCH-type zinc finger protein
  misc_feature (1)..(355): Homolog of NCBI NO: 15224852 NR Description: putative CCCH-type zinc finger protein
  misc_feature (1)..(355): Homolog of NCBI NO: 15233491 NR Description: putative protein
MIGETRRTYPTVEIPPWPVLEELTTSEFFSPVMNSPDCSMLEALAGLQRYLPSNEPDPESYPDLLGPDSPIDAYSCDHFRMYDFKVRRCARGRSHDWTECPYAHPGEKARRRDPRKYHYSGTACPDFRKGGCKKGDSCEFAHGVFECWLHPARYRTQPCKDGGNCLRKICFFAHSPDQLRFLHTRSPDRVDSFDVSSPIRARAFQLSISPVSGSPPMSPRADSESSPMTQSLSRSLGSCSINDVVPSFRNLQFNSVKSFPRNNPLFGFGSPRGSILGPGFQSLPTTPTRPGNLDIWEYGLEEEPVMERVVESGRELREKMREKLHKENCMDRVAQDPDQNLGEAPDVGWVSDLLM

SEQ ID NO: 30059 - protein, 323 aa, Arabidopsis thaliana
  peptide (1)..(323): Ceres Seq. ID no. 12333643
  misc_feature (87)..(112): Pfam Name: Zinc finger C-x8-C-x5-C-x3-H type (and similar) Pfam Description: Zinc finger C-x8-C-x5-C-x3-H type (and similar)
  misc_feature (3)..(203): Homolog of NCBI NO: 28273376 NR Description: unknown protein [Oryza sativa (japonica
  misc_feature (19)..(189): Homolog of NCBI NO: 25408764 NR Description: probable CCCH-type zinc finger protein
  misc_feature (19)..(189): Homolog of NCBI NO: 18405834 NR Description: putative CCCH-type zinc finger protein
  misc_feature (1)..(197): Homolog of NCBI NO: 26449538 NR Description: unknown protein [Arabidopsis thaliana]
  misc_feature (1)..(197): Homolog of NCBI NO: 15219557 NR Description: hypothetical protein; protein id: At1g03790.1
  misc_feature (1)..(197): Homolog of NCBI NO: 34906436 NR Description: putative zinc finger transcription factor
  misc_feature (1)..(223): Homolog of NCBI NO: 21593538 NR Description: putative CCCH-type zinc finger protein
  misc_feature (1)..(223): Homolog of NCBI NO: 15225213 NR Description: putative CCCH-type zinc finger protein
  misc_feature (1)..(323): Homolog of NCBI NO: 15224852 NR Description: putative CCCH-type zinc finger protein
  misc_feature (1)..(323): Homolog of NCBI NO: 15233491 NR Description: putative protein
MNSPDCSMLEALAGLQRYLPSNEPDPESYPDLLGPDSPIDAYSCDHFRMYDFKVRRCARGRSHDWTECPYAHPGEKARRRDPRKYHYSGTACPDFRKGGCKKGDSCEFAHGVFECWLHPARYRTQPCKDGGNCLRKICFFAHSPDQLRFLHTRSPDRVDSFDVSSPIRARAFQLSISPVSGSPPMSPRADSESSPMTQSLSRSLGSCSINDVVPSFRNLQFNSVKSFPRNNPLFGFGSPRGSILGPGFQSLPTTPTRPGNLDIWEYGLEEEPVMERVVESGRELREKMREKLHKENCMDRVAQDPDQNLGEAPDVGWVSDLLM

SEQ ID NO: 30060 - DNA, 1349 bp, Arabidopsis thaliana
  misc_feature (1)..(1349): Ceres Seq. ID no. 12334159
  misc_feature: MA Experiment ID: 108434 Result: Down-regulated in Transcription
  misc_feature: MA Experiment 108434 PARAMETER Experiment Name: At_Root_Tips_cDNA_P Parameter: Tissue Value: Root Tips
  misc_feature: MA Experiment ID: 108573 Result: Up-regulated in Transcription
  misc_feature: MA Experiment 108573 PARAMETER Experiment Name: At_Drought_cDNA_P Parameter: Timepoint (hr) Value: 6
  misc_feature: MA Experiment 108573 PARAMETER Experiment Name: At_Drought_cDNA_P Parameter: Tissue Value: Aerial
  misc_feature: MA Experiment 108573 PARAMETER Experiment Name: At_Drought_cDNA_P Parameter: Treatment Value: Drought vs. No Drought
  misc_feature: MA Experiment ID: 108585 Result: Up-regulated in Transcription
  misc_feature: MA Experiment 108585 PARAMETER Experiment Name: At_5mM_NaNP_cDNA_P Parameter: Timepoint (hr) Value: 6
  misc_feature: MA Experiment 108585 PARAMETER Experiment Name: At_5mM_NaNP_cDNA_P Parameter: Tissue Value: Aerial
  misc_feature: MA Experiment 108585 PARAMETER Experiment Name: At_5mM_NaNP_cDNA_P Parameter: Treatment Value: null
  misc_feature: MA Experiment ID: 20000069 Result: Up-regulated in Transcription
  misc_feature: MA Experiment 20000069 PARAMETER Experiment Name: At_100uM_ABA_Mutants_cDNA_P Parameter: Plant Line Value: CS23
  misc_feature: MA Experiment 20000069 PARAMETER Experiment Name: At_100uM_ABA_Mutants_cDNA_P Parameter: Timepoint (hr) Value: 6
  misc_feature: MA Experiment 20000069 PARAMETER Experiment Name: At_100uM_ABA_Mutants_cDNA_P Parameter: Tissue Value: Aerial
  misc_feature: MA Experiment 20000069 PARAMETER Experiment Name: At_100uM_ABA_Mutants_cDNA_P Parameter: Treatment Value: 100uM ABA vs. No Treatment
  misc_feature: MA Experiment ID: 20000180 Result: Up-regulated in Transcription
  misc_feature: MA Experiment 20000180 PARAMETER Experiment Name: At_Germinating_Seeds_P Parameter: Age (hr) Value: 24 vs. 0
  misc_feature: MA Experiment 20000180 PARAMETER Experiment Name: At_Germinating_Seeds_P Parameter: Tissue Value: Germinating Seeds
  misc_feature: MA Experiment ID: 20000234 Result: Down-regulated in Transcription
  misc_feature: MA Experiment 20000234 PARAMETER Experiment Name: At_Siliques_P Parameter: Age (day) Value: 21
  misc_feature: MA Experiment 20000234 PARAMETER Experiment Name: At_Siliques_P Parameter: Organism Value: A. thaliana
  misc_feature: MA Experiment 20000234 PARAMETER Experiment Name: At_Siliques_P Parameter: Plant Line Value: WS
  misc_feature: MA Experiment 20000234 PARAMETER Experiment Name: At_Siliques_P Parameter: Tissue Value: Less Than 5mm Siliques vs. Whole Plant
  misc_feature: MA Experiment ID: 20000438 Result: Down-regulated in Transcription
  misc_feature: MA Experiment 20000438 PARAMETER Experiment Name: At_Shoots__P Parameter: Age (day) Value: 14
  misc_feature: MA Experiment 20000438 PARAMETER Experiment Name: At_Shoots__P Parameter: Tissue Value: Shoots vs. Whole Plant
  misc_feature: MA Experiment ID: 20000527 Result: Down-regulated in Transcription
  misc_feature: MA Experiment 20000527 PARAMETER Experiment Name: At_10percent_PEG_P Parameter: Age (day) Value: 20
  misc_feature: MA Experiment 20000527 PARAMETER Experiment Name: At_10percent_PEG_P Parameter: Organism Value: A. thaliana
  misc_feature: MA Experiment 20000527 PARAMETER Experiment Name: At_10percent_PEG_P Parameter: Plant Line Value: WS
  misc_feature: MA Experiment 20000527 PARAMETER Experiment Name: At_10percent_PEG_P Parameter: Timepoint (day) Value: 20
  misc_feature: MA Experiment 20000527 PARAMETER Experiment Name: At_10percent_PEG_P Parameter: Tissue Value: Whole Plant
  misc_feature: MA Experiment 20000527 PARAMETER Experiment Name: At_10percent_PEG_P Parameter: Treatment Value: 10percent PEG vs. No Treatment
  misc_feature: MA Experiment ID: 20001247 Result: Up-regulated in Transcription
  misc_feature: MA Experiment 20001247 PARAMETER Experiment Name: At_Far-red-induction_P Parameter: Age (day) Value: 7
  misc_feature: MA Experiment 20001247 PARAMETER Experiment Name: At_Far-red-induction_P Parameter: Light Value: Far-red vs. White
  misc_feature: MA Experiment 20001247 PARAMETER Experiment Name: At_Far-red-induction_P Parameter: Organism Value: A. thaliana
  misc_feature: MA Experiment 20001247 PARAMETER Experiment Name: At_Far-red-induction_P Parameter: Plant Line Value: Columbia
  misc_feature: MA Experiment 20001247 PARAMETER Experiment Name: At_Far-red-induction_P Parameter: Timepoint (hr) Value: 1
  misc_feature: MA Experiment 20001247 PARAMETER Experiment Name: At_Far-red-induction_P Parameter: Tissue Value: Whole Plant
  misc_feature: MA Experiment ID: 20001905 Result: Up-regulated in Transcription
  misc_feature: MA Experiment 20001905 PARAMETER Experiment Name: At_Drought_Reproduction_P Parameter: Age (day) Value: 40
  misc_feature: MA Experiment 20001905 PARAMETER Experiment Name: At_Drought_Reproduction_P Parameter: Organism Value: A. thaliana
  misc_feature: MA Experiment 20001905 PARAMETER Experiment Name: At_Drought_Reproduction_P Parameter: Plant Line Value: WS
  misc_feature: MA Experiment 20001905 PARAMETER Experiment Name: At_Drought_Reproduction_P Parameter: Timepoint (day) Value: 10
  misc_feature: MA Experiment 20001905 PARAMETER Experiment Name: At_Drought_Reproduction_P Parameter: Tissue Value: Rosettes
  misc_feature: MA Experiment 20001905 PARAMETER Experiment Name: At_Drought_Reproduction_P Parameter: Treatment Value: Drought vs. No Drought
atctatcttctccacgttactaccacctaacctctcatccaccttttctcctttaagcatatttcatttcatctccgaaaggaattgtatcgttcctcacacacgcctctcatctcttatccattcttgtccttttttcagctcaacaagaatggataattgtactggagaaaatcccatggcttctcagttgaacattctccgatgcccgttcttgaggaacatcaatgagcccactaacctctctttctcttcatccttgccttttcccatccctgcaagagctgggaaaggacctatatttgaagatggtcccaattttgatacggcgtttaggcttttccatggccaagatggagttgtccctctctctgacaccgctcgaactgaagcccagaagcctgtgcctgtattccatccacttgctgctaaggcggccactattagtctctcatcctttggatctggagggccttttggatttgatgcattttctgacatgtttaaaaatcaaaagaagaagtcagattcatccaaaaataagggaggaaaccacgaagccatgggcgacgaatggcttaaaacaggaaactgcccaatagcaaaatcatatcgagctgtaagtggtgtggcaccacttgtggcaaagatcctgcaaccccctccaggcatgaaatttaaatgccctcaagcaatagtcacagctcgagcagcgatatcaaaaacacctttcgccaagaacctccgtccacaacctttaccagctaaagtactagtgatcgggatgctgggcatggcgttaaatgtgcctttaggggtctggagagagcacactgaaaagttttcggcatcttggtttatagctcttcacgcagcggttccattcataggaatactgagaaagtcagtgttgatgcctaaaacagctatggtattcaccatagcagcatcagttttgggacaggtgattgggtcaagagcagagaggcggagactcaagtctgtagctgagaagaagttgacattggaggtaccaaatccgtcttctgttgaagcagatcagatgcaatttgccggagtttcatcagatggaagatgcggtgataaagtggtgatgaagtggaatcccatgatgcttgatgttgcaagccctgtgtcttccggagcagctactgttgtctgctaaaaggattttgtaattctcttggaggatttatatatataattgtttttcttgtattttttcggctgattgtatttaaaaagtttcttaatgtttgagaaaaacaagaataaagccattttttaaactgttaattgtattttaatgtaaaagacttgtttgatcg

SEQ ID NO: 30061 - protein, 394 aa, Arabidopsis thaliana
  peptide (1)..(394): Ceres Seq. ID no. 12334160
  misc_feature (133)..(390): Homolog of NCBI NO: 33146734 NR Description: unknown protein [Oryza sativa (japonica
  misc_feature (65)..(174): Homolog of NCBI NO: 34897958 NR Description: contains ESTs AU068434(C30250)~similar to Oryza sativa chromosome 7,
  misc_feature (175)..(390): Homolog of NCBI NO: 34897958 NR Description: contains ESTs AU068434(C30250)~similar to Oryza sativa chromosome 7,
  misc_feature (44)..(393): Homolog of NCBI NO: 37537220 NR Description: unknown protein [Oryza sativa (japonica
  misc_feature (66)..(367): Homolog of NCBI NO: 21954084 NR Description: unknown protein [Arabidopsis thaliana]
  misc_feature (57)..(367): Homolog of NCBI NO: 30694759 NR Description: expressed protein [Arabidopsis thaliana]
  misc_feature (57)..(367): Homolog of NCBI NO: 21595083 NR Description: unknown [Arabidopsis thaliana]
  misc_feature (51)..(394): Homolog of NCBI NO: 15234866 NR Description: putative protein
SIFSTLLPPNLSSTFSPLSIFHFISERNCIVPHTRLSSLIHSCPFFSSTRMDNCTGENPMASQLNILRCPFLRNINEPTNLSFSSSLPFPIPARAGKGPIFEDGPNFDTAFRLFHGQDGVVPLSDTARTEAQKPVPVFHPLAAKAATISLSSFGSGGPFGFDAFSDMFKNQKKKSDSSKNKGGNHEAMGDEWLKTGNCPIAKSYRAVSGVAPLVAKILQPPPGMKFKCPQAIVTARAAISKTPFAKNLRPQPLPAKVLVIGMLGMALNVPLGVWREHTEKFSASWFIALHAAVPFIGILRKSVLMPKTAMVFTIAASVLGQVIGSRAERRRLKSVAEKKLTLEVPNPSSVEADQMQFAGVSSDGRCGDKVVMKWNPMMLDVASPVSSGAATVVC

SEQ ID NO: 30062 - protein, 344 aa, Arabidopsis thaliana
  peptide (1)..(344): Ceres Seq. ID no. 12334161
  misc_feature (83)..(340): Homolog of NCBI NO: 33146734 NR Description: unknown protein [Oryza sativa (japonica
  misc_feature (15)..(124): Homolog of NCBI NO: 34897958 NR Description: contains ESTs AU068434(C30250)~similar to Oryza sativa chromosome 7,
  misc_feature (125)..(340): Homolog of NCBI NO: 34897958 NR Description: contains ESTs AU068434(C30250)~similar to Oryza sativa chromosome 7,
  misc_feature (1)..(343): Homolog of NCBI NO: 37537220 NR Description: unknown protein [Oryza sativa (japonica
  misc_feature (16)..(317): Homolog of NCBI NO: 21954084 NR Description: unknown protein [Arabidopsis thaliana]
  misc_feature (7)..(317): Homolog of NCBI NO: 30694759 NR Description: expressed protein [Arabidopsis thaliana]
  misc_feature (7)..(317): Homolog of NCBI NO: 21595083 NR Description: unknown [Arabidopsis thaliana]
  misc_feature (1)..(344): Homolog of NCBI NO: 15234866 NR Description: putative protein
MDNCTGENPMASQLNILRCPFLRNINEPTNLSFSSSLPFPIPARAGKGPIFEDGPNFDTAFRLFHGQDGVVPLSDTARTEAQKPVPVFHPLAAKAATISLSSFGSGGPFGFDAFSDMFKNQKKKSDSSKNKGGNHEAMGDEWLKTGNCPIAKSYRAVSGVAPLVAKILQPPPGMKFKCPQAIVTARAAISKTPFAKNLRPQPLPAKVLVIGMLGMALNVPLGVWREHTEKFSASWFIALHAAVPFIGILRKSVLMPKTAMVFTIAASVLGQVIGSRAERRRLKSVAEKKLTLEVPNPSSVEADQMQFAGVSSDGRCGDKVVMKWNPMMLDVASPVSSGAATVVC

SEQ ID NO: 30063 - protein, 335 aa, Arabidopsis thaliana
  peptide (1)..(335): Ceres Seq. ID no. 12334162
  misc_feature (74)..(331): Homolog of NCBI NO: 33146734 NR Description: unknown protein [Oryza sativa (japonica
  misc_feature (6)..(115): Homolog of NCBI NO: 34897958 NR Description: contains ESTs AU068434(C30250)~similar to Oryza sativa chromosome 7,
  misc_feature (116)..(331): Homolog of NCBI NO: 34897958 NR Description: contains ESTs AU068434(C30250)~similar to Oryza sativa chromosome 7,
  misc_feature (1)..(334): Homolog of NCBI NO: 37537220 NR Description: unknown protein [Oryza sativa (japonica
  misc_feature (7)..(308): Homolog of NCBI NO: 21954084 NR Description: unknown protein [Arabidopsis thaliana]
  misc_feature (1)..(308): Homolog of NCBI NO: 30694759 NR Description: expressed protein [Arabidopsis thaliana]
  misc_feature (1)..(308): Homolog of NCBI NO: 21595083 NR Description: unknown [Arabidopsis thaliana]
  misc_feature (1)..(335): Homolog of NCBI NO: 15234866 NR Description: putative protein
MASQLNILRCPFLRNINEPTNLSFSSSLPFPIPARAGKGPIFEDGPNFDTAFRLFHGQDGVVPLSDTARTEAQKPVPVFHPLAAKAATISLSSFGSGGPFGFDAFSDMFKNQKKKSDSSKNKGGNHEAMGDEWLKTGNCPIAKSYRAVSGVAPLVAKILQPPPGMKFKCPQAIVTARAAISKTPFAKNLRPQPLPAKVLVIGMLGMALNVPLGVWREHTEKFSASWFIALHAAVPFIGILRKSVLMPKTAMVFTIAASVLGQVIGSRAERRRLKSVAEKKLTLEVPNPSSVEADQMQFAGVSSDGRCGDKVVMKWNPMMLDVASPVSSGAATVVC

SEQ ID NO: 30064 - DNA, 1665 bp, Arabidopsis thaliana
  misc_feature (1)..(1665): Ceres Seq. ID no. 13489296
  misc_feature: MA Experiment ID: 108572 Result: Up-regulated in Transcription
  misc_feature: MA Experiment 108572 PARAMETER Experiment Name: At_Drought_cDNA_P Parameter: Timepoint (hr) Value: 1
  misc_feature: MA Experiment 108572 PARAMETER Experiment Name: At_Drought_cDNA_P Parameter: Tissue Value: Aerial
  misc_feature: MA Experiment 108572 PARAMETER Experiment Name: At_Drought_cDNA_P Parameter: Treatment Value: Drought vs. No Drought
  misc_feature: MA Experiment ID: 108573 Result: Up-regulated in Transcription
  misc_feature: MA Experiment 108573 PARAMETER Experiment Name: At_Drought_cDNA_P Parameter: Timepoint (hr) Value: 6
  misc_feature: MA Experiment 108573 PARAMETER Experiment Name: At_Drought_cDNA_P Parameter: Tissue Value: Aerial
  misc_feature: MA Experiment 108573 PARAMETER Experiment Name: At_Drought_cDNA_P Parameter: Treatment Value: Drought vs. No Drought
  misc_feature: MA Experiment ID: 108585 Result: Up-regulated in Transcription
  misc_feature: MA Experiment 108585 PARAMETER Experiment Name: At_5mM_NaNP_cDNA_P Parameter: Timepoint (hr) Value: 6
  misc_feature: MA Experiment 108585 PARAMETER Experiment Name: At_5mM_NaNP_cDNA_P Parameter: Tissue Value: Aerial
  misc_feature: MA Experiment 108585 PARAMETER Experiment Name: At_5mM_NaNP_cDNA_P Parameter: Treatment Value: null
  misc_feature: MA Experiment ID: 108595 Result: Up-regulated in Transcription
  misc_feature: MA Experiment 108595 PARAMETER Experiment Name: At_Ler-pi_Ovule_cDNA_P Parameter: Plant Line Value: null
  misc_feature: MA Experiment ID: 20000111 Result: Up-regulated in Transcription
  misc_feature: MA Experiment 20000111 PARAMETER Experiment Name: At_42deg_Heat_cDNA_P Parameter: Temperature (deg C) Value: 42 vs. 22
  misc_feature: MA Experiment 20000111 PARAMETER Experiment Name: At_42deg_Heat_cDNA_P Parameter: Timepoint (hr) Value: 6
  misc_feature: MA Experiment 20000111 PARAMETER Experiment Name: At_42deg_Heat_cDNA_P Parameter: Tissue Value: Aerial
  misc_feature: MA Experiment ID: 20000234 Result: Up-regulated in Transcription
  misc_feature: MA Experiment 20000234 PARAMETER Experiment Name: At_Siliques_P Parameter: Age (day) Value: 21
  misc_feature: MA Experiment 20000234 PARAMETER Experiment Name: At_Siliques_P Parameter: Organism Value: A. thaliana
  misc_feature: MA Experiment 20000234 PARAMETER Experiment Name: At_Siliques_P Parameter: Plant Line Value: WS
  misc_feature: MA Experiment 20000234 PARAMETER Experiment Name: At_Siliques_P Parameter: Tissue Value: Less Than 5mm Siliques vs. Whole Plant
  misc_feature: MA Experiment ID: 20000235 Result: Up-regulated in Transcription
  misc_feature: MA Experiment 20000235 PARAMETER Experiment Name: At_Siliques_P Parameter: Age (day) Value: 21
  misc_feature: MA Experiment 20000235 PARAMETER Experiment Name: At_Siliques_P Parameter: Organism Value: A. thaliana
  misc_feature: MA Experiment 20000235 PARAMETER Experiment Name: At_Siliques_P Parameter: Plant Line Value: WS
  misc_feature: MA Experiment 20000235 PARAMETER Experiment Name: At_Siliques_P Parameter: Tissue Value: 5-10mm Siliques vs. Whole Plant
  misc_feature: MA Experiment ID: 20000264 Result: Up-regulated in Transcription
  misc_feature: MA Experiment 20000264 PARAMETER Experiment Name: At_Open_Flower_P Parameter: Age (day) Value: 21
  misc_feature: MA Experiment 20000264 PARAMETER Experiment Name: At_Open_Flower_P Parameter: Plant Line Value: WS
  misc_feature: MA Experiment 20000264 PARAMETER Experiment Name: At_Open_Flower_P Parameter: Tissue Value: Open Flower vs. Whole Plant
  misc_feature: MA Experiment ID: 20000267 Result: Up-regulated in Transcription
  misc_feature: MA Experiment 20000267 PARAMETER Experiment Name: At_Drought_P Parameter: Age (day) Value: 7
  misc_feature: MA Experiment 20000267 PARAMETER Experiment Name: At_Drought_P Parameter: Organism Value: A. thaliana
  misc_feature: MA Experiment 20000267 PARAMETER Experiment Name: At_Drought_P Parameter: Plant Line Value: WS
  misc_feature: MA Experiment 20000267 PARAMETER Experiment Name: At_Drought_P Parameter: Timepoint (hr) Value: 6
  misc_feature: MA Experiment 20000267 PARAMETER Experiment Name: At_Drought_P Parameter: Tissue Value: Whole Plant
  misc_feature: MA Experiment 20000267 PARAMETER Experiment Name: At_Drought_P Parameter: Treatment Value: Drought vs. No Drought
  misc_feature: MA Experiment ID: 20000268 Result: Up-regulated in Transcription
  misc_feature: MA Experiment 20000268 PARAMETER Experiment Name: At_100mM_NaCl__P Parameter: Age (day) Value: 14
  misc_feature: MA Experiment 20000268 PARAMETER Experiment Name: At_100mM_NaCl__P Parameter: Organism Value: A. thaliana
  misc_feature: MA Experiment 20000268 PARAMETER Experiment Name: At_100mM_NaCl__P Parameter: Plant Line Value: WS
  misc_feature: MA Experiment 20000268 PARAMETER Experiment Name: At_100mM_NaCl__P Parameter: Timepoint (hr) Value: 6
  misc_feature: MA Experiment 20000268 PARAMETER Experiment Name: At_100mM_NaCl__P Parameter: Tissue Value: Whole Plant
  misc_feature: MA Experiment 20000268 PARAMETER Experiment Name: At_100mM_NaCl__P Parameter: Treatment Value: 100mM NaCl vs. No Treatment
  misc_feature: MA Experiment ID: 20000286 Result: Up-regulated in Transcription
  misc_feature: MA Experiment 20000286 PARAMETER Experiment Name: At_Open_Flower_P Parameter: Age (day) Value: 21
  misc_feature: MA Experiment 20000286 PARAMETER Experiment Name: At_Open_Flower_P Parameter: Plant Line Value: WS
  misc_feature: MA Experiment 20000286 PARAMETER Experiment Name: At_Open_Flower_P Parameter: Tissue Value: Half Open vs. Whole Plant
  misc_feature: MA Experiment ID: 20000436 Result: Up-regulated in Transcription
  misc_feature: MA Experiment 20000436 PARAMETER Experiment Name: At_Drought_P Parameter: Age (day) Value: 7
  misc_feature: MA Experiment 20000436 PARAMETER Experiment Name: At_Drought_P Parameter: Organism Value: A. thaliana
  misc_feature: MA Experiment 20000436 PARAMETER Experiment Name: At_Drought_P Parameter: Plant Line Value: WS
  misc_feature: MA Experiment 20000436 PARAMETER Experiment Name: At_Drought_P Parameter: Timepoint (hr) Value: 12
  misc_feature: MA Experiment 20000436 PARAMETER Experiment Name: At_Drought_P Parameter: Tissue Value: Whole Plant
  misc_feature: MA Experiment 20000436 PARAMETER Experiment Name: At_Drought_P Parameter: Treatment Value: Drought vs. No Drought
  misc_feature: MA Experiment ID: 20000437 Result: Up-regulated in Transcription
  misc_feature: MA Experiment 20000437 PARAMETER Experiment Name: At_Drought_P Parameter: Age (day) Value: 8
  misc_feature: MA Experiment 20000437 PARAMETER Experiment Name: At_Drought_P Parameter: Organism Value: A. thaliana
  misc_feature: MA Experiment 20000437 PARAMETER Experiment Name: At_Drought_P Parameter: Plant Line Value: WS
  misc_feature: MA Experiment 20000437 PARAMETER Experiment Name: At_Drought_P Parameter: Timepoint (hr) Value: 24
  misc_feature: MA Experiment 20000437 PARAMETER Experiment Name: At_Drought_P Parameter: Tissue Value: Whole Plant
  misc_feature: MA Experiment 20000437 PARAMETER Experiment Name: At_Drought_P Parameter: Treatment Value: Drought vs. No Drought
  misc_feature: MA Experiment ID: 20000496 Result: Up-regulated in Transcription
  misc_feature: MA Experiment 20000496 PARAMETER Experiment Name: At_Guard_Cells_P Parameter: Harvest Date Value: 7/19/2002
  misc_feature: MA Experiment 20000496 PARAMETER Experiment Name: At_Guard_Cells_P Parameter: Organism Value: Canola
  misc_feature: MA Experiment 20000496 PARAMETER Experiment Name: At_Guard_Cells_P Parameter: Tissue Value: Guard Cells vs. Leaves
  misc_feature: MA Experiment ID: 20000794 Result: Up-regulated in Transcription
  misc_feature: MA Experiment 20000794 PARAMETER Experiment Name: At_Petals_P Parameter: Age (day) Value: 23-25 days
  misc_feature: MA Experiment 20000794 PARAMETER Experiment Name: At_Petals_P Parameter: Plant Line Value: WS
  misc_feature: MA Experiment 20000794 PARAMETER Experiment Name: At_Petals_P Parameter: Tissue Value: Petals vs. Whole plant
  misc_feature: MA Experiment ID: 20001557 Result: Up-regulated in Transcription
  misc_feature: MA Experiment 20001557 PARAMETER Experiment Name: At_Drought_Soil_Dry_P Parameter: Age (day) Value: 27
  misc_feature: MA Experiment 20001557 PARAMETER Experiment Name: At_Drought_Soil_Dry_P Parameter: Organism Value: A. thaliana
  misc_feature: MA Experiment 20001557 PARAMETER Experiment Name: At_Drought_Soil_Dry_P Parameter: Plant Line Value: WS
  misc_feature: MA Experiment 20001557 PARAMETER Experiment Name: At_Drought_Soil_Dry_P Parameter: Post Timepoint (hr) Value: 3
  misc_feature: MA Experiment 20001557 PARAMETER Experiment Name: At_Drought_Soil_Dry_P Parameter: Post-Treatment Value: Re-Water vs. No Drought
  misc_feature: MA Experiment 20001557 PARAMETER Experiment Name: At_Drought_Soil_Dry_P Parameter: Timepoint (day) Value: 13
  misc_feature: MA Experiment 20001557 PARAMETER Experiment Name: At_Drought_Soil_Dry_P Parameter: Treatment Value: Drought vs. No Drought
  misc_feature: MA Experiment ID: 20001559 Result: Up-regulated in Transcription
  misc_feature: MA Experiment 20001559 PARAMETER Experiment Name: At_Drought_Soil_Dry_P Parameter: Age (day) Value: 28
  misc_feature: MA Experiment 20001559 PARAMETER Experiment Name: At_Drought_Soil_Dry_P Parameter: Organism Value: A. thaliana
  misc_feature: MA Experiment 20001559 PARAMETER Experiment Name: At_Drought_Soil_Dry_P Parameter: Plant Line Value: WS
  misc_feature: MA Experiment 20001559 PARAMETER Experiment Name: At_Drought_Soil_Dry_P Parameter: Post Timepoint (hr) Value: 29
  misc_feature: MA Experiment 20001559 PARAMETER Experiment Name: At_Drought_Soil_Dry_P Parameter: Post-Treatment Value: Re-Water vs. No Drought
  misc_feature: MA Experiment 20001559 PARAMETER Experiment Name: At_Drought_Soil_Dry_P Parameter: Timepoint (day) Value: 14
  misc_feature: MA Experiment 20001559 PARAMETER Experiment Name: At_Drought_Soil_Dry_P Parameter: Treatment Value: Drought vs. No Drought
  misc_feature: MA Experiment ID: 20001904 Result: Up-regulated in Transcription
  misc_feature: MA Experiment 20001904 PARAMETER Experiment Name: At_Drought_Reproduction_P Parameter: Age (day) Value: 37
  misc_feature: MA Experiment 20001904 PARAMETER Experiment Name: At_Drought_Reproduction_P Parameter: Organism Value: A. thaliana
  misc_feature: MA Experiment 20001904 PARAMETER Experiment Name: At_Drought_Reproduction_P Parameter: Plant Line Value: WS
  misc_feature: MA Experiment 20001904 PARAMETER Experiment Name: At_Drought_Reproduction_P Parameter: Timepoint (day) Value: 7
  misc_feature: MA Experiment 20001904 PARAMETER Experiment Name: At_Drought_Reproduction_P Parameter: Tissue Value: Rosettes
  misc_feature: MA Experiment 20001904 PARAMETER Experiment Name: At_Drought_Reproduction_P Parameter: Treatment Value: Drought vs. No Drought
  misc_feature: MA Experiment ID: 20001905 Result: Up-regulated in Transcription
  misc_feature: MA Experiment 20001905 PARAMETER Experiment Name: At_Drought_Reproduction_P Parameter: Age (day) Value: 40
  misc_feature: MA Experiment 20001905 PARAMETER Experiment Name: At_Drought_Reproduction_P Parameter: Organism Value: A. thaliana
  misc_feature: MA Experiment 20001905 PARAMETER Experiment Name: At_Drought_Reproduction_P Parameter: Plant Line Value: WS
  misc_feature: MA Experiment 20001905 PARAMETER Experiment Name: At_Drought_Reproduction_P Parameter: Timepoint (day) Value: 10
  misc_feature: MA Experiment 20001905 PARAMETER Experiment Name: At_Drought_Reproduction_P Parameter: Tissue Value: Rosettes
  misc_feature: MA Experiment 20001905 PARAMETER Experiment Name: At_Drought_Reproduction_P Parameter: Treatment Value: Drought vs. No Drought
  misc_feature: MA Experiment ID: 20001911 Result: Up-regulated in Transcription
  misc_feature: MA Experiment 20001911 PARAMETER Experiment Name: At_Drought_Reproduction_P Parameter: Age (day) Value: 40
  misc_feature: MA Experiment 20001911 PARAMETER Experiment Name: At_Drought_Reproduction_P Parameter: Organism Value: A. thaliana
  misc_feature: MA Experiment 20001911 PARAMETER Experiment Name: At_Drought_Reproduction_P Parameter: Plant Line Value: WS
  misc_feature: MA Experiment 20001911 PARAMETER Experiment Name: At_Drought_Reproduction_P Parameter: Timepoint (day) Value: 10
  misc_feature: MA Experiment 20001911 PARAMETER Experiment Name: At_Drought_Reproduction_P Parameter: Tissue Value: Flowers
  misc_feature: MA Experiment 20001911 PARAMETER Experiment Name: At_Drought_Reproduction_P Parameter: Treatment Value: Drought vs. No Drought
aacatttgttcgtgtaaggctttttttactatctcttctatttactcaatttcttcttacacatttgttatacgtaaaaggaacatttctttgattctttttttgttgtcactaccaaaacgtactgatttgttttttgaataggtgggttcctagagtaaaaaagagaccgatatttaaacttttgtcccttgactaaaactcaaaacatttctgtttgttttttgttagttaaatatgtttaaaataaataaataatcatatagctatttatgaaagtattaatatacaaataactttcaaaagttattaattaaatttcaaacaataatcctgtgtttcaatatctacttttgcaattgttatttccataattccattaatacaaatttttagatattgatagctacctaactcacactttttaaattttagttatgtcgacaagtttttttttttgttacatgatgttaattacgactaatcaggtttttaaagtaataaatcaatattaaaaagtgcctcaacaaagaaaaagtgttggaccatggtcgtctataattatttatcaaaacatagtcacacacacccttgccgttattgtctagaactctctctcgctctcccaaaaactcatctctcaccaccgtctcaaaccaagttcgatctaaaagccttttcctttagattctctccaacaacaaatctctttgaatcactcagtcatgtcggttttacttcctctctgtctgattatctccatgttcacctattcaaacgcagcgtattgtctttgcaaagaggggaacgagcaagtgcttcagaaggcaatagactacgcttgtggaaatggagctgactgtacccagatccaacccaccggagcttgttaccaacctaacaccgtcaaaaaccactgtgacgtcgccgtcaacagttactaccagaaaaaagcttcttccggtgccacctgtgactttaacggcgccgcctccccctctactacccctccgtcaactgcttcaaactgtttaactggttcaagctctagtggcactcctaccacaggaacaccaactactgggacaccaaccagtgggaccccgactaccggaactccgaccaccggaacccccaccactggaactccaaccagtgggactccaactagtggcttcccaaataccgggactccaaacacagggactaacactgggatgccaaattccaacgggatgccaacttcatcgtcatcttcggtgttcccggggactactcttggcccgactgggagcgggggactaggcgatccaaatgctggagagaagctgtctgttcgaactaacacagtggtcttcttattaaccggtgtagcagcaatgcttgtcatatgagggcttagaagtcacacgcggttatggttgtaattgagttgctgagagatcagatcttgccaacggctcatggttgatagagtcatcttttttttcactcgtctttctaggatttggacttaggttggccgagagacgtaatgctggtagtagctagtattttgggttatgtacaactttaactaagagctttacttttgtaaatccggaggatgagatgctcttttgtttcttatattctttttaatccgtttacttggatctttcatcc

SEQ ID NO: 30065 - protein, 222 aa, Arabidopsis thaliana
  peptide (1)..(222): Ceres Seq. ID no. 13489297
  misc_feature (78)..(188): Pfam Name: Equine herpesvirus glycoprotein gp2 Pfam Description: Equine herpesvirus glycoprotein gp2
  misc_feature (16)..(180): Homolog of NCBI NO: 8778409 NR Description: F16A14.5 [Arabidopsis thaliana]
  misc_feature (1)..(189): Homolog of NCBI NO: 15241485 NR Description: glycosyl hydrolase family 17 [Arabidopsis
  misc_feature (1)..(189): Homolog of NCBI NO: 21592859 NR Description: unknown [Arabidopsis thaliana]
  misc_feature (1)..(166): Homolog of NCBI NO: 18394637 NR Description: glycosyl hydrolase family 17 [Arabidopsis
  misc_feature (1)..(180): Homolog of NCBI NO: 30697478 NR Description: glycosyl hydrolase family 17 [Arabidopsis
  misc_feature (1)..(163): Homolog of NCBI NO: 30683485 NR Description: expressed protein [Arabidopsis thaliana]
  misc_feature (1)..(185): Homolog of NCBI NO: 15222715 NR Description: glycosyl hydrolase family 17 [Arabidopsis
  misc_feature (1)..(205): Homolog of NCBI NO: 25404810 NR Description: unknown protein, 45065-49536 [imported] -
  misc_feature (1)..(222): Homolog of NCBI NO: 21553768 NR Description: unknown [Arabidopsis thaliana]
  misc_feature (1)..(222): Homolog of NCBI NO: 18409239 NR Description: expressed protein [Arabidopsis thaliana]
MSVLLPLCLIISMFTYSNAAYCLCKEGNEQVLQKAIDYACGNGADCTQIQPTGACYQPNTVKNHCDVAVNSYYQKKASSGATCDFNGAASPSTTPPSTASNCLTGSSSSGTPTTGTPTTGTPTSGTPTTGTPTTGTPTTGTPTSGTPTSGFPNTGTPNTGTNTGMPNSNGMPTSSSSSVFPGTTLGPTGSGGLGDPNAGEKLSVRTNTVVFLLTGVAAMLVI

SEQ ID NO: 30066 - protein, 210 aa, Arabidopsis thaliana
  peptide (1)..(210): Ceres Seq. ID no. 13489298
  misc_feature (66)..(176): Pfam Name: Equine herpesvirus glycoprotein gp2 Pfam Description: Equine herpesvirus glycoprotein gp2
  misc_feature (4)..(168): Homolog of NCBI NO: 8778409 NR Description: F16A14.5 [Arabidopsis thaliana]
  misc_feature (1)..(177): Homolog of NCBI NO: 15241485 NR Description: glycosyl hydrolase family 17 [Arabidopsis
  misc_feature (1)..(177): Homolog of NCBI NO: 21592859 NR Description: unknown [Arabidopsis thaliana]
  misc_feature (1)..(154): Homolog of NCBI NO: 18394637 NR Description: glycosyl hydrolase family 17 [Arabidopsis
  misc_feature (1)..(168): Homolog of NCBI NO: 30697478 NR Description: glycosyl hydrolase family 17 [Arabidopsis
  misc_feature (1)..(151): Homolog of NCBI NO: 30683485 NR Description: expressed protein [Arabidopsis thaliana]
  misc_feature (1)..(173): Homolog of NCBI NO: 15222715 NR Description: glycosyl hydrolase family 17 [Arabidopsis
  misc_feature (1)..(193): Homolog of NCBI NO: 25404810 NR Description: unknown protein, 45065-49536 [imported] -
  misc_feature (1)..(210): Homolog of NCBI NO: 21553768 NR Description: unknown [Arabidopsis thaliana]
  misc_feature (1)..(210): Homolog of NCBI NO: 18409239 NR Description: expressed protein [Arabidopsis thaliana]
MFTYSNAAYCLCKEGNEQVLQKAIDYACGNGADCTQIQPTGACYQPNTVKNHCDVAVNSYYQKKASSGATCDFNGAASPSTTPPSTASNCLTGSSSSGTPTTGTPTTGTPTSGTPTTGTPTTGTPTTGTPTSGTPTSGFPNTGTPNTGTNTGMPNSNGMPTSSSSSVFPGTTLGPTGSGGLGDPNAGEKLSVRTNTVVFLLTGVAAMLVI

SEQ ID NO: 30067 - DNA, 762 bp, Arabidopsis thaliana
  misc_feature (1)..(762): Ceres Seq. ID no. 12482057
  misc_feature: MA Experiment ID: 108474 Result: Down-regulated in Transcription
  misc_feature: MA Experiment 108474 PARAMETER Experiment Name: At_Drought_Flowers_cDNA_P Parameter: Timepoint (hr) Value: null
  misc_feature: MA Experiment 108474 PARAMETER Experiment Name: At_Drought_Flowers_cDNA_P Parameter: Treatment Value: Drought vs. No Drought
  misc_feature: MA Experiment ID: 20000087 Result: Down-regulated in Transcription
  misc_feature: MA Experiment 20000087 PARAMETER Experiment Name: At_100uM_ABA_Mutants_cDNA_P Parameter: Plant Line Value: WS
  misc_feature: MA Experiment 20000087 PARAMETER Experiment Name: At_100uM_ABA_Mutants_cDNA_P Parameter: Timepoint (hr) Value: 6
  misc_feature: MA Experiment 20000087 PARAMETER Experiment Name: At_100uM_ABA_Mutants_cDNA_P Parameter: Tissue Value: Aerial
  misc_feature: MA Experiment 20000087 PARAMETER Experiment Name: At_100uM_ABA_Mutants_cDNA_P Parameter: Treatment Value: 100uM ABA vs. No Treatment
  misc_feature: MA Experiment ID: 20000113 Result: Up-regulated in Transcription
  misc_feature: MA Experiment 20000113 PARAMETER Experiment Name: At_42deg_Heat_cDNA_P Parameter: Temperature (deg C) Value: 42 vs. 22
  misc_feature: MA Experiment 20000113 PARAMETER Experiment Name: At_42deg_Heat_cDNA_P Parameter: Timepoint (hr) Value: 8
  misc_feature: MA Experiment 20000113 PARAMETER Experiment Name: At_42deg_Heat_cDNA_P Parameter: Tissue Value: Aerial
  misc_feature: MA Experiment ID: 20000184 Result: Up-regulated in Transcription
  misc_feature: MA Experiment 20000184 PARAMETER Experiment Name: At_Shoots__P Parameter: Age (day) Value: 7
  misc_feature: MA Experiment 20000184 PARAMETER Experiment Name: At_Shoots__P Parameter: Tissue Value: Shoots vs. Whole Plant
  misc_feature: MA Experiment ID: 20000264 Result: Up-regulated in Transcription
  misc_feature: MA Experiment 20000264 PARAMETER Experiment Name: At_Open_Flower_P Parameter: Age (day) Value: 21
  misc_feature: MA Experiment 20000264 PARAMETER Experiment Name: At_Open_Flower_P Parameter: Plant Line Value: WS
  misc_feature: MA Experiment 20000264 PARAMETER Experiment Name: At_Open_Flower_P Parameter: Tissue Value: Open Flower vs. Whole Plant
  misc_feature: MA Experiment ID: 20000265 Result: Up-regulated in Transcription
  misc_feature: MA Experiment 20000265 PARAMETER Experiment Name: At_Open_Flower_P Parameter: Age (day) Value: 21
  misc_feature: MA Experiment 20000265 PARAMETER Experiment Name: At_Open_Flower_P Parameter: Plant Line Value: WS
  misc_feature: MA Experiment 20000265 PARAMETER Experiment Name: At_Open_Flower_P Parameter: Tissue Value: Closed Flower vs. Whole Plant
  misc_feature: MA Experiment ID: 20000286 Result: Up-regulated in Transcription
  misc_feature: MA Experiment 20000286 PARAMETER Experiment Name: At_Open_Flower_P Parameter: Age (day) Value: 21
  misc_feature: MA Experiment 20000286 PARAMETER Experiment Name: At_Open_Flower_P Parameter: Plant Line Value: WS
  misc_feature: MA Experiment 20000286 PARAMETER Experiment Name: At_Open_Flower_P Parameter: Tissue Value: Half Open vs. Whole Plant
  misc_feature: MA Experiment ID: 20001910 Result: Up-regulated in Transcription
  misc_feature: MA Experiment 20001910 PARAMETER Experiment Name: At_Drought_Reproduction_P Parameter: Age (day) Value: 37
  misc_feature: MA Experiment 20001910 PARAMETER Experiment Name: At_Drought_Reproduction_P Parameter: Organism Value: A. thaliana
  misc_feature: MA Experiment 20001910 PARAMETER Experiment Name: At_Drought_Reproduction_P Parameter: Plant Line Value: WS
  misc_feature: MA Experiment 20001910 PARAMETER Experiment Name: At_Drought_Reproduction_P Parameter: Timepoint (day) Value: 7
  misc_feature: MA Experiment 20001910 PARAMETER Experiment Name: At_Drought_Reproduction_P Parameter: Tissue Value: Flowers
  misc_feature: MA Experiment 20001910 PARAMETER Experiment Name: At_Drought_Reproduction_P Parameter: Treatment Value: Drought vs. No Drought
catacatacgtagagagatccaaaatacccaacctcgcagagtaaaagcaaaaagaagaagaaatcagagagaatgtcgtggcaagcatacgttgatgagcatttgatgtgtgatgtcggcgacggccaaggtcaccaccttaccgccgccgctatcatcggccatgatggtagcgtttgggctcagagcgctaattttcctcagttcaaacctcaagagatcacagacattatgaaggatttcgatgagcctggtcacctcgctcccacgggtatgttcctcgcagggctaaagtatatggtcatccaaggcgagcctaatgctgtcatccgtggcaagaagggagctgggggaatcacgatcaagaaaacaggacaatcaatggtgtttggtctgtacgaagagccagtgactccaggacaatgcaacatggttgtcgagaggttgggtgattacttgatcgaacagggtctttgaaccatctacaatgttttatatctctttctctataaatcattaaacctttgtttctctttttgggttttggttttccgtttctataatttaattttgggtcttcctggtttctactttagccaagtttaacagaaagcttaagcctaaggttgcagataataacactaagcctgtgtgaagaagccaagacttataagacttttgtttcttttttctctttttcatggttattgattaatttgtgtttaaaaaaaaaaaaaattaattttatagtattgttgcgt

SEQ ID NO: 30068 - protein, 134 aa, Arabidopsis thaliana
  peptide (1)..(134): Ceres Seq. ID no. 12482058
  misc_feature (2)..(129): Pfam Name: Profilin Pfam Description: Profilin
  misc_feature (1)..(133): Homolog of NCBI NO: 2129962 NR Description: profilin - common tobacco
  misc_feature (1)..(133): Homolog of NCBI NO: 6469497 NR Description: profilin [Nicotiana tabacum]
  misc_feature (1)..(134): Homolog of NCBI NO: 464471 NR Description: PROFILIN 1 (POLLEN ALLERGEN PHL P 11) (PHL P XI)
  misc_feature (1)..(134): Homolog of NCBI NO: 3914432 NR Description: PROFILIN 2/4 (POLLEN ALLERGEN PHL P 11) (PHL P
  misc_feature (1)..(134): Homolog of NCBI NO: 1942360 NR Description: Birch Pollen Profilin
  misc_feature (1)..(134): Homolog of NCBI NO: 3914446 NR Description: Profilin (Pollen allergen Mer a 1)
  misc_feature (1)..(134): Homolog of NCBI NO: 14423854 NR Description: Profilin
  misc_feature (1)..(134): Homolog of NCBI NO: 28393116 NR Description: putative profilin 3 [Arabidopsis thaliana]
  misc_feature (1)..(134): Homolog of NCBI NO: 15233536 NR Description: profilin 3; protein id: At4g29340.1, supported by
  misc_feature (1)..(134): Homolog of NCBI NO: 15224839 NR Description: profilin 4; protein id: At2g19770.1, supported by
MSWQAYVDEHLMCDVGDGQGHHLTAAAIIGHDGSVWAQSANFPQFKPQEITDIMKDFDEPGHLAPTGMFLAGLKYMVIQGEPNAVIRGKKGAGGITIKKTGQSMVFGLYEEPVTPGQCNMVVERLGDYLIEQGL

SEQ ID NO: 30069 - protein, 123 aa, Arabidopsis thaliana
  peptide (1)..(123): Ceres Seq. ID no. 12482059
  misc_feature (1)..(118): Pfam Name: Profilin Pfam Description: Profilin
  misc_feature (1)..(122): Homolog of NCBI NO: 2129962 NR Description: profilin - common tobacco
  misc_feature (1)..(122): Homolog of NCBI NO: 6469497 NR Description: profilin [Nicotiana tabacum]
  misc_feature (1)..(123): Homolog of NCBI NO: 464471 NR Description: PROFILIN 1 (POLLEN ALLERGEN PHL P 11) (PHL P XI)
  misc_feature (1)..(123): Homolog of NCBI NO: 3914432 NR Description: PROFILIN 2/4 (POLLEN ALLERGEN PHL P 11) (PHL P
  misc_feature (1)..(123): Homolog of NCBI NO: 1942360 NR Description: Birch Pollen Profilin
  misc_feature (1)..(123): Homolog of NCBI NO: 3914446 NR Description: Profilin (Pollen allergen Mer a 1)
  misc_feature (1)..(123): Homolog of NCBI NO: 14423854 NR Description: Profilin
  misc_feature (1)..(123): Homolog of NCBI NO: 28393116 NR Description: putative profilin 3 [Arabidopsis thaliana]
  misc_feature (1)..(123): Homolog of NCBI NO: 15233536 NR Description: profilin 3; protein id: At4g29340.1, supported by
  misc_feature (1)..(123): Homolog of NCBI NO: 15224839 NR Description: profilin 4; protein id: At2g19770.1, supported by
MCDVGDGQGHHLTAAAIIGHDGSVWAQSANFPQFKPQEITDIMKDFDEPGHLAPTGMFLAGLKYMVIQGEPNAVIRGKKGAGGITIKKTGQSMVFGLYEEPVTPGQCNMVVERLGDYLIEQGL

SEQ ID NO: 30070 - protein, 81 aa, Arabidopsis thaliana
  peptide (1)..(81): Ceres Seq. ID no. 12482060
  misc_feature (1)..(76): Pfam Name: Profilin Pfam Description: Profilin
  misc_feature (1)..(80): Homolog of NCBI NO: 2129962 NR Description: profilin - common tobacco
  misc_feature (1)..(80): Homolog of NCBI NO: 6469497 NR Description: profilin [Nicotiana tabacum]
  misc_feature (1)..(81): Homolog of NCBI NO: 464471 NR Description: PROFILIN 1 (POLLEN ALLERGEN PHL P 11) (PHL P XI)
  misc_feature (1)..(81): Homolog of NCBI NO: 3914432 NR Description: PROFILIN 2/4 (POLLEN ALLERGEN PHL P 11) (PHL P
  misc_feature (1)..(81): Homolog of NCBI NO: 1942360 NR Description: Birch Pollen Profilin
  misc_feature (1)..(81): Homolog of NCBI NO: 3914446 NR Description: Profilin (Pollen allergen Mer a 1)
  misc_feature (1)..(81): Homolog of NCBI NO: 14423854 NR Description: Profilin
  misc_feature (1)..(81): Homolog of NCBI NO: 28393116 NR Description: putative profilin 3 [Arabidopsis thaliana]
  misc_feature (1)..(81): Homolog of NCBI NO: 15233536 NR Description: profilin 3; protein id: At4g29340.1, supported by
  misc_feature (1)..(81): Homolog of NCBI NO: 15224839 NR Description: profilin 4; protein id: At2g19770.1, supported by
MKDFDEPGHLAPTGMFLAGLKYMVIQGEPNAVIRGKKGAGGITIKKTGQSMVFGLYEEPVTPGQCNMVVERLGDYLIEQGL

SEQ ID NO: 30071 - DNA, 1787 bp, Arabidopsis thaliana
  misc_feature (1)..(1787): Ceres Seq. ID no. 13500097
  misc_feature: MA Experiment ID: 108462 Result: Up-regulated in Transcription
  misc_feature: MA Experiment 108462 PARAMETER Experiment Name: At_Germinating_Seeds_cDNA_P Parameter: Age (day) Value: 2 vs. 0
  misc_feature: MA Experiment 108462 PARAMETER Experiment Name: At_Germinating_Seeds_cDNA_P Parameter: Tissue Value: Germinating Seeds
  misc_feature: MA Experiment ID: 108464 Result: Up-regulated in Transcription
  misc_feature: MA Experiment 108464 PARAMETER Experiment Name: At_Germinating_Seeds_cDNA_P Parameter: Age (day) Value: 4 vs. 0
  misc_feature: MA Experiment 108464 PARAMETER Experiment Name: At_Germinating_Seeds_cDNA_P Parameter: Tissue Value: Germinating Seeds
  misc_feature: MA Experiment ID: 20000185 Result: Up-regulated in Transcription
  misc_feature: MA Experiment 20000185 PARAMETER Experiment Name: At_Roots__P Parameter: Age (day) Value: 7 vs. 21
  misc_feature: MA Experiment 20000185 PARAMETER Experiment Name: At_Roots__P Parameter: Organism Value: A. thaliana
  misc_feature: MA Experiment 20000185 PARAMETER Experiment Name: At_Roots__P Parameter: Tissue Value: Roots vs. Whole Plant
  misc_feature: MA Experiment ID: 20000439 Result: Up-regulated in Transcription
  misc_feature: MA Experiment 20000439 PARAMETER Experiment Name: At_Roots__P Parameter: Age (day) Value: 14 vs. 21
  misc_feature: MA Experiment 20000439 PARAMETER Experiment Name: At_Roots__P Parameter: Organism Value: A. thaliana
  misc_feature: MA Experiment 20000439 PARAMETER Experiment Name: At_Roots__P Parameter: Tissue Value: Roots vs. Whole Plant
  misc_feature: MA Experiment ID: 20000496 Result: Up-regulated in Transcription
  misc_feature: MA Experiment 20000496 PARAMETER Experiment Name: At_Guard_Cells_P Parameter: Harvest Date Value: 7/19/2002
  misc_feature: MA Experiment 20000496 PARAMETER Experiment Name: At_Guard_Cells_P Parameter: Organism Value: Canola
  misc_feature: MA Experiment 20000496 PARAMETER Experiment Name: At_Guard_Cells_P Parameter: Tissue Value: Guard Cells vs. Leaves
  misc_feature: MA Experiment ID: 20000794 Result: Up-regulated in Transcription
  misc_feature: MA Experiment 20000794 PARAMETER Experiment Name: At_Petals_P Parameter: Age (day) Value: 23-25 days
  misc_feature: MA Experiment 20000794 PARAMETER Experiment Name: At_Petals_P Parameter: Plant Line Value: WS
  misc_feature: MA Experiment 20000794 PARAMETER Experiment Name: At_Petals_P Parameter: Tissue Value: Petals vs. Whole plant
  misc_feature: MA Experiment ID: 20001451 Result: Down-regulated in Transcription
  misc_feature: MA Experiment 20001451 PARAMETER Experiment Name: At_Far-red-induction_P Parameter: Age (day) Value: 7
  misc_feature: MA Experiment 20001451 PARAMETER Experiment Name: At_Far-red-induction_P Parameter: Light Value: Far-red vs. White
  misc_feature: MA Experiment 20001451 PARAMETER Experiment Name: At_Far-red-induction_P Parameter: Organism Value: A. thaliana
  misc_feature: MA Experiment 20001451 PARAMETER Experiment Name: At_Far-red-induction_P Parameter: Plant Line Value: Columbia
  misc_feature: MA Experiment 20001451 PARAMETER Experiment Name: At_Far-red-induction_P Parameter: Timepoint (hr) Value: 24
  misc_feature: MA Experiment 20001451 PARAMETER Experiment Name: At_Far-red-induction_P Parameter: Tissue Value: Whole Plant
  misc_feature: MA Experiment ID: 20001905 Result: Up-regulated in Transcription
  misc_feature: MA Experiment 20001905 PARAMETER Experiment Name: At_Drought_Reproduction_P Parameter: Age (day) Value: 40
  misc_feature: MA Experiment 20001905 PARAMETER Experiment Name: At_Drought_Reproduction_P Parameter: Organism Value: A. thaliana
  misc_feature: MA Experiment 20001905 PARAMETER Experiment Name: At_Drought_Reproduction_P Parameter: Plant Line Value: WS
  misc_feature: MA Experiment 20001905 PARAMETER Experiment Name: At_Drought_Reproduction_P Parameter: Timepoint (day) Value: 10
  misc_feature: MA Experiment 20001905 PARAMETER Experiment Name: At_Drought_Reproduction_P Parameter: Tissue Value: Rosettes
  misc_feature: MA Experiment 20001905 PARAMETER Experiment Name: At_Drought_Reproduction_P Parameter: Treatment Value: Drought vs. No Drought
atttgctcacctttcgccgattgattttgtacatcacacgcagacgcagcttttagtatttttttcaacaatcgcttttttttttttctcgatctccgtgaagctctcgaatctctggttttgagttttggagaatggtgtttttccgcagcgtatcggcctttactaggctgaggtctcgcgtcggccaacaatcttcactcagcaattctgtcagatggattcagatgcagagctctaccgacctggacctgaagtcgcagctgcaagagttaattccggaacagcaggaccgtctgaagaaactgaagtcagaacatgggaaggtccaactgggaaacatcactgttgatatggttattggtggaatgagagggatgactggattgctttgggaaacctcattgcttgacccggaagagggtattcgctttaggggattgtcgattcctgagtgccagaaagtattacctactgcccagtctggagctgaaccattaccggagggtcttttgtggcttctcttaactggaaaggtacctagcaaagagcaagttgaagcactgtcgaaagacttggcgaaccgtgctgctgtgccagattatgtgtacaatgccatcgatgctctgccttccacagctcatccaatgactcaatttgctagcggtgttatggccctccaggtgcaaagtgagtttcaaaaggcatatgagaatggaattcataagtcaaagttctgggagccaacatatgaggattgcctcaacctgattgctcgtgttcctgttgtagctgcatatgtttatcgaaggatgtataagaatggtgattccattccctcagataaatctttggattatggtgcaaatttttcccacatgttgggatttgatgatgaaaaggtgaaagagctcatgaggctttacatcaccatccacagtgatcatgaaggtggaaatgttagtgctcacactggtcacctggttggtagtgcactttcagacccatatctgtcatttgcagctgcattaaatggtttagctgggccactccatggtttggctaatcaggaagttttgctttggatcaaatcagtcgtagaggaatgtggagaagatatatcaaaagaacagttgaaagaatatgtttggaaaacattaaacagtggcaaggttattccgggatatggtcacggtgttctgcgcaatactgatccaagatatgtatgccaaagagaatttgccttgaagcatctacctgacgaccctcttttccagctggtgtcaaagctttatgaagttgtgcctcctgttctcactgagcttggaaaggtgaagaacccgtggccaaatgttgatgctcacagtggggtcttgctgaaccactatggtctaaccgaagcaaggtactacaccgtgctctttggtgtttcaaggagtcttggcatctgctctcagcttatatgggaccgagctcttggacttgcacttgagaggccaaagagtgttaccatggactggcttgaagcccattgtaagaaagcttcatctgcttaagtcaccaccgagtcctgagttgtcgcactctctcgtgtttcaacaaaagtcattctcttccacactggatagctttttttgtttttaccttctattgacagaagaaacatttgttcatgtagaaattgttcctgagaaacacatgcttggtgcaaatttgcatttccgggaaactcgtgataataaataaacagttgtattcagtttgcgtaaaaatcaaacatcaatatc

SEQ ID NO: 30072 - protein, 473 aa, Arabidopsis thaliana
  peptide (1)..(473): Ceres Seq. ID no. 13500098
  misc_feature (78)..(455): Pfam Name: Citrate synthase Pfam Description: Citrate synthase
  misc_feature (1)..(473): Homolog of NCBI NO: 68230 NR Description: citrate (si)-synthase (EC 4.1.3.7) precursor,
  misc_feature (1)..(470): Homolog of NCBI NO: 1556429 NR Description: citrate synthase [Nicotiana tabacum]
  misc_feature (1)..(473): Homolog of NCBI NO: 15982952 NR Description: citrate synthase [Prunus persica]
  misc_feature (1)..(472): Homolog of NCBI NO: 11066954 NR Description: citrate synthase [Oryza sativa]
  misc_feature (1)..(471): Homolog of NCBI NO: 1352088 NR Description: Citrate synthase, mitochondrial precursor
  misc_feature (1)..(464): Homolog of NCBI NO: 40646744 NR Description: mitochondrial citrate synthase precursor [Citrus
  misc_feature (1)..(471): Homolog of NCBI NO: 8928010 NR Description: Citrate synthase, mitochondrial precursor
  misc_feature (1)..(473): Homolog of NCBI NO: 30689693 NR Description: citrate synthase [Arabidopsis thaliana]
  misc_feature (1)..(473): Homolog of NCBI NO: 21553775 NR Description: citrate synthase [Arabidopsis thaliana]
  misc_feature (1)..(473): Homolog of NCBI NO: 18406515 NR Description: citrate synthase [Arabidopsis thaliana]
MVFFRSVSAFTRLRSRVGQQSSLSNSVRWIQMQSSTDLDLKSQLQELIPEQQDRLKKLKSEHGKVQLGNITVDMVIGGMRGMTGLLWETSLLDPEEGIRFRGLSIPECQKVLPTAQSGAEPLPEGLLWLLLTGKVPSKEQVEALSKDLANRAAVPDYVYNAIDALPSTAHPMTQFASGVMALQVQSEFQKAYENGIHKSKFWEPTYEDCLNLIARVPVVAAYVYRRMYKNGDSIPSDKSLDYGANFSHMLGFDDEKVKELMRLYITIHSDHEGGNVSAHTGHLVGSALSDPYLSFAAALNGLAGPLHGLANQEVLLWIKSVVEECGEDISKEQLKEYVWKTLNSGKVIPGYGHGVLRNTDPRYVCQREFALKHLPDDPLFQLVSKLYEVVPPVLTELGKVKNPWPNVDAHSGVLLNHYGLTEARYYTVLFGVSRSLGICSQLIWDRALGLALERPKSVTMDWLEAHCKKASSA

SEQ ID NO: 30073 - protein, 442 aa, Arabidopsis thaliana
  peptide (1)..(442): Ceres Seq. ID no. 13500099
  misc_feature (47)..(424): Pfam Name: Citrate synthase Pfam Description: Citrate synthase
  misc_feature (1)..(442): Homolog of NCBI NO: 68230 NR Description: citrate (si)-synthase (EC 4.1.3.7) precursor,
  misc_feature (1)..(439): Homolog of NCBI NO: 1556429 NR Description: citrate synthase [Nicotiana tabacum]
  misc_feature (1)..(442): Homolog of NCBI NO: 15982952 NR Description: citrate synthase [Prunus persica]
  misc_feature (1)..(441): Homolog of NCBI NO: 11066954 NR Description: citrate synthase [Oryza sativa]
  misc_feature (1)..(440): Homolog of NCBI NO: 1352088 NR Description: Citrate synthase, mitochondrial precursor
  misc_feature (1)..(433): Homolog of NCBI NO: 40646744 NR Description: mitochondrial citrate synthase precursor [Citrus
  misc_feature (1)..(440): Homolog of NCBI NO: 8928010 NR Description: Citrate synthase, mitochondrial precursor
  misc_feature (1)..(442): Homolog of NCBI NO: 30689693 NR Description: citrate synthase [Arabidopsis thaliana]
  misc_feature (1)..(442): Homolog of NCBI NO: 21553775 NR Description: citrate synthase [Arabidopsis thaliana]
  misc_feature (1)..(442): Homolog of NCBI NO: 18406515 NR Description: citrate synthase [Arabidopsis thaliana]
MQSSTDLDLKSQLQELIPEQQDRLKKLKSEHGKVQLGNITVDMVIGGMRGMTGLLWETSLLDPEEGIRFRGLSIPECQKVLPTAQSGAEPLPEGLLWLLLTGKVPSKEQVEALSKDLANRAAVPDYVYNAIDALPSTAHPMTQFASGVMALQVQSEFQKAYENGIHKSKFWEPTYEDCLNLIARVPVVAAYVYRRMYKNGDSIPSDKSLDYGANFSHMLGFDDEKVKELMRLYITIHSDHEGGNVSAHTGHLVGSALSDPYLSFAAALNGLAGPLHGLANQEVLLWIKSVVEECGEDISKEQLKEYVWKTLNSGKVIPGYGHGVLRNTDPRYVCQREFALKHLPDDPLFQLVSKLYEVVPPVLTELGKVKNPWPNVDAHSGVLLNHYGLTEARYYTVLFGVSRSLGICSQLIWDRALGLALERPKSVTMDWLEAHCKKASSA

SEQ ID NO: 30074 - protein, 400 aa, Arabidopsis thaliana
  peptide (1)..(400): Ceres Seq. ID no. 13500100
  misc_feature (5)..(382): Pfam Name: Citrate synthase Pfam Description: Citrate synthase
  misc_feature (1)..(400): Homolog of NCBI NO: 68230 NR Description: citrate (si)-synthase (EC 4.1.3.7) precursor,
  misc_feature (1)..(397): Homolog of NCBI NO: 1556429 NR Description: citrate synthase [Nicotiana tabacum]
  misc_feature (1)..(400): Homolog of NCBI NO: 15982952 NR Description: citrate synthase [Prunus persica]
  misc_feature (1)..(399): Homolog of NCBI NO: 11066954 NR Description: citrate synthase [Oryza sativa]
  misc_feature (1)..(398): Homolog of NCBI NO: 1352088 NR Description: Citrate synthase, mitochondrial precursor
  misc_feature (1)..(391): Homolog of NCBI NO: 40646744 NR Description: mitochondrial citrate synthase precursor [Citrus
  misc_feature (1)..(398): Homolog of NCBI NO: 8928010 NR Description: Citrate synthase, mitochondrial precursor
  misc_feature (1)..(400): Homolog of NCBI NO: 30689693 NR Description: citrate synthase [Arabidopsis thaliana]
  misc_feature (1)..(400): Homolog of NCBI NO: 21553775 NR Description: citrate synthase [Arabidopsis thaliana]
  misc_feature (1)..(400): Homolog of NCBI NO: 18406515 NR Description: citrate synthase [Arabidopsis thaliana]
MVIGGMRGMTGLLWETSLLDPEEGIRFRGLSIPECQKVLPTAQSGAEPLPEGLLWLLLTGKVPSKEQVEALSKDLANRAAVPDYVYNAIDALPSTAHPMTQFASGVMALQVQSEFQKAYENGIHKSKFWEPTYEDCLNLIARVPVVAAYVYRRMYKNGDSIPSDKSLDYGANFSHMLGFDDEKVKELMRLYITIHSDHEGGNVSAHTGHLVGSALSDPYLSFAAALNGLAGPLHGLANQEVLLWIKSVVEECGEDISKEQLKEYVWKTLNSGKVIPGYGHGVLRNTDPRYVCQREFALKHLPDDPLFQLVSKLYEVVPPVLTELGKVKNPWPNVDAHSGVLLNHYGLTEARYYTVLFGVSRSLGICSQLIWDRALGLALERPKSVTMDWLEAHCKKASSA

SEQ ID NO: 30075 - DNA, 1556 bp, Arabidopsis thaliana
  misc_feature (1)..(1556): Ceres Seq. ID no. 12334251
  misc_feature: MA Experiment ID: 108462 Result: Up-regulated in Transcription
  misc_feature: MA Experiment 108462 PARAMETER Experiment Name: At_Germinating_Seeds_cDNA_P Parameter: Age (day) Value: 2 vs. 0
  misc_feature: MA Experiment 108462 PARAMETER Experiment Name: At_Germinating_Seeds_cDNA_P Parameter: Tissue Value: Germinating Seeds
  misc_feature: MA Experiment ID: 108488 Result: Down-regulated in Transcription
  misc_feature: MA Experiment ID: 108594 Result: Up-regulated in Transcription
  misc_feature: MA Experiment 108594 PARAMETER Experiment Name: At_Ler-rhl_Root_cDNA_P Parameter: Plant Line Value: null
  misc_feature: MA Experiment ID: 108608 Result: Up-regulated in Transcription
  misc_feature: MA Experiment 108608 PARAMETER Experiment Name: At_100uM_ABA_cDNA_P Parameter: Timepoint (hr) Value: 1
  misc_feature: MA Experiment 108608 PARAMETER Experiment Name: At_100uM_ABA_cDNA_P Parameter: Tissue Value: Aerial
  misc_feature: MA Experiment 108608 PARAMETER Experiment Name: At_100uM_ABA_cDNA_P Parameter: Treatment Value: 100uM ABA vs. No Treatment
  misc_feature: MA Experiment ID: 20000069 Result: Up-regulated in Transcription
  misc_feature: MA Experiment 20000069 PARAMETER Experiment Name: At_100uM_ABA_Mutants_cDNA_P Parameter: Plant Line Value: CS23
  misc_feature: MA Experiment 20000069 PARAMETER Experiment Name: At_100uM_ABA_Mutants_cDNA_P Parameter: Timepoint (hr) Value: 6
  misc_feature: MA Experiment 20000069 PARAMETER Experiment Name: At_100uM_ABA_Mutants_cDNA_P Parameter: Tissue Value: Aerial
  misc_feature: MA Experiment 20000069 PARAMETER Experiment Name: At_100uM_ABA_Mutants_cDNA_P Parameter: Treatment Value: 100uM ABA vs. No Treatment
  misc_feature: MA Experiment ID: 20000070 Result: Up-regulated in Transcription
  misc_feature: MA Experiment 20000070 PARAMETER Experiment Name: At_100uM_ABA_Mutants_cDNA_P Parameter: Plant Line Value: CS24
  misc_feature: MA Experiment 20000070 PARAMETER Experiment Name: At_100uM_ABA_Mutants_cDNA_P Parameter: Timepoint (hr) Value: 6
  misc_feature: MA Experiment 20000070 PARAMETER Experiment Name: At_100uM_ABA_Mutants_cDNA_P Parameter: Tissue Value: Aerial
  misc_feature: MA Experiment 20000070 PARAMETER Experiment Name: At_100uM_ABA_Mutants_cDNA_P Parameter: Treatment Value: 100uM ABA vs. No Treatment
  misc_feature: MA Experiment ID: 20000086 Result: Up-regulated in Transcription
  misc_feature: MA Experiment 20000086 PARAMETER Experiment Name: At_100uM_ABA_Mutants_cDNA_P Parameter: Plant Line Value: CS22
  misc_feature: MA Experiment 20000086 PARAMETER Experiment Name: At_100uM_ABA_Mutants_cDNA_P Parameter: Timepoint (hr) Value: 6
  misc_feature: MA Experiment 20000086 PARAMETER Experiment Name: At_100uM_ABA_Mutants_cDNA_P Parameter: Tissue Value: Aerial
  misc_feature: MA Experiment 20000086 PARAMETER Experiment Name: At_100uM_ABA_Mutants_cDNA_P Parameter: Treatment Value: 100uM ABA vs. No Treatment
  misc_feature: MA Experiment ID: 20000093 Result: Up-regulated in Transcription
  misc_feature: MA Experiment 20000093 PARAMETER Experiment Name: At_42deg_Heat_cDNA_P Parameter: Temperature (deg C) Value: 42 vs. 22
  misc_feature: MA Experiment 20000093 PARAMETER Experiment Name: At_42deg_Heat_cDNA_P Parameter: Timepoint (hr) Value: 0.5
  misc_feature: MA Experiment 20000093 PARAMETER Experiment Name: At_42deg_Heat_cDNA_P Parameter: Tissue Value: Aerial
  misc_feature: MA Experiment ID: 20000113 Result: Up-regulated in Transcription
  misc_feature: MA Experiment 20000113 PARAMETER Experiment Name: At_42deg_Heat_cDNA_P Parameter: Temperature (deg C) Value: 42 vs. 22
  misc_feature: MA Experiment 20000113 PARAMETER Experiment Name: At_42deg_Heat_cDNA_P Parameter: Timepoint (hr) Value: 8
  misc_feature: MA Experiment 20000113 PARAMETER Experiment Name: At_42deg_Heat_cDNA_P Parameter: Tissue Value: Aerial
  misc_feature: MA Experiment ID: 20000166 Result: Up-regulated in Transcription
  misc_feature: MA Experiment 20000166 PARAMETER Experiment Name: At_100uM_ABA_P Parameter: Age (day) Value: 14
  misc_feature: MA Experiment 20000166 PARAMETER Experiment Name: At_100uM_ABA_P Parameter: Organism Value: A. thaliana
  misc_feature: MA Experiment 20000166 PARAMETER Experiment Name: At_100uM_ABA_P Parameter: Plant Line Value: WS
  misc_feature: MA Experiment 20000166 PARAMETER Experiment Name: At_100uM_ABA_P Parameter: Timepoint (hr) Value: 1
  misc_feature: MA Experiment 20000166 PARAMETER Experiment Name: At_100uM_ABA_P Parameter: Tissue Value: Aerial
  misc_feature: MA Experiment 20000166 PARAMETER Experiment Name: At_100uM_ABA_P Parameter: Treatment Value: 100uM ABA vs. No Treatment
  misc_feature: MA Experiment ID: 20000184 Result: Down-regulated in Transcription
  misc_feature: MA Experiment 20000184 PARAMETER Experiment Name: At_Shoots__P Parameter: Age (day) Value: 7
  misc_feature: MA Experiment 20000184 PARAMETER Experiment Name: At_Shoots__P Parameter: Tissue Value: Shoots vs. Whole Plant
  misc_feature: MA Experiment ID: 20000234 Result: Down-regulated in Transcription
  misc_feature: MA Experiment 20000234 PARAMETER Experiment Name: At_Siliques_P Parameter: Age (day) Value: 21
  misc_feature: MA Experiment 20000234 PARAMETER Experiment Name: At_Siliques_P Parameter: Organism Value: A. thaliana
  misc_feature: MA Experiment 20000234 PARAMETER Experiment Name: At_Siliques_P Parameter: Plant Line Value: WS
  misc_feature: MA Experiment 20000234 PARAMETER Experiment Name: At_Siliques_P Parameter: Tissue Value: Less Than 5mm Siliques vs. Whole Plant
  misc_feature: MA Experiment ID: 20000235 Result: Down-regulated in Transcription
  misc_feature: MA Experiment 20000235 PARAMETER Experiment Name: At_Siliques_P Parameter: Age (day) Value: 21
  misc_feature: MA Experiment 20000235 PARAMETER Experiment Name: At_Siliques_P Parameter: Organism Value: A. thaliana
  misc_feature: MA Experiment 20000235 PARAMETER Experiment Name: At_Siliques_P Parameter: Plant Line Value: WS
  misc_feature: MA Experiment 20000235 PARAMETER Experiment Name: At_Siliques_P Parameter: Tissue Value: 5-10mm Siliques vs. Whole Plant
  misc_feature: MA Experiment ID: 20000264 Result: Down-regulated in Transcription
  misc_feature: MA Experiment 20000264 PARAMETER Experiment Name: At_Open_Flower_P Parameter: Age (day) Value: 21
  misc_feature: MA Experiment 20000264 PARAMETER Experiment Name: At_Open_Flower_P Parameter: Plant Line Value: WS
  misc_feature: MA Experiment 20000264 PARAMETER Experiment Name: At_Open_Flower_P Parameter: Tissue Value: Open Flower vs. Whole Plant
  misc_feature: MA Experiment ID: 20000265 Result: Down-regulated in Transcription
  misc_feature: MA Experiment 20000265 PARAMETER Experiment Name: At_Open_Flower_P Parameter: Age (day) Value: 21
  misc_feature: MA Experiment 20000265 PARAMETER Experiment Name: At_Open_Flower_P Parameter: Plant Line Value: WS
  misc_feature: MA Experiment 20000265 PARAMETER Experiment Name: At_Open_Flower_P Parameter: Tissue Value: Closed Flower vs. Whole Plant
  misc_feature: MA Experiment ID: 20000286 Result: Down-regulated in Transcription
  misc_feature: MA Experiment 20000286 PARAMETER Experiment Name: At_Open_Flower_P Parameter: Age (day) Value: 21
  misc_feature: MA Experiment 20000286 PARAMETER Experiment Name: At_Open_Flower_P Parameter: Plant Line Value: WS
  misc_feature: MA Experiment 20000286 PARAMETER Experiment Name: At_Open_Flower_P Parameter: Tissue Value: Half Open vs. Whole Plant
  misc_feature: MA Experiment ID: 20000436 Result: Up-regulated in Transcription
  misc_feature: MA Experiment 20000436 PARAMETER Experiment Name: At_Drought_P Parameter: Age (day) Value: 7
  misc_feature: MA Experiment 20000436 PARAMETER Experiment Name: At_Drought_P Parameter: Organism Value: A. thaliana
  misc_feature: MA Experiment 20000436 PARAMETER Experiment Name: At_Drought_P Parameter: Plant Line Value: WS
  misc_feature: MA Experiment 20000436 PARAMETER Experiment Name: At_Drought_P Parameter: Timepoint (hr) Value: 12
  misc_feature: MA Experiment 20000436 PARAMETER Experiment Name: At_Drought_P Parameter: Tissue Value: Whole Plant
  misc_feature: MA Experiment 20000436 PARAMETER Experiment Name: At_Drought_P Parameter: Treatment Value: Drought vs. No Drought
  misc_feature: MA Experiment ID: 20000437 Result: Up-regulated in Transcription
  misc_feature: MA Experiment 20000437 PARAMETER Experiment Name: At_Drought_P Parameter: Age (day) Value: 8
  misc_feature: MA Experiment 20000437 PARAMETER Experiment Name: At_Drought_P Parameter: Organism Value: A. thaliana
  misc_feature: MA Experiment 20000437 PARAMETER Experiment Name: At_Drought_P Parameter: Plant Line Value: WS
  misc_feature: MA Experiment 20000437 PARAMETER Experiment Name: At_Drought_P Parameter: Timepoint (hr) Value: 24
  misc_feature: MA Experiment 20000437 PARAMETER Experiment Name: At_Drought_P Parameter: Tissue Value: Whole Plant
  misc_feature: MA Experiment 20000437 PARAMETER Experiment Name: At_Drought_P Parameter: Treatment Value: Drought vs. No Drought
  misc_feature: MA Experiment ID: 20000438 Result: Down-regulated in Transcription
  misc_feature: MA Experiment 20000438 PARAMETER Experiment Name: At_Shoots__P Parameter: Age (day) Value: 14
  misc_feature: MA Experiment 20000438 PARAMETER Experiment Name: At_Shoots__P Parameter: Tissue Value: Shoots vs. Whole Plant
  misc_feature: MA Experiment ID: 20001248 Result: Up-regulated in Transcription
  misc_feature: MA Experiment 20001248 PARAMETER Experiment Name: At_Far-red-induction_P Parameter: Age (day) Value: 7
  misc_feature: MA Experiment 20001248 PARAMETER Experiment Name: At_Far-red-induction_P Parameter: Light Value: Far-red vs. White
  misc_feature: MA Experiment 20001248 PARAMETER Experiment Name: At_Far-red-induction_P Parameter: Organism Value: A. thaliana
  misc_feature: MA Experiment 20001248 PARAMETER Experiment Name: At_Far-red-induction_P Parameter: Plant Line Value: Columbia
  misc_feature: MA Experiment 20001248 PARAMETER Experiment Name: At_Far-red-induction_P Parameter: Timepoint (hr) Value: 4
  misc_feature: MA Experiment 20001248 PARAMETER Experiment Name: At_Far-red-induction_P Parameter: Tissue Value: Whole Plant
  misc_feature: MA Experiment ID: 20001450 Result: Up-regulated in Transcription
  misc_feature: MA Experiment 20001450 PARAMETER Experiment Name: At_Far-red-induction_P Parameter: Age (day) Value: 7
  misc_feature: MA Experiment 20001450 PARAMETER Experiment Name: At_Far-red-induction_P Parameter: Light Value: Far-red vs. White
  misc_feature: MA Experiment 20001450 PARAMETER Experiment Name: At_Far-red-induction_P Parameter: Organism Value: A. thaliana
  misc_feature: MA Experiment 20001450 PARAMETER Experiment Name: At_Far-red-induction_P Parameter: Plant Line Value: Columbia
  misc_feature: MA Experiment 20001450 PARAMETER Experiment Name: At_Far-red-induction_P Parameter: Timepoint (hr) Value: 8
  misc_feature: MA Experiment 20001450 PARAMETER Experiment Name: At_Far-red-induction_P Parameter: Tissue Value: Whole Plant
  misc_feature: MA Experiment ID: 20001451 Result: Up-regulated in Transcription
  misc_feature: MA Experiment 20001451 PARAMETER Experiment Name: At_Far-red-induction_P Parameter: Age (day) Value: 7
  misc_feature: MA Experiment 20001451 PARAMETER Experiment Name: At_Far-red-induction_P Parameter: Light Value: Far-red vs. White
  misc_feature: MA Experiment 20001451 PARAMETER Experiment Name: At_Far-red-induction_P Parameter: Organism Value: A. thaliana
  misc_feature: MA Experiment 20001451 PARAMETER Experiment Name: At_Far-red-induction_P Parameter: Plant Line Value: Columbia
  misc_feature: MA Experiment 20001451 PARAMETER Experiment Name: At_Far-red-induction_P Parameter: Timepoint (hr) Value: 24
  misc_feature: MA Experiment 20001451 PARAMETER Experiment Name: At_Far-red-induction_P Parameter: Tissue Value: Whole Plant
  misc_feature: MA Experiment ID: 20001757 Result: Down-regulated in Transcription
  misc_feature: MA Experiment 20001757 PARAMETER Experiment Name: At_50mM_NH4NO3_L-to-H_P Parameter: Timepoint (hr) Value: 6
  misc_feature: MA Experiment 20001757 PARAMETER Experiment Name: At_50mM_NH4NO3_L-to-H_P Parameter: Tissue Value: Leaf
  misc_feature: MA Experiment 20001757 PARAMETER Experiment Name: At_50mM_NH4NO3_L-to-H_P Parameter: Treatment Value: 50mM NH4NO3 vs 100mM Mannitol
accgaactctggttctagagagagaaaccattctctccgactaagagagagaagcgaatttgtttttttttcttttgtgggttcaattcgaattgttttccctgagactcaagttactgtgtcattactctgcattgagcaatgggtagcaacgaagaaggaaaccccactaacaactctgataagccatcgcaagctgctgctcctgagcagagtaatgttcatgtgtatcatcatgactgggctgctatgcaggcatattatgggcctagagttggtatacctcaatattacaactcaaatttggcgcctggtcatgctccaccgccttatatgtgggcgtctccatcgccaatgatggctccttatggagcaccatatccaccattttgccctcctggtggagtttatgctcatcctggtgttcaaatgggctcacaaccacaaggtcctgtttctcaatcagcatctggagttacaacccctttgaccattgatgcaccagctaattcagctggaaactcagatcatgggttcatgaaaaagctgaaagagttcgatggacttgcaatgtcaataagcaataacaaagttgggagtgctgaacatagcagcagtgaacataggagttctcagagctccgagaatgatggctctagcaatggtagtgatggtaatacaactgggggagaacaatctaggaggaaaagaaggcaacaaagatcaccaagcactggtgaaagaccctcatctcaaaacagtctgcctcttagaggtgaaaatgagaaacccgatgtgactatggggactcctgttatgcccacagcaatgagtttccaaaactctgctggcatgaacggtgtgccacagccatggaatgaaaaagaggttaaacgagagaagagaaaacagtcaaaccgagaatctgctaggaggtcaagactgaggaagcaggctgaaacagaacaactatctgtcaaagttgacgcattagtagctgagaacatgtctctgaggtctaaactaggccagctaaacaatgagtctgagaaactacggctggagaacgaagctatattggatcaactgaaagcgcaagcaacagggaaaacagagaacctgatctctcgagttgataagaacaactctgtatcaggtagcaaaactgtgcagcatcaactgttaaatgcaagtccgataaccgatcctgtcgcggctagctgaccgtggccgcaacaatgagaacccgatatttcttcctttgggttgtgattgtaacttaaaaggagactttttgtttttattcttagatttgtagctctctgcatagtgagcagaaattgatgtaatatggtttaagagattcggtgttctctggtgtgtgctgcaaccacataattggtgatagataggtttagttatataagcaaatgtattagagataaggggagacatatttgatggtctttcgtttcgtaaacacacttttcttatgtgatatataaaagaagatttatcacattagtcttcaaaatcgacgtgcttcccttaaccac

SEQ ID NO: 30076 - protein, 360 aa, Arabidopsis thaliana
  peptide (1)..(360): Ceres Seq. ID no. 12334252
  misc_feature (247)..(311): Pfam Name: bZIP transcription factor Pfam Description: bZIP transcription factor
  misc_feature (1)..(341): Homolog of NCBI NO: 600863 NR Description: G-box binding factor
  misc_feature (1)..(359): Homolog of NCBI NO: 30690290 NR Description: G-box binding bZIP transcription factor
  misc_feature (1)..(359): Homolog of NCBI NO: 15225953 NR Description: G-box binding bZIP transcription factor
  misc_feature (1)..(217): Homolog of NCBI NO: 7484967 NR Description: G box-binding factor 2 - Arabidopsis thaliana
  misc_feature (13)..(360): Homolog of NCBI NO: 7488605 NR Description: G-Box binding protein - radish (fragment)
  misc_feature (1)..(350): Homolog of NCBI NO: 7488454 NR Description: G-box binding factor 2A - rape
  misc_feature (1)..(360): Homolog of NCBI NO: 7488609 NR Description: G-box binding protein 2A - white mustard
  misc_feature (70)..(360): Homolog of NCBI NO: 7484967 NR Description: G box-binding factor 2 - Arabidopsis thaliana
  misc_feature (1)..(360): Homolog of NCBI NO: 21553776 NR Description: GBF2, G-box binding factor [Arabidopsis thaliana]
  misc_feature (1)..(360): Homolog of NCBI NO: 15234069 NR Description: G-box binding factor(bZIP protein), putative
MGSNEEGNPTNNSDKPSQAAAPEQSNVHVYHHDWAAMQAYYGPRVGIPQYYNSNLAPGHAPPPYMWASPSPMMAPYGAPYPPFCPPGGVYAHPGVQMGSQPQGPVSQSASGVTTPLTIDAPANSAGNSDHGFMKKLKEFDGLAMSISNNKVGSAEHSSSEHRSSQSSENDGSSNGSDGNTTGGEQSRRKRRQQRSPSTGERPSSQNSLPLRGENEKPDVTMGTPVMPTAMSFQNSAGMNGVPQPWNEKEVKREKRKQSNRESARRSRLRKQAETEQLSVKVDALVAENMSLRSKLGQLNNESEKLRLENEAILDQLKAQATGKTENLISRVDKNNSVSGSKTVQHQLLNASPITDPVAAS

SEQ ID NO: 30077 - protein, 324 aa, Arabidopsis thaliana
  peptide (1)..(324): Ceres Seq. ID no. 12334253
  misc_feature (211)..(275): Pfam Name: bZIP transcription factor Pfam Description: bZIP transcription factor
  misc_feature (1)..(305): Homolog of NCBI NO: 600863 NR Description: G-box binding factor
  misc_feature (1)..(323): Homolog of NCBI NO: 30690290 NR Description: G-box binding bZIP transcription factor
  misc_feature (1)..(323): Homolog of NCBI NO: 15225953 NR Description: G-box binding bZIP transcription factor
  misc_feature (1)..(181): Homolog of NCBI NO: 7484967 NR Description: G box-binding factor 2 - Arabidopsis thaliana
  misc_feature (1)..(324): Homolog of NCBI NO: 7488605 NR Description: G-Box binding protein - radish (fragment)
  misc_feature (1)..(314): Homolog of NCBI NO: 7488454 NR Description: G-box binding factor 2A - rape
  misc_feature (1)..(324): Homolog of NCBI NO: 7488609 NR Description: G-box binding protein 2A - white mustard
  misc_feature (34)..(324): Homolog of NCBI NO: 7484967 NR Description: G box-binding factor 2 - Arabidopsis thaliana
  misc_feature (1)..(324): Homolog of NCBI NO: 21553776 NR Description: GBF2, G-box binding factor [Arabidopsis thaliana]
  misc_feature (1)..(324): Homolog of NCBI NO: 15234069 NR Description: G-box binding factor(bZIP protein), putative
MQAYYGPRVGIPQYYNSNLAPGHAPPPYMWASPSPMMAPYGAPYPPFCPPGGVYAHPGVQMGSQPQGPVSQSASGVTTPLTIDAPANSAGNSDHGFMKKLKEFDGLAMSISNNKVGSAEHSSSEHRSSQSSENDGSSNGSDGNTTGGEQSRRKRRQQRSPSTGERPSSQNSLPLRGENEKPDVTMGTPVMPTAMSFQNSAGMNGVPQPWNEKEVKREKRKQSNRESARRSRLRKQAETEQLSVKVDALVAENMSLRSKLGQLNNESEKLRLENEAILDQLKAQATGKTENLISRVDKNNSVSGSKTVQHQLLNASPITDPVAAS

SEQ ID NO: 30078 - protein, 296 aa, Arabidopsis thaliana
  peptide (1)..(296): Ceres Seq. ID no. 12334254
  misc_feature (183)..(247): Pfam Name: bZIP transcription factor Pfam Description: bZIP transcription factor
  misc_feature (1)..(277): Homolog of NCBI NO: 600863 NR Description: G-box binding factor
  misc_feature (1)..(295): Homolog of NCBI NO: 30690290 NR Description: G-box binding bZIP transcription factor
  misc_feature (1)..(295): Homolog of NCBI NO: 15225953 NR Description: G-box binding bZIP transcription factor
  misc_feature (1)..(153): Homolog of NCBI NO: 7484967 NR Description: G box-binding factor 2 - Arabidopsis thaliana
  misc_feature (1)..(296): Homolog of NCBI NO: 7488605 NR Description: G-Box binding protein - radish (fragment)
  misc_feature (1)..(286): Homolog of NCBI NO: 7488454 NR Description: G-box binding factor 2A - rape
  misc_feature (1)..(296): Homolog of NCBI NO: 7488609 NR Description: G-box binding protein 2A - white mustard
  misc_feature (6)..(296): Homolog of NCBI NO: 7484967 NR Description: G box-binding factor 2 - Arabidopsis thaliana
  misc_feature (1)..(296): Homolog of NCBI NO: 21553776 NR Description: GBF2, G-box binding factor [Arabidopsis thaliana]
  misc_feature (1)..(296): Homolog of NCBI NO: 15234069 NR Description: G-box binding factor(bZIP protein), putative
MWASPSPMMAPYGAPYPPFCPPGGVYAHPGVQMGSQPQGPVSQSASGVTTPLTIDAPANSAGNSDHGFMKKLKEFDGLAMSISNNKVGSAEHSSSEHRSSQSSENDGSSNGSDGNTTGGEQSRRKRRQQRSPSTGERPSSQNSLPLRGENEKPDVTMGTPVMPTAMSFQNSAGMNGVPQPWNEKEVKREKRKQSNRESARRSRLRKQAETEQLSVKVDALVAENMSLRSKLGQLNNESEKLRLENEAILDQLKAQATGKTENLISRVDKNNSVSGSKTVQHQLLNASPITDPVAAS

SEQ ID NO: 30079 - DNA, 465 bp, Arabidopsis thaliana
  misc_feature (1)..(465): Ceres Seq. ID no. 12558719
  misc_feature: MA Experiment ID: 108434 Result: Up-regulated in Transcription
  misc_feature: MA Experiment 108434 PARAMETER Experiment Name: At_Root_Tips_cDNA_P Parameter: Tissue Value: Root Tips
  misc_feature: MA Experiment ID: 108463 Result: Down-regulated in Transcription
  misc_feature: MA Experiment 108463 PARAMETER Experiment Name: At_Germinating_Seeds_cDNA_P Parameter: Age (day) Value: 3 vs. 0
  misc_feature: MA Experiment 108463 PARAMETER Experiment Name: At_Germinating_Seeds_cDNA_P Parameter: Tissue Value: Germinating Seeds
  misc_feature: MA Experiment ID: 108561 Result: Down-regulated in Transcription
  misc_feature: MA Experiment 108561 PARAMETER Experiment Name: At_100uM_ABA_cDNA_P Parameter: Timepoint (hr) Value: 6
  misc_feature: MA Experiment 108561 PARAMETER Experiment Name: At_100uM_ABA_cDNA_P Parameter: Tissue Value: Aerial
  misc_feature: MA Experiment 108561 PARAMETER Experiment Name: At_100uM_ABA_cDNA_P Parameter: Treatment Value: 100uM ABA vs. No Treatment
  misc_feature: MA Experiment ID: 108573 Result: Down-regulated in Transcription
  misc_feature: MA Experiment 108573 PARAMETER Experiment Name: At_Drought_cDNA_P Parameter: Timepoint (hr) Value: 6
  misc_feature: MA Experiment 108573 PARAMETER Experiment Name: At_Drought_cDNA_P Parameter: Tissue Value: Aerial
  misc_feature: MA Experiment 108573 PARAMETER Experiment Name: At_Drought_cDNA_P Parameter: Treatment Value: Drought vs. No Drought
  misc_feature: MA Experiment ID: 20000071 Result: Down-regulated in Transcription
  misc_feature: MA Experiment 20000071 PARAMETER Experiment Name: At_100uM_ABA_Mutants_cDNA_P Parameter: Plant Line Value: CS8104
  misc_feature: MA Experiment 20000071 PARAMETER Experiment Name: At_100uM_ABA_Mutants_cDNA_P Parameter: Timepoint (hr) Value: 6
  misc_feature: MA Experiment 20000071 PARAMETER Experiment Name: At_100uM_ABA_Mutants_cDNA_P Parameter: Tissue Value: Aerial
  misc_feature: MA Experiment 20000071 PARAMETER Experiment Name: At_100uM_ABA_Mutants_cDNA_P Parameter: Treatment Value: 100uM ABA vs. No Treatment
  misc_feature: MA Experiment ID: 20000117 Result: Down-regulated in Transcription
  misc_feature: MA Experiment 20000117 PARAMETER Experiment Name: At_100uM_ABA_Mutants_cDNA_P Parameter: Plant Line Value: Columbia
  misc_feature: MA Experiment 20000117 PARAMETER Experiment Name: At_100uM_ABA_Mutants_cDNA_P Parameter: Timepoint (hr) Value: 6
  misc_feature: MA Experiment 20000117 PARAMETER Experiment Name: At_100uM_ABA_Mutants_cDNA_P Parameter: Tissue Value: Aerial
  misc_feature: MA Experiment 20000117 PARAMETER Experiment Name: At_100uM_ABA_Mutants_cDNA_P Parameter: Treatment Value: 100uM ABA vs. No Treatment
  misc_feature: MA Experiment ID: 20000184 Result: Up-regulated in Transcription
  misc_feature: MA Experiment 20000184 PARAMETER Experiment Name: At_Shoots__P Parameter: Age (day) Value: 7
  misc_feature: MA Experiment 20000184 PARAMETER Experiment Name: At_Shoots__P Parameter: Tissue Value: Shoots vs. Whole Plant
  misc_feature: MA Experiment ID: 20000227 Result: Up-regulated in Transcription
  misc_feature: MA Experiment 20000227 PARAMETER Experiment Name: At_Root-Tips-vs-Tops_P Parameter: Tissue Value: Root Tips vs. Root Tops
  misc_feature: MA Experiment ID: 20000234 Result: Up-regulated in Transcription
  misc_feature: MA Experiment 20000234 PARAMETER Experiment Name: At_Siliques_P Parameter: Age (day) Value: 21
  misc_feature: MA Experiment 20000234 PARAMETER Experiment Name: At_Siliques_P Parameter: Organism Value: A. thaliana
  misc_feature: MA Experiment 20000234 PARAMETER Experiment Name: At_Siliques_P Parameter: Plant Line Value: WS
  misc_feature: MA Experiment 20000234 PARAMETER Experiment Name: At_Siliques_P Parameter: Tissue Value: Less Than 5mm Siliques vs. Whole Plant
  misc_feature: MA Experiment ID: 20000235 Result: Up-regulated in Transcription
  misc_feature: MA Experiment 20000235 PARAMETER Experiment Name: At_Siliques_P Parameter: Age (day) Value: 21
  misc_feature: MA Experiment 20000235 PARAMETER Experiment Name: At_Siliques_P Parameter: Organism Value: A. thaliana
  misc_feature: MA Experiment 20000235 PARAMETER Experiment Name: At_Siliques_P Parameter: Plant Line Value: WS
  misc_feature: MA Experiment 20000235 PARAMETER Experiment Name: At_Siliques_P Parameter: Tissue Value: 5-10mm Siliques vs. Whole Plant
  misc_feature: MA Experiment ID: 20000264 Result: Up-regulated in Transcription
  misc_feature: MA Experiment 20000264 PARAMETER Experiment Name: At_Open_Flower_P Parameter: Age (day) Value: 21
  misc_feature: MA Experiment 20000264 PARAMETER Experiment Name: At_Open_Flower_P Parameter: Plant Line Value: WS
  misc_feature: MA Experiment 20000264 PARAMETER Experiment Name: At_Open_Flower_P Parameter: Tissue Value: Open Flower vs. Whole Plant
  misc_feature: MA Experiment ID: 20000437 Result: Down-regulated in Transcription
  misc_feature: MA Experiment 20000437 PARAMETER Experiment Name: At_Drought_P Parameter: Age (day) Value: 8
  misc_feature: MA Experiment 20000437 PARAMETER Experiment Name: At_Drought_P Parameter: Organism Value: A. thaliana
  misc_feature: MA Experiment 20000437 PARAMETER Experiment Name: At_Drought_P Parameter: Plant Line Value: WS
  misc_feature: MA Experiment 20000437 PARAMETER Experiment Name: At_Drought_P Parameter: Timepoint (hr) Value: 24
  misc_feature: MA Experiment 20000437 PARAMETER Experiment Name: At_Drought_P Parameter: Tissue Value: Whole Plant
  misc_feature: MA Experiment 20000437 PARAMETER Experiment Name: At_Drought_P Parameter: Treatment Value: Drought vs. No Drought
  misc_feature: MA Experiment ID: 20000794 Result: Down-regulated in Transcription
  misc_feature: MA Experiment 20000794 PARAMETER Experiment Name: At_Petals_P Parameter: Age (day) Value: 23-25 days
  misc_feature: MA Experiment 20000794 PARAMETER Experiment Name: At_Petals_P Parameter: Plant Line Value: WS
  misc_feature: MA Experiment 20000794 PARAMETER Experiment Name: At_Petals_P Parameter: Tissue Value: Petals vs. Whole plant
  misc_feature: MA Experiment ID: 20001557 Result: Up-regulated in Transcription
  misc_feature: MA Experiment 20001557 PARAMETER Experiment Name: At_Drought_Soil_Dry_P Parameter: Age (day) Value: 27
  misc_feature: MA Experiment 20001557 PARAMETER Experiment Name: At_Drought_Soil_Dry_P Parameter: Organism Value: A. thaliana
  misc_feature: MA Experiment 20001557 PARAMETER Experiment Name: At_Drought_Soil_Dry_P Parameter: Plant Line Value: WS
  misc_feature: MA Experiment 20001557 PARAMETER Experiment Name: At_Drought_Soil_Dry_P Parameter: Post Timepoint (hr) Value: 3
  misc_feature: MA Experiment 20001557 PARAMETER Experiment Name: At_Drought_Soil_Dry_P Parameter: Post-Treatment Value: Re-Water vs. No Drought
  misc_feature: MA Experiment 20001557 PARAMETER Experiment Name: At_Drought_Soil_Dry_P Parameter: Timepoint (day) Value: 13
  misc_feature: MA Experiment 20001557 PARAMETER Experiment Name: At_Drought_Soil_Dry_P Parameter: Treatment Value: Drought vs. No Drought
  misc_feature: MA Experiment ID: 20001558 Result: Up-regulated in Transcription
  misc_feature: MA Experiment 20001558 PARAMETER Experiment Name: At_Drought_Soil_Dry_P Parameter: Age (day) Value: 27
  misc_feature: MA Experiment 20001558 PARAMETER Experiment Name: At_Drought_Soil_Dry_P Parameter: Organism Value: A. thaliana
  misc_feature: MA Experiment 20001558 PARAMETER Experiment Name: At_Drought_Soil_Dry_P Parameter: Plant Line Value: WS
  misc_feature: MA Experiment 20001558 PARAMETER Experiment Name: At_Drought_Soil_Dry_P Parameter: Post Timepoint (hr) Value: 6
  misc_feature: MA Experiment 20001558 PARAMETER Experiment Name: At_Drought_Soil_Dry_P Parameter: Post-Treatment Value: Re-Water vs. No Drought
  misc_feature: MA Experiment 20001558 PARAMETER Experiment Name: At_Drought_Soil_Dry_P Parameter: Timepoint (day) Value: 13
  misc_feature: MA Experiment 20001558 PARAMETER Experiment Name: At_Drought_Soil_Dry_P Parameter: Treatment Value: Drought vs. No Drought
  misc_feature: MA Experiment ID: 20001560 Result: Up-regulated in Transcription
  misc_feature: MA Experiment 20001560 PARAMETER Experiment Name: At_Drought_Soil_Dry_P Parameter: Age (day) Value: 28
  misc_feature: MA Experiment 20001560 PARAMETER Experiment Name: At_Drought_Soil_Dry_P Parameter: Organism Value: A. thaliana
  misc_feature: MA Experiment 20001560 PARAMETER Experiment Name: At_Drought_Soil_Dry_P Parameter: Plant Line Value: WS
  misc_feature: MA Experiment 20001560 PARAMETER Experiment Name: At_Drought_Soil_Dry_P Parameter: Post Timepoint (hr) Value: None
  misc_feature: MA Experiment 20001560 PARAMETER Experiment Name: At_Drought_Soil_Dry_P Parameter: Post-Treatment Value: None
  misc_feature: MA Experiment 20001560 PARAMETER Experiment Name: At_Drought_Soil_Dry_P Parameter: Timepoint (day) Value: 14
  misc_feature: MA Experiment 20001560 PARAMETER Experiment Name: At_Drought_Soil_Dry_P Parameter: Treatment Value: Drought vs. No Drought
  misc_feature: MA Experiment ID: 20001757 Result: Up-regulated in Transcription
  misc_feature: MA Experiment 20001757 PARAMETER Experiment Name: At_50mM_NH4NO3_L-to-H_P Parameter: Timepoint (hr) Value: 6
  misc_feature: MA Experiment 20001757 PARAMETER Experiment Name: At_50mM_NH4NO3_L-to-H_P Parameter: Tissue Value: Leaf
  misc_feature: MA Experiment 20001757 PARAMETER Experiment Name: At_50mM_NH4NO3_L-to-H_P Parameter: Treatment Value: 50mM NH4NO3 vs 100mM Mannitol
gctcattagggtttctcatctacgacggcgtggtgttcctccttcctgctctgaaaaatggcgaagagaacgaagaaggttggaatcgtcggcaaatacggaacacgttatggtgcgagtatcaggaagcagattaagaagatggaggtcagccagcacagcaagtacttctgtgagttctgtggcaagtacggagtgaagcgaaaggctgttggtatctggggttgcaaggattgtggcaaggtcaaggcaggtggtgcttacacaatgaacaccgccagtgcggtcactgttagaagcacgatcagaaggttgagggagcagatcgagggttaaaagtctgctggctttttatatttggtttccttgttttgacaatttaagttttgcaaactctatgcttgtgattttgaatcaagacttatacattgagcagtttaagcaggtttttattttttgttgagt

SEQ ID NO: 30080 - protein, 92 aa, Arabidopsis thaliana [sequence omitted]

SEQ ID NO: 30081 - protein, 65 aa, Arabidopsis thaliana
  peptide (1)..(65): Ceres Seq. ID no. 12558721
LIRVSHLRRRGVPPSCSEKWRRERRRLESSANTEHVMVRVSGSRLRRWRSASTASTSVSSVASTE

SEQ ID NO: 30082 - protein, 64 aa, Arabidopsis thaliana
  peptide (1)..(64): Ceres Seq. ID no. 12558722
  misc_feature (1)..(61): Homolog of NCBI NO: 33637090 NR Description: N1 [Toxoplasma gondii]
  misc_feature (1)..(60): Homolog of NCBI NO: 7441206 NR Description: ribosomal protein L37a
  misc_feature (1)..(63): Homolog of NCBI NO: 6093889 NR Description: 60S RIBOSOMAL PROTEIN L37A
  misc_feature (1)..(64): Homolog of NCBI NO: 11358898 NR Description: translation initiation factor eIF-4 gamma homolog
  misc_feature (1)..(63): Homolog of NCBI NO: 15228411 NR Description: putative 60S ribosomal protein L37a; protein id:
  misc_feature (1)..(63): Homolog of NCBI NO: 6831602 NR Description: 60S RIBOSOMAL PROTEIN L37A
  misc_feature (1)..(64): Homolog of NCBI NO: 6831607 NR Description: 60S ribosomal protein L37a
  misc_feature (1)..(63): Homolog of NCBI NO: 34911166 NR Description: putative 60S ribosomal protein L37a
  misc_feature (1)..(64): Homolog of NCBI NO: 1173045 NR Description: 60S RIBOSOMAL PROTEIN L37A
  misc_feature (1)..(64): Homolog of NCBI NO: 18411538 NR Description: Expressed protein
  misc_feature (1)..(61): Homolog of NCBI NO: 33637090 NR Description: N1 [Toxoplasma gondii]
  misc_feature (1)..(60): Homolog of NCBI NO: 7441206 NR Description: ribosomal protein L37a
  misc_feature (1)..(63): Homolog of NCBI NO: 6093889 NR Description: 60S RIBOSOMAL PROTEIN L37A
  misc_feature (1)..(64): Homolog of NCBI NO: 11358898 NR Description: translation initiation factor eIF-4 gamma homolog
  misc_feature (1)..(63): Homolog of NCBI NO: 15228411 NR Description: putative 60S ribosomal protein L37a; protein id:
  misc_feature (1)..(63): Homolog of NCBI NO: 6831602 NR Description: 60S RIBOSOMAL PROTEIN L37A
  misc_feature (1)..(64): Homolog of NCBI NO: 6831607 NR Description: 60S ribosomal protein L37a
  misc_feature (1)..(63): Homolog of NCBI NO: 34911166 NR Description: putative 60S ribosomal protein L37a
  misc_feature (1)..(64): Homolog of NCBI NO: 1173045 NR Description: 60S RIBOSOMAL PROTEIN L37A
  misc_feature (1)..(64): Homolog of NCBI NO: 18411538 NR Description: Expressed protein
MEVSQHSKYFCEFCGKYGVKRKAVGIWGCKDCGKVKAGGAYTMNTASAVTVRSTIRRLREQIEG

SEQ ID NO: 30083 - DNA, 1120 bp, Arabidopsis thaliana
  misc_feature (1)..(1120): Ceres Seq. ID no. 12335201
  misc_feature: MA Experiment ID: 108463 Result: Up-regulated in Transcription
  misc_feature: MA Experiment 108463 PARAMETER Experiment Name: At_Germinating_Seeds_cDNA_P Parameter: Age (day) Value: 3 vs. 0
  misc_feature: MA Experiment 108463 PARAMETER Experiment Name: At_Germinating_Seeds_cDNA_P Parameter: Tissue Value: Germinating Seeds
  misc_feature: MA Experiment ID: 108464 Result: Up-regulated in Transcription
  misc_feature: MA Experiment 108464 PARAMETER Experiment Name: At_Germinating_Seeds_cDNA_P Parameter: Age (day) Value: 4 vs. 0
  misc_feature: MA Experiment 108464 PARAMETER Experiment Name: At_Germinating_Seeds_cDNA_P Parameter: Tissue Value: Germinating Seeds
  misc_feature: MA Experiment ID: 108501 Result: Up-regulated in Transcription
  misc_feature: MA Experiment 108501 PARAMETER Experiment Name: At_ap2_floral_buds_cDNA_P Parameter: Plant Line Value: ap2 (Ler.)
  misc_feature: MA Experiment 108501 PARAMETER Experiment Name: At_ap2_floral_buds_cDNA_P Parameter: Tissue Value: Closed Flower
  misc_feature: MA Experiment ID: 108607 Result: Down-regulated in Transcription
  misc_feature: MA Experiment 108607 PARAMETER Experiment Name: At_100uM_ABA_cDNA_P Parameter: Timepoint (hr) Value: 4
  misc_feature: MA Experiment 108607 PARAMETER Experiment Name: At_100uM_ABA_cDNA_P Parameter: Tissue Value: Aerial
  misc_feature: MA Experiment 108607 PARAMETER Experiment Name: At_100uM_ABA_cDNA_P Parameter: Treatment Value: 100uM ABA vs. No Treatment
  misc_feature: MA Experiment ID: 108668 Result: Down-regulated in Transcription
  misc_feature: MA Experiment 108668 PARAMETER Experiment Name: At_2mM_SA_cDNA_P Parameter: Plant Line Value: WS
  misc_feature: MA Experiment 108668 PARAMETER Experiment Name: At_2mM_SA_cDNA_P Parameter: Timepoint (hr) Value: 6
  misc_feature: MA Experiment 108668 PARAMETER Experiment Name: At_2mM_SA_cDNA_P Parameter: Treatment Value: 2mM SA vs. No Treatment
  misc_feature: MA Experiment ID: 20000112 Result: Down-regulated in Transcription
  misc_feature: MA Experiment 20000112 PARAMETER Experiment Name: At_42deg_Heat_cDNA_P Parameter: Temperature (deg C) Value: 42 vs. 22
  misc_feature: MA Experiment 20000112 PARAMETER Experiment Name: At_42deg_Heat_cDNA_P Parameter: Timepoint (hr) Value: 2
  misc_feature: MA Experiment 20000112 PARAMETER Experiment Name: At_42deg_Heat_cDNA_P Parameter: Tissue Value: Aerial
  misc_feature: MA Experiment ID: 20000117 Result: Down-regulated in Transcription
  misc_feature: MA Experiment 20000117 PARAMETER Experiment Name: At_100uM_ABA_Mutants_cDNA_P Parameter: Plant Line Value: Columbia
  misc_feature: MA Experiment 20000117 PARAMETER Experiment Name: At_100uM_ABA_Mutants_cDNA_P Parameter: Timepoint (hr) Value: 6
  misc_feature: MA Experiment 20000117 PARAMETER Experiment Name: At_100uM_ABA_Mutants_cDNA_P Parameter: Tissue Value: Aerial
  misc_feature: MA Experiment 20000117 PARAMETER Experiment Name: At_100uM_ABA_Mutants_cDNA_P Parameter: Treatment Value: 100uM ABA vs. No Treatment
  misc_feature: MA Experiment ID: 20000144 Result: Down-regulated in Transcription
  misc_feature: MA Experiment 20000144 PARAMETER Experiment Name: At_42deg_Heat_cDNA_P Parameter: Temperature (deg C) Value: 42 vs. 22
  misc_feature: MA Experiment 20000144 PARAMETER Experiment Name: At_42deg_Heat_cDNA_P Parameter: Timepoint (hr) Value: 1
  misc_feature: MA Experiment 20000144 PARAMETER Experiment Name: At_42deg_Heat_cDNA_P Parameter: Tissue Value: Aerial
  misc_feature: MA Experiment ID: 20000171 Result: Down-regulated in Transcription
  misc_feature: MA Experiment 20000171 PARAMETER Experiment Name: At_42deg_Heat_P Parameter: Age (day) Value: 14
  misc_feature: MA Experiment 20000171 PARAMETER Experiment Name: At_42deg_Heat_P Parameter: Organism Value: A. thaliana
  misc_feature: MA Experiment 20000171 PARAMETER Experiment Name: At_42deg_Heat_P Parameter: Plant Line Value: WS
  misc_feature: MA Experiment 20000171 PARAMETER Experiment Name: At_42deg_Heat_P Parameter: Temperature (deg C) Value: 42 vs. 22
  misc_feature: MA Experiment 20000171 PARAMETER Experiment Name: At_42deg_Heat_P Parameter: Timepoint (hr) Value: 1
  misc_feature: MA Experiment 20000171 PARAMETER Experiment Name: At_42deg_Heat_P Parameter: Tissue Value: Aerial
  misc_feature: MA Experiment ID: 20000173 Result: Down-regulated in Transcription
  misc_feature: MA Experiment 20000173 PARAMETER Experiment Name: At_42deg_Heat_P Parameter: Age (day) Value: 14
  misc_feature: MA Experiment 20000173 PARAMETER Experiment Name: At_42deg_Heat_P Parameter: Organism Value: A. thaliana
  misc_feature: MA Experiment 20000173 PARAMETER Experiment Name: At_42deg_Heat_P Parameter: Plant Line Value: WS
  misc_feature: MA Experiment 20000173 PARAMETER Experiment Name: At_42deg_Heat_P Parameter: Temperature (deg C) Value: 42 vs. 22
  misc_feature: MA Experiment 20000173 PARAMETER Experiment Name: At_42deg_Heat_P Parameter: Timepoint (hr) Value: 6
  misc_feature: MA Experiment 20000173 PARAMETER Experiment Name: At_42deg_Heat_P Parameter: Tissue Value: Aerial
  misc_feature: MA Experiment ID: 20000182 Result: Down-regulated in Transcription
  misc_feature: MA Experiment 20000182 PARAMETER Experiment Name: At_2mM_SA_P Parameter: Age (day) Value: 14
  misc_feature: MA Experiment 20000182 PARAMETER Experiment Name: At_2mM_SA_P Parameter: Organism Value: A. thaliana
  misc_feature: MA Experiment 20000182 PARAMETER Experiment Name: At_2mM_SA_P Parameter: Plant Line Value: WS
  misc_feature: MA Experiment 20000182 PARAMETER Experiment Name: At_2mM_SA_P Parameter: Timepoint (hr) Value: 6
  misc_feature: MA Experiment 20000182 PARAMETER Experiment Name: At_2mM_SA_P Parameter: Tissue Value: Aerial
  misc_feature: MA Experiment 20000182 PARAMETER Experiment Name: At_2mM_SA_P Parameter: Treatment Value: 2mM SA vs. No Treatment
  misc_feature: MA Experiment ID: 20000184 Result: Up-regulated in Transcription
  misc_feature: MA Experiment 20000184 PARAMETER Experiment Name: At_Shoots__P Parameter: Age (day) Value: 7
  misc_feature: MA Experiment 20000184 PARAMETER Experiment Name: At_Shoots__P Parameter: Tissue Value: Shoots vs. Whole Plant
  misc_feature: MA Experiment ID: 20000224 Result: Down-regulated in Transcription
  misc_feature: MA Experiment ID: 20000264 Result: Down-regulated in Transcription
  misc_feature: MA Experiment 20000264 PARAMETER Experiment Name: At_Open_Flower_P Parameter: Age (day) Value: 21
  misc_feature: MA Experiment 20000264 PARAMETER Experiment Name: At_Open_Flower_P Parameter: Plant Line Value: WS
  misc_feature: MA Experiment 20000264 PARAMETER Experiment Name: At_Open_Flower_P Parameter: Tissue Value: Open Flower vs. Whole Plant
  misc_feature: MA Experiment ID: 20000265 Result: Down-regulated in Transcription
  misc_feature: MA Experiment 20000265 PARAMETER Experiment Name: At_Open_Flower_P Parameter: Age (day) Value: 21
  misc_feature: MA Experiment 20000265 PARAMETER Experiment Name: At_Open_Flower_P Parameter: Plant Line Value: WS
  misc_feature: MA Experiment 20000265 PARAMETER Experiment Name: At_Open_Flower_P Parameter: Tissue Value: Closed Flower vs. Whole Plant
  misc_feature: MA Experiment ID: 20000286 Result: Down-regulated in Transcription
  misc_feature: MA Experiment 20000286 PARAMETER Experiment Name: At_Open_Flower_P Parameter: Age (day) Value: 21
  misc_feature: MA Experiment 20000286 PARAMETER Experiment Name: At_Open_Flower_P Parameter: Plant Line Value: WS
  misc_feature: MA Experiment 20000286 PARAMETER Experiment Name: At_Open_Flower_P Parameter: Tissue Value: Half Open vs. Whole Plant
  misc_feature: MA Experiment ID: 20000445 Result: Up-regulated in Transcription
  misc_feature: MA Experiment 20000445 PARAMETER Experiment Name: At_100uM_NAA__P Parameter: Age (day) Value: 14
  misc_feature: MA Experiment 20000445 PARAMETER Experiment Name: At_100uM_NAA__P Parameter: Organism Value: A. thaliana
  misc_feature: MA Experiment 20000445 PARAMETER Experiment Name: At_100uM_NAA__P Parameter: Plant Line Value: WS
  misc_feature: MA Experiment 20000445 PARAMETER Experiment Name: At_100uM_NAA__P Parameter: Timepoint (hr) Value: 6
  misc_feature: MA Experiment 20000445 PARAMETER Experiment Name: At_100uM_NAA__P Parameter: Tissue Value: Aerial
  misc_feature: MA Experiment 20000445 PARAMETER Experiment Name: At_100uM_NAA__P Parameter: Treatment Value: 100uM NAA vs. No Treatment
  misc_feature: MA Experiment ID: 20000495 Result: Down-regulated in Transcription
  misc_feature: MA Experiment 20000495 PARAMETER Experiment Name: At_Guard_Cells_P Parameter: Harvest Date Value: 8/2/2002
  misc_feature: MA Experiment 20000495 PARAMETER Experiment Name: At_Guard_Cells_P Parameter: Organism Value: A. thaliana
  misc_feature: MA Experiment 20000495 PARAMETER Experiment Name: At_Guard_Cells_P Parameter: Tissue Value: Guard Cells vs. Leaves
  misc_feature: MA Experiment ID: 20000573 Result: Down-regulated in Transcription
  misc_feature: MA Experiment 20000573 PARAMETER Experiment Name: At_100uM_ABA_Mutants__P Parameter: Organism Value: A. thaliana
  misc_feature: MA Experiment 20000573 PARAMETER Experiment Name: At_100uM_ABA_Mutants__P Parameter: Plant Line Value: CS22 vs. Ler wt
  misc_feature: MA Experiment 20000573 PARAMETER Experiment Name: At_100uM_ABA_Mutants__P Parameter: Timepoint (hr) Value: N/A
  misc_feature: MA Experiment 20000573 PARAMETER Experiment Name: At_100uM_ABA_Mutants__P Parameter: Tissue Value: Whole Plant
  misc_feature: MA Experiment 20000573 PARAMETER Experiment Name: At_100uM_ABA_Mutants__P Parameter: Treatment Value: None
  misc_feature: MA Experiment ID: 20000574 Result: Down-regulated in Transcription
  misc_feature: MA Experiment 20000574 PARAMETER Experiment Name: At_100uM_ABA_Mutants__P Parameter: Organism Value: A. thaliana
  misc_feature: MA Experiment 20000574 PARAMETER Experiment Name: At_100uM_ABA_Mutants__P Parameter: Plant Line Value: CS23 vs. Ler wt
  misc_feature: MA Experiment 20000574 PARAMETER Experiment Name: At_100uM_ABA_Mutants__P Parameter: Timepoint (hr) Value: N/A
  misc_feature: MA Experiment 20000574 PARAMETER Experiment Name: At_100uM_ABA_Mutants__P Parameter: Tissue Value: Whole Plant
  misc_feature: MA Experiment 20000574 PARAMETER Experiment Name: At_100uM_ABA_Mutants__P Parameter: Treatment Value: None
  misc_feature: MA Experiment ID: 20000794 Result: Down-regulated in Transcription
  misc_feature: MA Experiment 20000794 PARAMETER Experiment Name: At_Petals_P Parameter: Age (day) Value: 23-25 days
  misc_feature: MA Experiment 20000794 PARAMETER Experiment Name: At_Petals_P Parameter: Plant Line Value: WS
  misc_feature: MA Experiment 20000794 PARAMETER Experiment Name: At_Petals_P Parameter: Tissue Value: Petals vs. Whole plant
  misc_feature: MA Experiment ID: 20001247 Result: Up-regulated in Transcription
  misc_feature: MA Experiment 20001247 PARAMETER Experiment Name: At_Far-red-induction_P Parameter: Age (day) Value: 7
  misc_feature: MA Experiment 20001247 PARAMETER Experiment Name: At_Far-red-induction_P Parameter: Light Value: Far-red vs. White
  misc_feature: MA Experiment 20001247 PARAMETER Experiment Name: At_Far-red-induction_P Parameter: Organism Value: A. thaliana
  misc_feature: MA Experiment 20001247 PARAMETER Experiment Name: At_Far-red-induction_P Parameter: Plant Line Value: Columbia
  misc_feature: MA Experiment 20001247 PARAMETER Experiment Name: At_Far-red-induction_P Parameter: Timepoint (hr) Value: 1
  misc_feature: MA Experiment 20001247 PARAMETER Experiment Name: At_Far-red-induction_P Parameter: Tissue Value: Whole Plant
  misc_feature: MA Experiment ID: 20001557 Result: Up-regulated in Transcription
  misc_feature: MA Experiment 20001557 PARAMETER Experiment Name: At_Drought_Soil_Dry_P Parameter: Age (day) Value: 27
  misc_feature: MA Experiment 20001557 PARAMETER Experiment Name: At_Drought_Soil_Dry_P Parameter: Organism Value: A. thaliana
  misc_feature: MA Experiment 20001557 PARAMETER Experiment Name: At_Drought_Soil_Dry_P Parameter: Plant Line Value: WS
  misc_feature: MA Experiment 20001557 PARAMETER Experiment Name: At_Drought_Soil_Dry_P Parameter: Post Timepoint (hr) Value: 3
  misc_feature: MA Experiment 20001557 PARAMETER Experiment Name: At_Drought_Soil_Dry_P Parameter: Post-Treatment Value: Re-Water vs. No Drought
  misc_feature: MA Experiment 20001557 PARAMETER Experiment Name: At_Drought_Soil_Dry_P Parameter: Timepoint (day) Value: 13
  misc_feature: MA Experiment 20001557 PARAMETER Experiment Name: At_Drought_Soil_Dry_P Parameter: Treatment Value: Drought vs. No Drought
  misc_feature: MA Experiment ID: 20001558 Result: Up-regulated in Transcription
  misc_feature: MA Experiment 20001558 PARAMETER Experiment Name: At_Drought_Soil_Dry_P Parameter: Age (day) Value: 27
  misc_feature: MA Experiment 20001558 PARAMETER Experiment Name: At_Drought_Soil_Dry_P Parameter: Organism Value: A. thaliana
  misc_feature: MA Experiment 20001558 PARAMETER Experiment Name: At_Drought_Soil_Dry_P Parameter: Plant Line Value: WS
  misc_feature: MA Experiment 20001558 PARAMETER Experiment Name: At_Drought_Soil_Dry_P Parameter: Post Timepoint (hr) Value: 6
  misc_feature: MA Experiment 20001558 PARAMETER Experiment Name: At_Drought_Soil_Dry_P Parameter: Post-Treatment Value: Re-Water vs. No Drought
  misc_feature: MA Experiment 20001558 PARAMETER Experiment Name: At_Drought_Soil_Dry_P Parameter: Timepoint (day) Value: 13
  misc_feature: MA Experiment 20001558 PARAMETER Experiment Name: At_Drought_Soil_Dry_P Parameter: Treatment Value: Drought vs. No Drought
  misc_feature: MA Experiment ID: 20001560 Result: Up-regulated in Transcription
  misc_feature: MA Experiment 20001560 PARAMETER Experiment Name: At_Drought_Soil_Dry_P Parameter: Age (day) Value: 28
  misc_feature: MA Experiment 20001560 PARAMETER Experiment Name: At_Drought_Soil_Dry_P Parameter: Organism Value: A. thaliana
  misc_feature: MA Experiment 20001560 PARAMETER Experiment Name: At_Drought_Soil_Dry_P Parameter: Plant Line Value: WS
  misc_feature: MA Experiment 20001560 PARAMETER Experiment Name: At_Drought_Soil_Dry_P Parameter: Post Timepoint (hr) Value: None
  misc_feature: MA Experiment 20001560 PARAMETER Experiment Name: At_Drought_Soil_Dry_P Parameter: Post-Treatment Value: None
  misc_feature: MA Experiment 20001560 PARAMETER Experiment Name: At_Drought_Soil_Dry_P Parameter: Timepoint (day) Value: 14
  misc_feature: MA Experiment 20001560 PARAMETER Experiment Name: At_Drought_Soil_Dry_P Parameter: Treatment Value: Drought vs. No Drought
  misc_feature: MA Experiment ID: 20001906 Result: Down-regulated in Transcription
  misc_feature: MA Experiment 20001906 PARAMETER Experiment Name: At_Drought_Reproduction_P Parameter: Age (day) Value: 35
  misc_feature: MA Experiment 20001906 PARAMETER Experiment Name: At_Drought_Reproduction_P Parameter: Organism Value: A. thaliana
  misc_feature: MA Experiment 20001906 PARAMETER Experiment Name: At_Drought_Reproduction_P Parameter: Plant Line Value: WS
  misc_feature: MA Experiment 20001906 PARAMETER Experiment Name: At_Drought_Reproduction_P Parameter: Timepoint (day) Value: 5
  misc_feature: MA Experiment 20001906 PARAMETER Experiment Name: At_Drought_Reproduction_P Parameter: Tissue Value: Siliques
  misc_feature: MA Experiment 20001906 PARAMETER Experiment Name: At_Drought_Reproduction_P Parameter: Treatment Value: Drought vs. No Drought
  misc_feature: MA Experiment ID: 20001911 Result: Down-regulated in Transcription
  misc_feature: MA Experiment 20001911 PARAMETER Experiment Name: At_Drought_Reproduction_P Parameter: Age (day) Value: 40
  misc_feature: MA Experiment 20001911 PARAMETER Experiment Name: At_Drought_Reproduction_P Parameter: Organism Value: A. thaliana
  misc_feature: MA Experiment 20001911 PARAMETER Experiment Name: At_Drought_Reproduction_P Parameter: Plant Line Value: WS
  misc_feature: MA Experiment 20001911 PARAMETER Experiment Name: At_Drought_Reproduction_P Parameter: Timepoint (day) Value: 10
  misc_feature: MA Experiment 20001911 PARAMETER Experiment Name: At_Drought_Reproduction_P Parameter: Tissue Value: Flowers
  misc_feature: MA Experiment 20001911 PARAMETER Experiment Name: At_Drought_Reproduction_P Parameter: Treatment Value: Drought vs. No Drought
aaaaatctcatttctatctctctctctcttctcaacaatggcttcactcaaatctctcttcctcctcttcctcttcttcttcacagctcaatctcgcttaaccacaaacttctactcaaaaacatgcccaagattcctcgacatcatccgtgacacaatcacaaacaaacaaatcactaatcccaccaccgcagccgccgttatccgtctcttcttccacgactgtttccctaacggctgcgacgcctccgtcctcatctcctccaccgccttcaacaccgcagaacgtgactcttccatcaacctctcactccccggagacggtttcgacgtcattgtccgagccaaaacagctctcgaactcgcttgtcccaacacagtttcttgctcagacatcatctccgtcgcaacacgtgatcttctaatcaccgtcggtggtccttactacgacgttttcctcggccgtcgtgattcaagaacgtcgaaatcttctcttttaaccgatcttcttcctcttccttccacaccaatctctaaaatcattcaacagtttgaatcaaaaggtttcactgttcaagaaatggttgctcttagtggagcacattctatagggttttcacattgtaaagagtttgtgggtcgggtgggtcggaataataccgggtataacccgagattcgcagtggctttgaagaaagcttgtgctaattaccctaaagatccgactatctctgtgtttaatgatattatgactcctaataagtttgataatatgtattatcagaatcttaaaaagggtcttgggttacttgaatcggatcatggattatattctgaccctagaaccagatattttgttgatctttatgctaagaatcaagatctgtttttcaaagattttgctaaagctatgcagaagttgagtctttttggtatacagactggtagaagaggagagatccgaagaaggtgcgatgctattaattgagtttatgtttttaatttatttaatttttgggttatattggattgtgaatcttctgagttattacactcatatgtttttgtgtaatgtaaaagatatatggttgattgttctaattaagagattggttttggt

SEQ ID NO: 30084 - protein, 328 aa, Arabidopsis thaliana
  peptide (1)..(328): Ceres Seq. ID no. 12335202
  misc_feature (49)..(292): Pfam Name: Peroxidase Pfam Description: Peroxidase
  misc_feature (29)..(327): Homolog of NCBI NO: 32489883 NR Description: OSJNBa0060P14.16 [Oryza sativa (japonica
  misc_feature (19)..(328): Homolog of NCBI NO: 15221670 NR Description: peroxidase, putative; protein id: At1g24110.1
  misc_feature (13)..(328): Homolog of NCBI NO: 15236620 NR Description: peroxidase, putative; protein id: At4g17690.1
  misc_feature (33)..(328): Homolog of NCBI NO: 21593687 NR Description: peroxidase [Arabidopsis thaliana]
  misc_feature (33)..(328): Homolog of NCBI NO: 18422742 NR Description: peroxidase, putative
  misc_feature (33)..(328): Homolog of NCBI NO: 9759442 NR Description: peroxidase [Arabidopsis thaliana]
  misc_feature (54)..(328): Homolog of NCBI NO: 1890317 NR Description: peroxidase ATP26a [Arabidopsis thaliana]
  misc_feature (19)..(328): Homolog of NCBI NO: 15242580 NR Description: peroxidase, putative; protein id: At5g40150.1
  misc_feature (13)..(328): Homolog of NCBI NO: 14334600 NR Description: putative peroxidase [Arabidopsis thaliana]
  misc_feature (13)..(328): Homolog of NCBI NO: 15232929 NR Description: peroxidase, putative
KISFLSLSLFSTMASLKSLFLLFLFFFTAQSRLTTNFYSKTCPRFLDIIRDTITNKQITNPTTAAAVIRLFFHDCFPNGCDASVLISSTAFNTAERDSSINLSLPGDGFDVIVRAKTALELACPNTVSCSDIISVATRDLLITVGGPYYDVFLGRRDSRTSKSSLLTDLLPLPSTPISKIIQQFESKGFTVQEMVALSGAHSIGFSHCKEFVGRVGRNNTGYNPRFAVALKKACANYPKDPTISVFNDIMTPNKFDNMYYQNLKKGLGLLESDHGLYSDPRTRYFVDLYAKNQDLFFKDFAKAMQKLSLFGIQTGRRGEIRRRCDAIN

SEQ ID NO: 30085 - protein, 316 aa, Arabidopsis thaliana
  peptide (1)..(316): Ceres Seq. ID no. 12335203
  misc_feature (37)..(280): Pfam Name: Peroxidase Pfam Description: Peroxidase
  misc_feature (17)..(315): Homolog of NCBI NO: 32489883 NR Description: OSJNBa0060P14.16 [Oryza sativa (japonica
  misc_feature (7)..(316): Homolog of NCBI NO: 15221670 NR Description: peroxidase, putative; protein id: At1g24110.1
  misc_feature (1)..(316): Homolog of NCBI NO: 15236620 NR Description: peroxidase, putative; protein id: At4g17690.1
  misc_feature (21)..(316): Homolog of NCBI NO: 18422742 NR Description: peroxidase, putative
  misc_feature (21)..(316): Homolog of NCBI NO: 21593687 NR Description: peroxidase [Arabidopsis thaliana]
  misc_feature (21)..(316): Homolog of NCBI NO: 9759442 NR Description: peroxidase [Arabidopsis thaliana]
  misc_feature (42)..(316): Homolog of NCBI NO: 1890317 NR Description: peroxidase ATP26a [Arabidopsis thaliana]
  misc_feature (7)..(316): Homolog of NCBI NO: 15242580 NR Description: peroxidase, putative; protein id: At5g40150.1
  misc_feature (1)..(316): Homolog of NCBI NO: 14334600 NR Description: putative peroxidase [Arabidopsis thaliana]
  misc_feature (1)..(316): Homolog of NCBI NO: 15232929 NR Description: peroxidase, putative
MASLKSLFLLFLFFFTAQSRLTTNFYSKTCPRFLDIIRDTITNKQITNPTTAAAVIRLFFHDCFPNGCDASVLISSTAFNTAERDSSINLSLPGDGFDVIVRAKTALELACPNTVSCSDIISVATRDLLITVGGPYYDVFLGRRDSRTSKSSLLTDLLPLPSTPISKIIQQFESKGFTVQEMVALSGAHSIGFSHCKEFVGRVGRNNTGYNPRFAVALKKACANYPKDPTISVFNDIMTPNKFDNMYYQNLKKGLGLLESDHGLYSDPRTRYFVDLYAKNQDLFFKDFAKAMQKLSLFGIQTGRRGEIRRRCDAIN

SEQ ID NO: 30086 - DNA, 1441 bp, Arabidopsis thaliana
  misc_feature (1)..(1441): Ceres Seq. ID no. 12385648
  misc_feature: MA Experiment ID: 108577 Result: Up-regulated in Transcription
  misc_feature: MA Experiment 108577 PARAMETER Experiment Name: At_42deg_Heat_cDNA_P Parameter: Temperature (deg C) Value: 42 vs. 22
  misc_feature: MA Experiment 108577 PARAMETER Experiment Name: At_42deg_Heat_cDNA_P Parameter: Timepoint (hr) Value: 6
  misc_feature: MA Experiment 108577 PARAMETER Experiment Name: At_42deg_Heat_cDNA_P Parameter: Tissue Value: Aerial
  misc_feature: MA Experiment ID: 108595 Result: Down-regulated in Transcription
  misc_feature: MA Experiment 108595 PARAMETER Experiment Name: At_Ler-pi_Ovule_cDNA_P Parameter: Plant Line Value: null
  misc_feature: MA Experiment ID: 20000173 Result: Up-regulated in Transcription
  misc_feature: MA Experiment 20000173 PARAMETER Experiment Name: At_42deg_Heat_P Parameter: Age (day) Value: 14
  misc_feature: MA Experiment 20000173 PARAMETER Experiment Name: At_42deg_Heat_P Parameter: Organism Value: A. thaliana
  misc_feature: MA Experiment 20000173 PARAMETER Experiment Name: At_42deg_Heat_P Parameter: Plant Line Value: WS
  misc_feature: MA Experiment 20000173 PARAMETER Experiment Name: At_42deg_Heat_P Parameter: Temperature (deg C) Value: 42 vs. 22
  misc_feature: MA Experiment 20000173 PARAMETER Experiment Name: At_42deg_Heat_P Parameter: Timepoint (hr) Value: 6
  misc_feature: MA Experiment 20000173 PARAMETER Experiment Name: At_42deg_Heat_P Parameter: Tissue Value: Aerial
  misc_feature: MA Experiment ID: 20000184 Result: Down-regulated in Transcription
  misc_feature: MA Experiment 20000184 PARAMETER Experiment Name: At_Shoots__P Parameter: Age (day) Value: 7
  misc_feature: MA Experiment 20000184 PARAMETER Experiment Name: At_Shoots__P Parameter: Tissue Value: Shoots vs. Whole Plant
  misc_feature: MA Experiment ID: 20000235 Result: Down-regulated in Transcription
  misc_feature: MA Experiment 20000235 PARAMETER Experiment Name: At_Siliques_P Parameter: Age (day) Value: 21
  misc_feature: MA Experiment 20000235 PARAMETER Experiment Name: At_Siliques_P Parameter: Organism Value: A. thaliana
  misc_feature: MA Experiment 20000235 PARAMETER Experiment Name: At_Siliques_P Parameter: Plant Line Value: WS
  misc_feature: MA Experiment 20000235 PARAMETER Experiment Name: At_Siliques_P Parameter: Tissue Value: 5-10mm Siliques vs. Whole Plant
  misc_feature: MA Experiment ID: 20000496 Result: Up-regulated in Transcription
  misc_feature: MA Experiment 20000496 PARAMETER Experiment Name: At_Guard_Cells_P Parameter: Harvest Date Value: 7/19/2002
  misc_feature: MA Experiment 20000496 PARAMETER Experiment Name: At_Guard_Cells_P Parameter: Organism Value: Canola
  misc_feature: MA Experiment 20000496 PARAMETER Experiment Name: At_Guard_Cells_P Parameter: Tissue Value: Guard Cells vs. Leaves
gaggaccatttcttctctctcattctctcttctgacgtgtttcccttcttcggtttctcatcctcacgtccgccggatttcgaggaaacgaagaagaagaagaacaacaacaacaaaagccttttgagatatggacagcttctggcaattaggtgatgagctacgaggtcagacgagagcatcagaggatcacaaatggtctactgttgcaacgaagctagctgagcaaactagaatgaaaggggagaggatgaacaatcttgatctctccaaaggttacactgagtttagaccaagtgagaaattcagtttccaggagaacaatcttaacttcaacatgttgaatttggatggtaaatttggtgaaagcatcatggggaagacttcgatgcagagcaatgtttataatatgaatactgttttccagaagaatgactttaagagtggaggcaacatgaaagttaacaagtataatggtaatgttgttgctaacaaggagatgagcaacaacaaacataacaacaactgcaatgataatgggaatatgaatttggctgttgacaagaggtttaaaaccttgcctgcttcggagactcttccgaggaatgaagttcttggtggttacatctttgtttgcaacaatgatactatgcaggaggatatgaaacgtcacctctttggtttacctccaagatacagagactctgttcgagctataacacctggattgcctctgtttctttacaactacaccactcaccagcttcatggtatctttgaggcaacaacttttggaggtactaatattgatgctactgcttgggaagacaaaaagtgcaaaggagagtcaaggtttccggctcaggtaaggatcagagtgaggaaaatctgcaaagccttggaagaggactccttcaggccagtacttcaccactatgatggtccaaaattccgccttgagctctctgttcctgagacattggatctgctagatctttgcgaacaagctggttctgcataagccgaaacgatcaaccttgcaatgccacgttgcaaagagggggatgttttgtatgaaatctatctatatatgtaagacctaccgtaagagcgtaagcttttgggatttagttaagagtcggattcaaatgtatgtttactaagaagggatgagagtatgtgtggtcttaaggcaagcaaaagagcgaagaggctctgccgaataagcgactactcttgttctgtgtcgtgtctgatgtgtgagtgtgtgtctgtgtttgtgagagattcgatactctttgaaacaaagatttatgtagaagaatatagagaaagaaagactactataaacagagccaaaaaatgatgtgagctactgtttgtgcttgcttgtgtaaggataaaacaaattgtcctaaatgacaagtttaacttttaagtg

SEQ ID NO: 30087 - protein, 296 aa, Arabidopsis thaliana
  peptide (1)..(296): Ceres Seq. ID no. 12385649
  misc_feature (141)..(289): Homolog of NCBI NO: 34896110 NR Description: P0701D05.9 [Oryza sativa (japonica
  misc_feature (174)..(285): Homolog of NCBI NO: 7488804 NR Description: gda-1 protein - garden pea
  misc_feature (37)..(283): Homolog of NCBI NO: 34913876 NR Description: B1156H12.22 [Oryza sativa (japonica
  misc_feature (87)..(289): Homolog of NCBI NO: 9757950 NR Description: gene_id:MJC20.15~similar to unknown
  misc_feature (47)..(289): Homolog of NCBI NO: 18422167 NR Description: putative protein
  misc_feature (113)..(292): Homolog of NCBI NO: 584825 NR Description: B2 PROTEIN
  misc_feature (82)..(296): Homolog of NCBI NO: 21665866 NR Description: GDA2 protein [Pisum sativum]
  misc_feature (1)..(296): Homolog of NCBI NO: 2369766 NR Description: hypothetical protein [Citrus x paradisi]
  misc_feature (1)..(296): Homolog of NCBI NO: 21592623 NR Description: gda-1, putative [Arabidopsis thaliana]
  misc_feature (1)..(296): Homolog of NCBI NO: 15232081 NR Description: gda-1, putative
MDSFWQLGDELRGQTRASEDHKWSTVATKLAEQTRMKGERMNNLDLSKGYTEFRPSEKFSFQENNLNFNMLNLDGKFGESIMGKTSMQSNVYNMNTVFQKNDFKSGGNMKVNKYNGNVVANKEMSNNKHNNNCNDNGNMNLAVDKRFKTLPASETLPRNEVLGGYIFVCNNDTMQEDMKRHLFGLPPRYRDSVRAITPGLPLFLYNYTTHQLHGIFEATTFGGTNIDATAWEDKKCKGESRFPAQVRIRVRKICKALEEDSFRPVLHHYDGPKFRLELSVPETLDLLDLCEQAGSA

SEQ ID NO: 30088 - protein, 261 aa, Arabidopsis thaliana
  peptide (1)..(261): Ceres Seq. ID no. 12385650
  misc_feature (106)..(254): Homolog of NCBI NO: 34896110 NR Description: P0701D05.9 [Oryza sativa (japonica
  misc_feature (139)..(250): Homolog of NCBI NO: 7488804 NR Description: gda-1 protein - garden pea
  misc_feature (2)..(248): Homolog of NCBI NO: 34913876 NR Description: B1156H12.22 [Oryza sativa (japonica
  misc_feature (52)..(254): Homolog of NCBI NO: 9757950 NR Description: gene_id:MJC20.15~similar to unknown
  misc_feature (12)..(254): Homolog of NCBI NO: 18422167 NR Description: putative protein
  misc_feature (78)..(257): Homolog of NCBI NO: 584825 NR Description: B2 PROTEIN
  misc_feature (47)..(261): Homolog of NCBI NO: 21665866 NR Description: GDA2 protein [Pisum sativum]
  misc_feature (1)..(261): Homolog of NCBI NO: 2369766 NR Description: hypothetical protein [Citrus x paradisi]
  misc_feature (1)..(261): Homolog of NCBI NO: 21592623 NR Description: gda-1, putative [Arabidopsis thaliana]
  misc_feature (1)..(261): Homolog of NCBI NO: 15232081 NR Description: gda-1, putative
MKGERMNNLDLSKGYTEFRPSEKFSFQENNLNFNMLNLDGKFGESIMGKTSMQSNVYNMNTVFQKNDFKSGGNMKVNKYNGNVVANKEMSNNKHNNNCNDNGNMNLAVDKRFKTLPASETLPRNEVLGGYIFVCNNDTMQEDMKRHLFGLPPRYRDSVRAITPGLPLFLYNYTTHQLHGIFEATTFGGTNIDATAWEDKKCKGESRFPAQVRIRVRKICKALEEDSFRPVLHHYDGPKFRLELSVPETLDLLDLCEQAGSA

SEQ ID NO: 30089 - protein, 256 aa, Arabidopsis thaliana
  peptide (1)..(256): Ceres Seq. ID no. 12385651
  misc_feature (101)..(249): Homolog of NCBI NO: 34896110 NR Description: P0701D05.9 [Oryza sativa (japonica
  misc_feature (134)..(245): Homolog of NCBI NO: 7488804 NR Description: gda-1 protein - garden pea
  misc_feature (1)..(243): Homolog of NCBI NO: 34913876 NR Description: B1156H12.22 [Oryza sativa (japonica
  misc_feature (47)..(249): Homolog of NCBI NO: 9757950 NR Description: gene_id:MJC20.15~similar to unknown
  misc_feature (7)..(249): Homolog of NCBI NO: 18422167 NR Description: putative protein
  misc_feature (73)..(252): Homolog of NCBI NO: 584825 NR Description: B2 PROTEIN
  misc_feature (42)..(256): Homolog of NCBI NO: 21665866 NR Description: GDA2 protein [Pisum sativum]
  misc_feature (1)..(256): Homolog of NCBI NO: 2369766 NR Description: hypothetical protein [Citrus x paradisi]
  misc_feature (1)..(256): Homolog of NCBI NO: 21592623 NR Description: gda-1, putative [Arabidopsis thaliana]
  misc_feature (1)..(256): Homolog of NCBI NO: 15232081 NR Description: gda-1, putative
MNNLDLSKGYTEFRPSEKFSFQENNLNFNMLNLDGKFGESIMGKTSMQSNVYNMNTVFQKNDFKSGGNMKVNKYNGNVVANKEMSNNKHNNNCNDNGNMNLAVDKRFKTLPASETLPRNEVLGGYIFVCNNDTMQEDMKRHLFGLPPRYRDSVRAITPGLPLFLYNYTTHQLHGIFEATTFGGTNIDATAWEDKKCKGESRFPAQVRIRVRKICKALEEDSFRPVLHHYDGPKFRLELSVPETLDLLDLCEQAGSA

SEQ ID NO: 30090 - DNA, 893 bp, Arabidopsis thaliana
  misc_feature (1)..(893): Ceres Seq. ID no. 12322897
  misc_feature: MA Experiment ID: 108434 Result: Up-regulated in Transcription
  misc_feature: MA Experiment 108434 PARAMETER Experiment Name: At_Root_Tips_cDNA_P Parameter: Tissue Value: Root Tips
  misc_feature: MA Experiment ID: 108462 Result: Down-regulated in Transcription
  misc_feature: MA Experiment 108462 PARAMETER Experiment Name: At_Germinating_Seeds_cDNA_P Parameter: Age (day) Value: 2 vs. 0
  misc_feature: MA Experiment 108462 PARAMETER Experiment Name: At_Germinating_Seeds_cDNA_P Parameter: Tissue Value: Germinating Seeds
  misc_feature: MA Experiment ID: 108463 Result: Down-regulated in Transcription
  misc_feature: MA Experiment 108463 PARAMETER Experiment Name: At_Germinating_Seeds_cDNA_P Parameter: Age (day) Value: 3 vs. 0
  misc_feature: MA Experiment 108463 PARAMETER Experiment Name: At_Germinating_Seeds_cDNA_P Parameter: Tissue Value: Germinating Seeds
  misc_feature: MA Experiment ID: 20000111 Result: Up-regulated in Transcription
  misc_feature: MA Experiment 20000111 PARAMETER Experiment Name: At_42deg_Heat_cDNA_P Parameter: Temperature (deg C) Value: 42 vs. 22
  misc_feature: MA Experiment 20000111 PARAMETER Experiment Name: At_42deg_Heat_cDNA_P Parameter: Timepoint (hr) Value: 6
  misc_feature: MA Experiment 20000111 PARAMETER Experiment Name: At_42deg_Heat_cDNA_P Parameter: Tissue Value: Aerial
  misc_feature: MA Experiment ID: 20000113 Result: Up-regulated in Transcription
  misc_feature: MA Experiment 20000113 PARAMETER Experiment Name: At_42deg_Heat_cDNA_P Parameter: Temperature (deg C) Value: 42 vs. 22
  misc_feature: MA Experiment 20000113 PARAMETER Experiment Name: At_42deg_Heat_cDNA_P Parameter: Timepoint (hr) Value: 8
  misc_feature: MA Experiment 20000113 PARAMETER Experiment Name: At_42deg_Heat_cDNA_P Parameter: Tissue Value: Aerial
  misc_feature: MA Experiment ID: 20000173 Result: Up-regulated in Transcription
  misc_feature: MA Experiment 20000173 PARAMETER Experiment Name: At_42deg_Heat_P Parameter: Age (day) Value: 14
  misc_feature: MA Experiment 20000173 PARAMETER Experiment Name: At_42deg_Heat_P Parameter: Organism Value: A. thaliana
  misc_feature: MA Experiment 20000173 PARAMETER Experiment Name: At_42deg_Heat_P Parameter: Plant Line Value: WS
  misc_feature: MA Experiment 20000173 PARAMETER Experiment Name: At_42deg_Heat_P Parameter: Temperature (deg C) Value: 42 vs. 22
  misc_feature: MA Experiment 20000173 PARAMETER Experiment Name: At_42deg_Heat_P Parameter: Timepoint (hr) Value: 6
  misc_feature: MA Experiment 20000173 PARAMETER Experiment Name: At_42deg_Heat_P Parameter: Tissue Value: Aerial
  misc_feature: MA Experiment ID: 20000794 Result: Down-regulated in Transcription
  misc_feature: MA Experiment 20000794 PARAMETER Experiment Name: At_Petals_P Parameter: Age (day) Value: 23-25 days
  misc_feature: MA Experiment 20000794 PARAMETER Experiment Name: At_Petals_P Parameter: Plant Line Value: WS
  misc_feature: MA Experiment 20000794 PARAMETER Experiment Name: At_Petals_P Parameter: Tissue Value: Petals vs. Whole plant
  misc_feature: MA Experiment ID: 20001560 Result: Up-regulated in Transcription
  misc_feature: MA Experiment 20001560 PARAMETER Experiment Name: At_Drought_Soil_Dry_P Parameter: Age (day) Value: 28
  misc_feature: MA Experiment 20001560 PARAMETER Experiment Name: At_Drought_Soil_Dry_P Parameter: Organism Value: A. thaliana
  misc_feature: MA Experiment 20001560 PARAMETER Experiment Name: At_Drought_Soil_Dry_P Parameter: Plant Line Value: WS
  misc_feature: MA Experiment 20001560 PARAMETER Experiment Name: At_Drought_Soil_Dry_P Parameter: Post Timepoint (hr) Value: None
  misc_feature: MA Experiment 20001560 PARAMETER Experiment Name: At_Drought_Soil_Dry_P Parameter: Post-Treatment Value: None
  misc_feature: MA Experiment 20001560 PARAMETER Experiment Name: At_Drought_Soil_Dry_P Parameter: Timepoint (day) Value: 14
  misc_feature: MA Experiment 20001560 PARAMETER Experiment Name: At_Drought_Soil_Dry_P Parameter: Treatment Value: Drought vs. No Drought
gtcgtcttcgtcgatcatcgccgggaaaccacaccagtctcaatggcgaaaactctatcccgatccaccgcctcatgcgtcgctaagcgtttcttttccacctccaatgccgtcgcctctccttctccgcttccttctcatctcatctctcgtcgattctcaccgacgatcttccacgccgtcggatacatcccagctttgacccgcttcacaacgatccggacccggatggataggtctggcggctcatattcgccgcttaaatccggatcaaacttcagcgatcgaccacccactgaaatggcacctctatttcctggttgcgattacgagcattggcttatcgtcatggagaagcccggaggtgaaaatgctcagaaacagcaaatgatcgattgctatgttcaaaccctagctaaaattgttggcagtgaggaagaggctagaaagaagatctataatgtttcgtgtgagaggtattttgggtttggctgtgagattgatgaggagacatcaaacaaactcgaaggacttcctggtgttctgttcgtgcttccggactcttatgttgatccagagttcaaagattacggagctgaactgtttgtgaatggagaagtagttcctcgtccaccagagagacagaggaggatggtggagttaacgaatcaaagagggtcggataaaccaaagtaccatgaccgaatcagaaatgtccgacggagggagaacatgcgttgactcttattattctcagactttacgctagagcaatcatttcgatttgatctccgatgcttttttttgttggtttgttcttttaatttgctagactcttaatgaataatgtatatgatggtgttttggtcatatcgaatgtatcaattgtttct

SEQ ID NO: 30091 - protein, 246 aa, Arabidopsis thaliana
  peptide (1)..(246): Ceres Seq. ID no. 12322898
  misc_feature (15)..(243): Homolog of NCBI NO: 15230785 NR Description: DAG protein, putative; protein id: At3g06790.1
  misc_feature (15)..(243): Homolog of NCBI NO: 27754695 NR Description: putative DAG protein [Arabidopsis thaliana]
  misc_feature (72)..(244): Homolog of NCBI NO: 38344141 NR Description: OSJNBa0041A02.8 [Oryza sativa (japonica
  misc_feature (64)..(246): Homolog of NCBI NO: 34897972 NR Description: putative plastid protein [Oryza sativa (japonica
  misc_feature (55)..(246): Homolog of NCBI NO: 2440029 NR Description: DAL1 protein [Arabidopsis thaliana]
  misc_feature (55)..(246): Homolog of NCBI NO: 21617909 NR Description: plastid protein [Arabidopsis thaliana]
  misc_feature (55)..(246): Homolog of NCBI NO: 25370552 NR Description: DAG protein homolog [imported] - Arabidopsis
  misc_feature (55)..(246): Homolog of NCBI NO: 15226108 NR Description: plastid protein
  misc_feature (15)..(246): Homolog of NCBI NO: 15223247 NR Description: plastid protein, putative
  misc_feature (15)..(246): Homolog of NCBI NO: 15226934 NR Description: unknown protein
VVFVDHRRETTPVSMAKTLSRSTASCVAKRFFSTSNAVASPSPLPSHLISRRFSPTIFHAVGYIPALTRFTTIRTRMDRSGGSYSPLKSGSNFSDRPPTEMAPLFPGCDYEHWLIVMEKPGGENAQKQQMIDCYVQTLAKIVGSEEEARKKIYNVSCERYFGFGCEIDEETSNKLEGLPGVLFVLPDSYVDPEFKDYGAELFVNGEVVPRPPERQRRMVELTNQRGSDKPKYHDRIRNVRRRENMR

SEQ ID NO: 30092 - protein, 232 aa, Arabidopsis thaliana
  peptide (1)..(232): Ceres Seq. ID no. 12322899
  misc_feature (1)..(229): Homolog of NCBI NO: 15230785 NR Description: DAG protein, putative; protein id: At3g06790.1
  misc_feature (1)..(229): Homolog of NCBI NO: 27754695 NR Description: putative DAG protein [Arabidopsis thaliana]
  misc_feature (58)..(230): Homolog of NCBI NO: 38344141 NR Description: OSJNBa0041A02.8 [Oryza sativa (japonica
  misc_feature (50)..(232): Homolog of NCBI NO: 34897972 NR Description: putative plastid protein [Oryza sativa (japonica
  misc_feature (41)..(232): Homolog of NCBI NO: 2440029 NR Description: DAL1 protein [Arabidopsis thaliana]
  misc_feature (41)..(232): Homolog of NCBI NO: 21617909 NR Description: plastid protein [Arabidopsis thaliana]
  misc_feature (41)..(232): Homolog of NCBI NO: 25370552 NR Description: DAG protein homolog [imported] - Arabidopsis
  misc_feature (41)..(232): Homolog of NCBI NO: 15226108 NR Description: plastid protein
  misc_feature (1)..(232): Homolog of NCBI NO: 15223247 NR Description: plastid protein, putative
  misc_feature (1)..(232): Homolog of NCBI NO: 15226934 NR Description: unknown protein
MAKTLSRSTASCVAKRFFSTSNAVASPSPLPSHLISRRFSPTIFHAVGYIPALTRFTTIRTRMDRSGGSYSPLKSGSNFSDRPPTEMAPLFPGCDYEHWLIVMEKPGGENAQKQQMIDCYVQTLAKIVGSEEEARKKIYNVSCERYFGFGCEIDEETSNKLEGLPGVLFVLPDSYVDPEFKDYGAELFVNGEVVPRPPERQRRMVELTNQRGSDKPKYHDRIRNVRRRENMR

SEQ ID NO: 30093 - protein, 170 aa, Arabidopsis thaliana
  peptide (1)..(170): Ceres Seq. ID no. 12322900
  misc_feature (1)..(167): Homolog of NCBI NO: 15230785 NR Description: DAG protein, putative; protein id: At3g06790.1
  misc_feature (1)..(167): Homolog of NCBI NO: 27754695 NR Description: putative DAG protein [Arabidopsis thaliana]
  misc_feature (1)..(168): Homolog of NCBI NO: 38344141 NR Description: OSJNBa0041A02.8 [Oryza sativa (japonica
  misc_feature (1)..(170): Homolog of NCBI NO: 34897972 NR Description: putative plastid protein [Oryza sativa (japonica
  misc_feature (1)..(170): Homolog of NCBI NO: 2440029 NR Description: DAL1 protein [Arabidopsis thaliana]
  misc_feature (1)..(170): Homolog of NCBI NO: 21617909 NR Description: plastid protein [Arabidopsis thaliana]
  misc_feature (1)..(170): Homolog of NCBI NO: 25370552 NR Description: DAG protein homolog [imported] - Arabidopsis
  misc_feature (1)..(170): Homolog of NCBI NO: 15226108 NR Description: plastid protein
  misc_feature (1)..(170): Homolog of NCBI NO: 15223247 NR Description: plastid protein, putative
  misc_feature (1)..(170): Homolog of NCBI NO: 15226934 NR Description: unknown protein
MDRSGGSYSPLKSGSNFSDRPPTEMAPLFPGCDYEHWLIVMEKPGGENAQKQQMIDCYVQTLAKIVGSEEEARKKIYNVSCERYFGFGCEIDEETSNKLEGLPGVLFVLPDSYVDPEFKDYGAELFVNGEVVPRPPERQRRMVELTNQRGSDKPKYHDRIRNVRRRENMR
